United States Patent Application Publication US 2005/0228172 A9 - sequence listing, part 162

SEQ ID NO: 723808 - DNA, 1119 bp, Homo sapiens
  misc_feature 1014, 1015, 1016, 1017, 1018, 1019, 1020, 1021, 1022, 1023,1024, 1025, 1026, 1027, 1028, 1029, 1030, 1031, 1032, 1033,1034, 1035, 1036, 1037, 1038, 1039, 1040, 1041, 1042, 1043,1044, 1045, 1046, 1047, 1048, 1049, 1050, 1051, 1052: n = A,T,C or G
  misc_feature 1053, 1054, 1055, 1056, 1057, 1058, 1059, 1060, 1061, 1062,1063, 1064, 1065, 1066, 1067, 1068, 1069, 1070, 1071, 1072,1073, 1074, 1075, 1076, 1077, 1078, 1079, 1080, 1081, 1082,1083, 1084, 1085, 1086, 1087, 1088, 1089, 1090, 1091: n = A,T,C or G
  misc_feature 1092, 1093, 1094, 1095, 1096, 1097, 1098, 1099, 1100, 1101,1102, 1103, 1104, 1105, 1106, 1107, 1108, 1109, 1110, 1111,1112, 1113: n = A,T,C or G
gggactgaggcctggagcagacacagggaacaggagctgaaaaccaggtctgcgtgagggcagagcctcttagccactggccgcagcatctctcagggatactgtgatgtgccacccggacgctcggtccaggaaggaactcgctgccccagtggacagggttgactgtcaccacacagcctttaactgtctccactttaggggctgccccagtggcaaacagcacttctaccactgccacaccctcccagagtaccccgtgctacgattgactgacagaggtggggtatgcgtgccagttggtcaggccccaggcaggcctctccagcagcctgtttgctctgtggctccctgtgggatcagtggtctccatctggcctgcccaggcctgcttccttccctgccttccacaggtgtggaccccaggagcacatcctaatacacattcttcattccctgctctccagggaagctgcaccaagagggatcccaggagaccaaggctggtgctgaagggtttcctggagagacgtgatgagcccaggtgaggcatggagcccctcctgagcagcccctcctgagcaggagtggagtcgcctggcttgtgagagctcgtggtcaggaaactgggaagtcaaaccacagagggctagtcagggccccagggctgccccagagagagctgccggtgggcagcatccttccgaggctcagcgcctgtgggcgggtcaaggcagtgcttcccagtttgtctcttatttttagcaaagttgcctctgctacaaaatccgttatttgaagcattttcactgctctacrccctctggttctgcactgcagaattttgtaaacagggttgactctagttttctatgtttttaacttctttctccttctcacctcatctgactttattttgatcttaggacacatgaagagaaccctccctctcattatctccctgtttgaaatcaatctattgcagccttctcagtctcccgtgtaccatgccannnnnnnnnnnnnnnnnnnnnnnnnnnnnnnnnnnnnnnnnnnnnnnnnnnnnnnnnnnnnnnnnnnnnnnnnnnnnnnnnnnnnnnnnnnnnnnnnnnngtatga

SEQ ID NO: 723809 - DNA, 606 bp, Homo sapiens
gcagtgaccacrcccatcagagcagcagcccctcccactatagcagtgaccacacccatcagagcagcagcccctccaactatagcagtgaccacgcccatcagagcagcacccctcccattatagcagtgaccacacccatcagagcagcagcccctcccattatagcagtggccatgcccaccagaggagcagcccctcccattatagcagtggccacacccagcagaataagtgcccatcacagcagcagcccctcttgccctcctgagtgaggagctgagcacttcacacaggtatcctcactgcctttttttttttttttttttttttgagatggagtcttgctctgtctcctaggctggagtgcagtggcccaatcttagcttactacagcctggggctcaagcaattctcccgcctcagcctcccgagtagctgggattacaggcacccgccaccacacccagctaatttttgtgtttttagtagagacagtgtttcaccacgttggcaatgctggtctcaatctcctgacctcaagtaatccacccacctcggcctcccaaagtgctgggattccatgcgtgagccaccgcgctggcc

SEQ ID NO: 723810 - DNA, 606 bp, Homo sapiens
gcagtgaccacacccatcagagcagcagcccctcccactatagcagtgaccacacccatcagagcagcagcccctccaactatagcagtgaccacgcccatcagagcagcacccctcccattatagcagtgaccacacccatcagagcagcagcccctcccattatagcagtggccatgcccaccagaggagcagcccctcccattatagcagtggccacacccagcagaataagtgcccatcacagcagcagcccctcttgccctcctgagtgaggagctgagcacttcacacaggtatcctcactgccttttttttttttttttyttttttgagatggagtcttgctctgtctcctaggctggagtgcagtggcccaatcttagcttactacagcctggggctcaagcaattctcccgcctcagcctcccgagtagctgggattacaggcacccgccaccacacccagctaatttttgtgtttttagtagagacagtgtttcaccacgttggcaatgctggtctcaatctcctgacctcaagtaatccacccacctcggcctcccaaagtgctgggattccatgcgtgagccaccgcgctggcc

SEQ ID NO: 723811 - DNA, 592 bp, Homo sapiens
  misc_feature 492, 493, 494, 495, 496, 497, 498, 499, 500, 501, 502, 503,504, 505, 506, 507, 508, 509, 510, 511, 512, 513, 514, 515,516, 517, 518, 519, 520, 521, 522, 523, 524, 525, 526, 527,528, 529, 530, 531, 532, 533, 534, 535, 536, 537, 538: n = A,T,C or G
  misc_feature 539, 540, 541, 542, 543, 544, 545, 546, 547, 548, 549, 550,551, 552, 553, 554, 555, 556, 557, 558, 559, 560, 561, 562,563, 564, 565, 566, 567, 568, 569, 570, 571, 572, 573, 574,575, 576, 577, 578, 579, 580, 581, 582, 583, 584, 585: n = A,T,C or G
  misc_feature 586, 587, 588, 589, 590, 591: n = A,T,C or G
taaatatctgtaggataaatgaagggaagggaaaaggagttcaggaggaagtcatgatatgagcaaaggaaagcaggggagaataaacgtggctgcattagggagtggctggaacaaagcacagagcagatttgagacaatttgagagacgatgggcacagcattcagtcggcattcactctgacctgtgcacatccagactctgactctgtcactttctgtgtgactttgggcaagtggcttagactctctgggcctttgtttttcataaaataaggaccttaatgtctgcctcacagggttcttgtggtgttgatatamggcaattggattgattgaacgattgagcattagactgaacaatatgaaattgttgggttttgatcatctttgatctctaaatggtatagaagcctaaagcccagcccccagatcccaggaggctggtgtccctagcagccctgaccgcccttccagggatgactgtgcatnnnnnnnnnnnnnnnnnnnnnnnnnnnnnnnnnnnnnnnnnnnnnnnnnnnnnnnnnnnnnnnnnnnnnnnnnnnnnnnnnnnnnnnnnnnnnnnnnnnnt

SEQ ID NO: 723812 - DNA, 1498 bp, Homo sapiens
cagcctgggaaggctcagggtgctgggcccccacctgggagctgagagtggtcctgctctgcacttcccagacacccccagcagggtgcaccaccacacccagcctgcccagctctgctgcaggacatgggccagcgaggccccacagagcactgggacggggggagctcgggcagggggagccaagctgggcgtcaggggcctggggacgcaccacccccttggtttccacaacttgaaaacaagaactgatcagtcactgattcacagtccaaaaaccaacccccaaatcccagggcttctaacaacaaaggaggacctctctcacttctgggtcagcaagaacttcagggctgggcccactccatgtctcctccctgcagaaggaccctctgctctccgtccccagagcaaggcagtgggctgcctgggtttggagcagctgggtagggcgagggcaatgggtgggataggggggatgcagcccaggggggtgcagacaacaggcaaggagcaggccgggggccttgccagggccatctgtgtccctggtcactgagggtggcaggggagactggaagggaaacagacacccaggtggggagggccccaagccagtccccacggcagcccctgcaggcctcagtgcttctggatcccaccagggtcgcagcaggaaccgaggctgaagcaaatcagggcggctggtggcacagctggggccacacccaggcacaattcctttccaacacagccaggagactatcttggcggcaccagtgcctgctcagggacggacttggggcctccacaactgcagtccctatgaaccctgtgcacggtacaccctgactgcgtgggggctggggcccccagtggagggatgtggcttgttgtcctgaggagagcgggggcagctgtcccagggtgggcccagccctgtgaatcagggagcagctcatgggaatggccctgggggtgcaggggaagttcacagagccatttattgagccccacaaccgaccagagggaagggcgtccaccaggctcaggccatggtccttgaggggctggtgctgtctacttggcccacacatgtgtcccgaggagttgtggcatgcccgctgccctggtcagagctggccaccatcttccagctgcatctgccgggccagcgtctgcccaatggctaacagggggctggctctgtaggccggactggccagcagctcctgaaaccgggtcctttcttcctcgagaaactgctgtctctgggctgcactcatccggctgagctctgagggccagggcttgttgctctccctgctgcaggcctggcgccggctgccagcctcaagccccagtagctcaggcagggcatccctgagcgggtgcaggtcccccaccaccatcctggcccyctacctccgctcctccctgtgcttctgctcagccagttttatggcttcgattttctgcaaccattgctcacgcctca

SEQ ID NO: 723813 - DNA, 436 bp, Homo sapiens
atttatcatcattacagattattttgtcttctgtgagatacattcacaacccccacattttcaatttccatggaaatcggctggtattatacccgtgctgttaagctgccctctctgactgaaacacagattcatgaaggagagcacattcattgttgtagtagttaatggcataacccccaagtggatacccaggcttgaacttctagaacacacctctttcttcctgtagtctccaccctttggatgatgaacacctggggaaccagctaggcccatcctctctccagatcctcaccatctcccagacagtgacttaaagccaagttttgtgagaatggccagaagcacttgcccccaataaatggagaataatgattcttaartaacatcatgcagagacacacaggtaatcactataccttgtaagttcttc

SEQ ID NO: 723814 - DNA, 601 bp, Homo sapiens
aatctagagtcacagtcaaacatgaccttttgaaggaaggcagtagggtttccgtgagggaaaatcatgtctgactaatctattagccttctcaagagtgtaaataacatatggacagggagaaaccaaagaatataatttacaaatacttttatttcttttttttattatacttcgagttctagggtacatgtgcacaacgtgcaggtttgttacatatgtatacatgtgccatgttggtgtgctgcacccattaactcgtcatttacattaggtatatctcctaatgctatccctcctcactacccscaccccatgacaggccctggtgtgtgatgttccccaccctgtgtccaagtgttctcattgttcaattgccacctatgagtgagaacatgcagtgtttggttttctgtccttgcgatagtttgctcagaatgatggtttcagcttcatccatgtccctacaaaggacgtgaactcatccttttttatggctgcatagtattccatggtgtatatgtgccacatttctttaatccactctatcattgatggacatttgggttggttccaagtctttgctattgtgaatagtgcc

SEQ ID NO: 723815 - DNA, 2422 bp, Homo sapiens
aggatcacacttaccaaattaaagggtgtaggcagaaataagtctttctccccaagatttaatatgtcttcctgagaaggagaaaaactaagcaaatctctcttttccttatctgccagttcaatcttgaatataggccttattgtcaagactaactaacatctaggaaactatgtgtctgcactataaggtctttaacaaagatgacataccgactgaggcagagtgtagaagagaatgaaacaaaaatgtgtagcttaaatgctgccagaaaatctctgacaaattaaggctaaatcctgtttacctgtaacagaaccagttctggaagtctgcagatacctcaaatatattaaaagaactacgttcttctagccatctgatttggcaatgcagtgcctcttagtgtccatggtaacgcccacagagtggtttagagattcaccattaaaaggcttgctcattgaaatataatggtgggtcagccacagtacttaggtaatgttcagtttctgaacttcaaagcaagcttaaaccattctacatctttagaaacatattgtcagaggaacatatggaactagtgagggtccacaaatagtggctgtctttattatcatgatgccttgttgatatattatatatatatatatatatttatatatatatatgcccaaattttattttaatccacagcaatataagttctctattattacaaagtatacctagtggttaaggggtagaaaaagtaaaaacatgaaagcattttaaaatctacagtggcctcacaaaatatcagtatatataatgttatcataaaaatgtaaattttaaaaatgggaatttctattcatgtcctcaaatggccattttggttttttgttctttattttaaaggactgtaacatggttgtatttttaaacttcaaaactgctaacgttttttggttatcctttaagcagtaagaagataactaaattgaagtaagacaagatttaatttagtgggttgaaactaaagaaatgtgtcatggttcctgcttataatccttccttggcaggttgggtatgataatttgagaaattggttaaatgcatgaaaatacctcatgggttcattggtcacttaaaagcaactgacctttacttggcctttaatcagtgagtgaattcagtgagatgtgactaatcccagaggaacagcttttgaatataccttagtgtgggtaagagctggcagaaactcaggatccatttagctaaaattaagaatatgaaagtcttaatcctttagtagtttgaatgcattatatacattttaaaagaatagatgcctccatttgaattttatcagtcaacagaactgtaggctcgaaatacaatacacccccagaattgttagatgaggtcaaaaaatgttacagtctgaactggaaatttaaaagaagcaacaccaaatggataaaattaaccacctggacaaatattttcaggaaaatagcccatgtaagagatgatctctgagcatgttgccagtttgactaggggttctttgagtcagaaccacctcctttaaaaggaaatgttgattttaaacataataatggcctataatcagtctatcatgaggaaggattgaagtgggaaaaaagttttgatgattgacagagcaatacattaaaataagggattcagagtaaaacaatttgtctatttctccagtaccacacaagaaaggagattccattcttggcaacatcatccctatagaggcaatggatgcaattgattatcatagttggattacagcagcccattgagataattcagttcttcgtgctatctctaaaggagacttttatctgacggtaatgcttttcattgtgaacattgcctcccaagtctctgatgggtagactgtatgcattgtaactccctcccccatacatataaacactctgtaagacacaacctaagcagctagtgaggctctttctgtgctatcctatgtaaaatatggatatacttgagctgctcctctgccatagagaatagatgtctatagctccattcaacgaaaatgttcctgatctacaaaaggatcttatgttttatgtaaaatcaggtgtatcctgcttttagaaaactcaataacatatataaactatgacaccaaaaacagaaattagagaatgagtaaattatttattttaaaagtccttttcttatggtttcactatgtgtttctcttaaataagaaattactctgataggtttcaaatatgaatcagttacaactttttagacatgctccttatacatactgtacrtaaagtgagaaataacttgaaaatatgtagaacatttgacaatcttaatatctctatttttctcacattctacatctatttgtactcct

SEQ ID NO: 723816 - DNA, 649 bp, Homo sapiens
attgatctgccaaggacatgaatgactcagaatctcaaacttattcttccctcagaatccactgagcctactccctctttttctcaaatggcaacttctcagagatgccttctctggctaacgtatatgtactaaaacctccatccagcactctatgycatccttactatggtttatttttcttcatagcacctatcaattggtgaagtattaaatatgcatttttgtttgtatgcatctctctccccgcaccagtatgtgaactccaccagactggagagcgtgtttattttgttcactgctgtaactccagtgtctagaacagtgcctggcacacagtaggtgtttaataatgatttgttaagctaagccaatgaataaatattcttttgcccatgagatgatgttaaaaatttttcaattattcataactgcctgtaaggaatgaatgttagtgaattactgtgataccaatgaaagttaaatgatgcaatgaagattgggtggatcacaaggtcaggagtttgagaccatcctggccaatatggtgaaaccccgtctctactaaaaataccaaaattagctgggcatcgtggcaggaccctgtagtcccagctactcaggaggctgaggcaggagaatcgcttga

SEQ ID NO: 723817 - DNA, 649 bp, Homo sapiens
attgatctgccaaggacatgaatgactcagaatctcaaacttattcttccctcagaatccactgagcctactccctctttttctcaaatggcaacttctcagagatgccttctctggctaacgtatatgtactaaaacctccatccagcactctatgtcatccttactatggtttatttttcttcatagcacctatcarttggtgaagtattaaatatgcatttttgtttgtatgcatctctctccccgcaccagtatgtgaactccaccagactggagagcgtgtttattttgttcactgctgtaactccagtgtctagaacagtgcctggcacacagtaggtgtttaataatgatttgttaagctaagccaatgaataaatattcttttgcccatgagatgatgttaaaaatttttcaattattcataactgcctgtaaggaatgaatgttagtgaattactgtgataccaatgaaagttaaatgatgcaatgaagattgggtggatcacaaggtcaggagtttgagaccatcctggccaatatggtgaaaccccgtctctactaaaaataccaaaattagctgggcatcgtggcaggaccctgtagtcccagctactcaggaggctgaggcaggagaatcgcttga

SEQ ID NO: 723818 - DNA, 643 bp, Homo sapiens
taaaaactttcctttccaacttgtttataaaaggaaatcttcmctgttttgaacatcagttattttaaacttttaagttgttagcacagcaaaagcaacaaaattctaagtgcagtaatcactttactgcgtggtcatatgaaatcaaggcaatgttatgagtattactggaaagctggacagagtaacgggaaaagtgactaaaactatgcaaaactatgcaaaactaagcagattgtgtctctagagtatttcccatctcaagtttagttatttactaatttggcaacatctgacctatctttaattgtgagaaaataaacaaacacataagccaactctcagaatatggttatacataggtgtagcctatgactttgaatgtatttgtttgaatagcgtaaaacaaaataaaaataaaatcttgttacagtgcaagaaacggcagtcatcaaactaagatgaggcaagtgtcatgaagtatgaaaatatggtacctgaattctatttattagaaagtcttcactgagctgagcatgttttttttaacaaattcaattactgatttgaatatttattatacttaattattgcagccatgaaaagaggtgctggctgaggctgcatttaataaaaacattta

SEQ ID NO: 723819 - DNA, 643 bp, Homo sapiens
taaaaactttcctttccaacttgtttataaaaggaaatcttcactgttttgaacatcagttattttaaacttttaagttgttagcacagcaaaagcaacaaaattctaagtgcagtaatcactttactgcgtggtcatatgaaatcaaggcaatgttatgagtattactggaaagctggacagagtaacgggaaaagtgactaaaactatgcaaaactatgcaaaactaagcagattgtgtctctagagtatttcccatctcaagtttagttatttactaatttggcaacatctgacctatctttamttgtgagaaaataaacaaacacataagccaactctcagaatatggttatacataggtgtagcctatgactttgaatgtatttgtttgaatagcgtaaaacaaaataaaaataaaatcttgttacagtgcaagaaacggcagtcatcaaactaagatgaggcaagtgtcatgaagtatgaaaatatggtacctgaattctatttattagaaagtcttcactgagctgagcatgttttttttaacaaattcaattactgatttgaatatttattatacttaattattgcagccatgaaaagaggtgctggctgaggctgcatttaataaaaacattta

SEQ ID NO: 723820 - DNA, 643 bp, Homo sapiens
taaaaactttcctttccaacttgtttataaaaggaaatcttcactgttttgaacatcagttattttaaacttttaagttgttagcacagcaaaagcaacaaaattctaagtgcagtaatcactttactgcgtggtcatatgaaatcaaggcaatgttatgagtattactggaaagctggacagagtaacgggaaaagtgactaaaactatgcaaaactatgcaaaactaagcagattgtgtctctagagtatttcccatctcaagtttagttatttactaatttggcaacatctgacctatctttaattgtgagaaaatraacaaacacataagccaactctcagaatatggttatacataggtgtagcctatgactttgaatgtatttgtttgaatagcgtaaaacaaaataaaaataaaatcttgttacagtgcaagaaacggcagtcatcaaactaagatgaggcaagtgtcatgaagtatgaaaatatggtacctgaattctatttattagaaagtcttcactgagctgagcatgttttttttaacaaattcaattactgatttgaatatttattatacttaattattgcagccatgaaaagaggtgctggctgaggctgcatttaataaaaacattta

SEQ ID NO: 723821 - DNA, 1722 bp, Homo sapiens
taatgagactgtagtgggactcatgccacaagattagttgaagattagatgagttaaaatatgtaaagctcttgttaacacagtagttacatacttgagaaataaagtactaatcttattagtactttaatgttaaagaaagactcaaatttgtatattatcaagagagcaactaatgagaatatgaacttctggacagtgaatttctaaaaaggactaaaatgttaaataatacatggtaatatttataatttattaatgaagtttcatttaaaaatgtattacatgcagagaaagtcacaaaatgaaatatgtcctgtcagcttttatcttcattggatctgattttataattttccttgattttaacctttgcaaatcgtaatccctagaatctaaagtgccttttaatgtagatatacacaaagaaagttaagactgtcaaataatgcagaacaaagaggtttgaagaaaaattatggcacaaagtttacaatttagcaacttgatagaactctatgaaatcttactttgcatttttagtgtccagtcattggaaaaccgtatttttagtttgttcatctatcttattttacagagctaacgttaatgcaacagataactttctgtggactccacttcattttgcatgccatgcaggccaacaagacattgttgagcttcttgttgaatctggagckttaatagatgcagcttcaatcaacaactcaactcctttaaatagagccattgaaagctgcagactggatacagtaaaatacctacttgatattggtgctaaattccagctggaaaatagaaaaggtatgcgttcatattattgatgattagggttagaaaaggagaacttatgttagattctaagccccttctgattctattctcgtaggcttgcattgtccactgggttcctggtacaaacacaagcctgagttaaatgttatggaagtttatcttataccaagtgcttctccactcattggtgttggagggccaattctttatgtttataatctttcatggactgaaatacttttgtaaaatataataaaattatttattagaaaaataaaatgaaaaaaatacaaggccaaaactttgtttttaatctttaaattttaatgacagaaaattatattaagttgctaaaaacatttataaatacttagtttctgtagttacttcattatggatcagtaactattagtctgtggacttgcaccagtttgcagatgacactgagttattacactgttatgactgttaattactaataattgcataccctatagactttgggtttctcttaaagctggacaaagcaattcctgaattgaggcttccctgactctaggaagtaaacacacaacctaccttgtatcataaataccatacaggaaaaattaaaaaatcatttgaatatatttgagctccttgtttggaagtaccattttcctacattggaagccattgcttcctttgactgaggagcatcatacctctggttggttcaggctgcctctgagtcacagatactactgcacctgtcctgcctgatgatattataggtaacatattgcccagccatctgcctggagcacctgtggccactagcttccccagaccttttggaatttacctccttacatcaaggaaaggggaagataatgtaaaattatctatcacatagaaggaaatttg

SEQ ID NO: 723822 - DNA, 1722 bp, Homo sapiens
taatgagactgtagtgggactcatgccacaagattagttgaagattagatgagttaaaatatgtaaagctcttgttaacacagtagttacatacttgagaaataaagtactaatcttattagtactttaatgttaaagaaagactcaaatttgtatattatcaagagagcaactaatgagaatatgaacttctggacagtgaatttctaaaaaggactaaaatgttaaataatacatggtaatatttataatttattaatgaagtttcatttaaaaatgtattacatgcagagaaagtcacaaaatgaaatatgtcctgtcagcttttatcttcattggatctgattttataattttccttgattttaacctttgcaaatcgtaatccctagaatctaaagtgccttttaatgtagatatacacaaagaaagttaagactgtcaaataatgcagaacaaagaggtttgaagaaaaattatggcacaaagtttacaatttagcaacttgatagaactctatgaaatcttactttgcatttttagtgtccagtcattggaaaaccgtatttttagtttgttcatctatcttattttacagagctaacgttaatgcaacagataactttctgtggactccacttcattttgcatgccatgcaggccaacaagacattgttgagcttcttgttgaatctggagctttaatagatgcagcttcaatcaacaactcaactcctttaaatagagccattgaaagctgcagactggatacagtaaaatacctacttgatattggtgctaaattccagctggaaaatagaaaaggtatgcgttcatattattgatgattagggttagaaaaggagaacttatgttagattctaagccccttctgattctattctcgtaggcttgcattgtccactgggttcctggtacaaacacaagcctgagttaaatgttatggaagtttatcttataccaagtgcttctccactcattggtgttggagggccaattctttatgtttataatctttcatggactgaaatacttttgtaaaatataataaaattatttattagaaaaataaaatgaaaaaaatacaaggccaaaactttgtttttaatctttaaattttaatgacagaaaattatattaagttgctawaaacatttataaatacttagtttctgtagttacttcattatggatcagtaactattagtctgtggacttgcaccagtttgcagatgacactgagttattacactgttatgactgttaattactaataattgcataccctatagactttgggtttctcttaaagctggacaaagcaattcctgaattgaggcttccctgactctaggaagtaaacacacaacctaccttgtatcataaataccatacaggaaaaattaaaaaatcatttgaatatatttgagctccttgtttggaagtaccattttcctacattggaagccattgcttcctttgactgaggagcatcatacctctggttggttcaggctgcctctgagtcacagatactactgcacctgtcctgcctgatgatattataggtaacatattgcccagccatctgcctggagcacctgtggccactagcttccccagaccttttggaatttacctccttacatcaaggaaaggggaagataatgtaaaattatctatcacatagaaggaaatttg

SEQ ID NO: 723823 - DNA, 944 bp, Homo sapiens
ctttgtatctcatagcttcacatttctttgctttccaagtctggatttagaggtgggccttgtctagaaagccaggtctaccttttttcaggcaaaaagtttcattaaccactgtggcttagaataatatttatgtaataaaatatttactaggtattraatgcatgctatatgccactatacagatgaagaaatggaagtttagatctgaagattaacttgcccagatttatgtggccagctcttgccacaaaccaaccaaggatttagtgagtcagacatgagcctgactctgcacgtatcctacaagtcatagcattccctaccctggttttgctgaccccaggctctagcactggatttatccttggttctcttactgagtgctctagtactttcctagttgagcccctgacacccatcctctgtcaactcattttccccaggagctgacacctgctcctcaaagtatgtcttcaacttctacctgccatttttcacagagacacatggagaatttgccccaaatacacatctctagggactttctgcttcaatgccctgccctcctcctgccagactgaaccatggcaatggggcctaaaattctcaatgctatcttaggttgggttccccagaagcagaacccaagaaagggaaaatcaggcacacattgcttcagtcctcttgaggaaagactctcaaaagaagcatctaaaagaagaaaagcagacaggacaactagggtaagaagccaagcaaagatgcgtgctcaggaaaaatctaaacctggcctgatatgagagaggatctggagcataaattacaacactgacatgatggtcctcatcattaagacaaggtggttcgccttttgtactcctgtatcagccagtcattgccatagacttctcctgataaaaccatttagggagtgtaacttt

SEQ ID NO: 723824 - DNA, 944 bp, Homo sapiens
ctttgtatctcatagcttcacatttctttgctttccaagtctggatttagaggtgggccttgtctagaaagccaggtctaccttttttcaggcaaaaagtttcattaaccactgtggcttagaataatatttatgtaataaaatatttactaggtattgaatgcatgctatatgccactatacagatgaagaaatggaagtttagatctgaagattaacttgcccagatttatgtggccagctcttgccacaaaccaaccaaggatttagtgagtcagacatgagcctgactctgcacgtatcctacaagtcatagcattccctaccctggttttgctgaccccaggctctagcactggatttatccttggttctcttactgagtgctctagtactttcctagttgagcccctgacacccatcctctgtcaactcattttccccaggagctgacacctgctcctcaaagtatgtcttcaacttctacctgccrtttttcacagagacacatggagaatttgccccaaatacacatctctagggactttctgcttcaatgccctgccctcctcctgccagactgaaccatggcaatggggcctaaaattctcaatgctatcttaggttgggttccccagaagcagaacccaagaaagggaaaatcaggcacacattgcttcagtcctcttgaggaaagactctcaaaagaagcatctaaaagaagaaaagcagacaggacaactagggtaagaagccaagcaaagatgcgtgctcaggaaaaatctaaacctggcctgatatgagagaggatctggagcataaattacaacactgacatgatggtcctcatcattaagacaaggtggttcgccttttgtactcctgtatcagccagtcattgccatagacttctcctgataaaaccatttagggagtgtaacttt

SEQ ID NO: 723825 - DNA, 2099 bp, Homo sapiens
tatatagataattatattatctataatataattatatagataatataattgcagataataatatagacaatataattatatctgcatacagatataacagatatctatataggtataattcaattatgtaattgaattacatatagaattatatatatacaatttatttttttgcctgattataaaaactaggctatggggaatgatggtcttcacagggggtatttcgtataggtaaactatccagattatttggcttttaaaaactgtataggacatatatgcccaatctcaaccatggctgcataataaaatcacccagcaagctatttaaaaataatagattttggttctagggtaaagccctgacatggagattttaaaaacatcaccaagtgattgtaatgtgtggctagaattgaaaactactgccctagtttctcaatcattgaattatattagtctgatcatttggtttgttcttggcactgatgaccatgaagtatcttatcttagtttgttttgtgttgttatgacagaatacttgagactgagtagtttagaaaaaattgtttattttgctcatggttctggaggctgggaagtccaagagcatggtgccagcatcttgtgaaggccttcatgctacatcattccttggcagaaggtagaagggcaaaagagcatgaaagcaagagagagaggtggccaaacttacttttgtaactaatttactcccacaataatgacattaatccatttataacagcagagccctcatgaccaaatcacctcttgttaggccccacctccaaactctgttgccatgggggattaagtttccaacacatgaatcttgagagacacactcaagccatagtatatttacattgattagctagcttttcataatgaagaattcaatattagtaagccacaccatgaaatcctacaaataagtacagtatgttctkagataaattaaaaacaattcataacaattcagtagcacatttatcagatttgctttcagtcttgaacaaggtaagtcaataattcatttgatgcttaatggcagttaattcttatgaagatcattcaaatataaaaacacaacaatgacctgaaagcctaacctgaaggttcttatcaagagataccaaagtaaagacaacagaaaacaattgcagaatatttactatgtgattgttcttatgggagactcctgaactaggtgacaaacatattctcagagattcaggttcattatttctgttgggtattaagccattatgctgtaaatttccaagcatgagttcttcccaaagcccatttattcttcatattgcctcatgcattctcaaagtcctagcatcaaactaaaggcatggtttatttcttctctgggagctatagaagtaaactccatttgaagtcttggccctatgccctacacattgttgccagaataatcttggcaaaatttatgctcaaagacttgtaataactctcactcacctaaaatagagtaactgtgaataacttaatctggtattcttagttttctagacactatctttccagccttattaccaatgatttcactgtgcattgctgagattcagctgacctaaactaaatgtggctagtctgggctccaagctgcaggttgggcccaatgcctcgtccacaggtccctcttccttcttgaactggcagctatgtgaggcatgatcttctctttgtgatggatggctggagcacaagaaggacataggcaaacatgttgacttttacagtgtaggcttggagttggcacattgtcactttgggttatgttccatgggccaaagaaagtcacgtgactgggcccagcatcagtggggcaaagaagtgcatgctgtctatagaagtcacggaggggagtggtgaatacatatttgatgaacaataatataatatacccataaaatgtaacagaataacatttttcataatcaataacattgctaaaattattaaacagtttttattttatgtaaaataaaatgaaggcttaacattgcctgggtgaagtttgatataggatttgaagtcca

SEQ ID NO: 723826 - DNA, 2099 bp, Homo sapiens
tatatagataattatattatctataatataattatatagataatataattgcagataataatatagacaatataattatatctgcatacagatataacagatatctatataggtataattcaattatgtaattgaattacatatagaattatatatatacaatttatttttttgcctgattataaaaactaggctatggggaatgatggtcttcacagggggtatttcgtataggtaaactatccagattatttggcttttaaaaactgtataggacatatatgcccaatctcaaccatggctgcataataaaatcacccagcaagctatttaaaaataatagattttggttctagggtaaagccctgacatggagattttaaaaacatcaccaagtgattgtaatgtgtggctagaattgaaaactactgccctagtttctcaatcattgaattatattagtctgatcatttggtttgttcttggcactgatgaccatgaagtatcttatcttagtttgttttgtgttgttatgacagaatacttgagactgagtagtttagaaaaaattgtttattttgctcatggttctggaggctgggaagtccaagagcatggtgccagcatcttgtgaaggccttcatgctacatcattccttggcagaaggtagaagggcaaaagagcatgaaagcaagagagagaggtggccaaacttacttttgtaactaatttactcccacaataatgacattaatccatttataacagcagagccctcatgaccaaatcacctcttgttaggccccacctccaaactctgttgccatgggggattaagtttccaacacatgaatcttgagagacacactcaagccatagtatatttacattgattagctagcttttcataatgaagaattcaatattagtaagccacaccatgaaatcctacaaataagtacagtatgttctgagataaattaaaaacaattcataacaattcagtagcacatttatcagatttgctttcagtcttgaacaaggtaagtcaayaattcatttgatgcttaatggcagttaattcttatgaagatcattcaaatataaaaacacaacaatgacctgaaagcctaacctgaaggttcttatcaagagataccaaagtaaagacaacagaaaacaattgcagaatatttactatgtgattgttcttatgggagactcctgaactaggtgacaaacatattctcagagattcaggttcattatttctgttgggtattaagccattatgctgtaaatttccaagcatgagttcttcccaaagcccatttattcttcatattgcctcatgcattctcaaagtcctagcatcaaactaaaggcatggtttatttcttctctgggagctatagaagtaaactccatttgaagtcttggccctatgccctacacattgttgccagaataatcttggcaaaatttatgctcaaagacttgtaataactctcactcacctaaaatagagtaactgtgaataacttaatctggtattcttagttttctagacactatctttccagccttattaccaatgatttcactgtgcattgctgagattcagctgacctaaactaaatgtggctagtctgggctccaagctgcaggttgggcccaatgcctcgtccacaggtccctcttccttcttgaactggcagctatgtgaggcatgatcttctctttgtgatggatggctggagcacaagaaggacataggcaaacatgttgacttttacagtgtaggcttggagttggcacattgtcactttgggttatgttccatgggccaaagaaagtcacgtgactgggcccagcatcagtggggcaaagaagtgcatgctgtctatagaagtcacggaggggagtggtgaatacatatttgatgaacaataatataatatacccataaaatgtaacagaataacatttttcataatcaataacattgctaaaattattaaacagtttttattttatgtaaaataaaatgaaggcttaacattgcctgggtgaagtttgatataggatttgaagtcca

SEQ ID NO: 723827 - DNA, 2099 bp, Homo sapiens
tatatagataattatattatctataatataattatatagataatataattgcagataataatatagacaatataattatatctgcatacagatataacagatatctatataggtataattcaattatgtaattgaattacatatagaattatatatatacaatttatttttttgcctgattataaaaactaggctatggggaatgatggtcttcacagggggtatttcgtataggtaaactatccagattatttggcttttaaaaactgtataggacatatatgcccaatctcaaccatggctgcataataaaatcacccagcaagctatttaaaaataatagattttggttctagggtaaagccctgacatggagattttaaaaacatcaccaagtgattgtaatgtgtggctagaattgaaaactactgccctagtttctcaatcattgaattatattagtctgatcatttggtttgttcttggcactgatgaccatgaagtatcttatcttagtttgttttgtgttgttatgacagaatacttgagactgagtagtttagaaaaaattgtttattttgctcatggttctggaggctgggaagtccaagagcatggtgccagcatcttgtgaaggccttcatgctacatcattccttggcagaaggtagaagggcaaaagagcatgaaagcaagagagagaggtggccaaacttacttttgtaactaatttactcccacaataatgacattaatccatttataacagcagagccctcatgaccaaatcacctcttgttaggccccacctccaaactctgttgccatgggggattaagtttccaacacatgaatcttgagagacacactcaagccatagtatatttacattgattagctagcttttcataatgaagaattcaatattagtaagccacaccatgaaatcctacaaataagtacagtatgttctgagataaattaaaaacaattcataacaattcagtagcacatttatcagatttgctttcagtcttgaacaaggtaagtcaataattcatttgatgcttaatggcagttaattcttatgaagatcattcaaatataaaaacacaacaatgacctgaaagcctaacctgaaggttcttatcaagagataccaaagtaaagacaacagaaaacaattgcagaatatttactatgtgattgttcttatgggagactcctgaactaggtgacaaacatattctcagagattcaggttcattatttctgttgggtattaagccattatgctgtaaatttccaagcatgagttcttcccaaagcccatttattcttcatattgcctcatgcattctcaaagtcctagcatcaaactaaaggcatggtttatttcttctctgggagctatagaagtaaactccatttgaagtcttggccctatgccctacacattgttgccagaataatcttggcaaaatttatgctcaaagacttgtaataactctcactcacctaaaatagagtaactgtgaataacttaatctggtattcttagttttctagacactatctttccagccttattaccaatgatttcactgtgcattgctgagattcagctgacctaaactaaatgtggctagtctgggctccaagctgcaggttgggcccaatgcctcgtccacaggtccctcttccttcttgaactggcagctatgtgaggcatgatcttctctttgtgatggatggctggagcacaagaaggacataggcaaacatgttgacttttacagtgtaggcttggagttggcacattgtcactttgggttatgttccatgggccaaagaaagtcacgtgactgsgcccagcatcagtggggcaaagaagtgcatgctgtctatagaagtcacggaggggagtggtgaatacatatttgatgaacaataatataatatacccataaaatgtaacagaataacatttttcataatcaataacattgctaaaattattaaacagtttttattttatgtaaaataaaatgaaggcttaacattgcctgggtgaagtttgatataggatttgaagtcca

SEQ ID NO: 723828 - DNA, 2099 bp, Homo sapiens
tatatagataattatattatctataatataattatatagataatataattgcagataataatatagacaatataattatatctgcatacagatataacagatatctatataggtataattcaattatgtaattgaattacatatagaattatatatatacaatttatttttttgcctgattataaaaactaggctatggggaatgatggtcttcacagggggtatttcgtataggtaaactatccagattatttggcttttaaaaactgtataggacatatatgcccaatctcaaccatggctgcataataaaatcacccagcaagctatttaaaaataatagattttggttctagggtaaagccctgacatggagattttaaaaacatcaccaagtgattgtaatgtgtggctagaattgaaaactactgccctagtttctcaatcattgaattatattagtctgatcatttggtttgttcttggcactgatgaccatgaagtatcttatcttagtttgttttgtgttgttatgacagaatacttgagactgagtagtttagaaaaaattgtttattttgctcatggttctggaggctgggaagtccaagagcatggtgccagcatcttgtgaaggccttcatgctacatcattccttggcagaaggtagaagggcaaaagagcatgaaagcaagagagagaggtggccaaacttacttttgtaactaatttactcccacaataatgacattaatccatttataacagcagagccctcatgaccaaatcacctcttgttaggccccacctccaaactctgttgccatgggggattaagtttccaacacatgaatcttgagagacacactcaagccatagtatatttacattgattagctagcttttcataatgaagaattcaatattagtaagccacaccatgaaatcctacaaataagtacagtatgttctgagataaattaaaaacaattcataacaattcagtagcacatttatcagatttgctttcagtcttgaacaaggtaagtcaataattcatttgatgcttaatggcagttaattcttatgaagatcattcaaatataaaaacacaacaatgacctgaaagcctaacctgaaggttcttatcaagagataccaaagtaaagacaacagaaaacaattgcagaatatttactatgtgattgttcttatgggagactcctgaactaggtgacaaacatattctcagagattcaggttcattatttctgttgggtattaagccattatgctgtaaatttccaagcatgagttcttcccaaagcccatttattcttcatattgcctcatgcattctcaaagtcctagcatcaaactaaaggcatggtttatttcttctctgggagctatagaagtaaactccatttgaagtcttggccctatgccctacacattgttgccagaataatcttggcaaaatttatgctcaaagacttgtaataactctcactcacctaaaatagagtaactgtgaataacttaatctggtattcttagttttctagacactatctttccagccttattaccaatgatttcactgtgcattgctgagattcagctgacctaaactaaatgtggctagtctgggctccaagctgcaggttgggcccaatgcctcgtccacaggtccctcttccttcttgaactggcagctatgtgaggcatgatcttctctttgtgatggatggctggagcacaagaaggacataggcaaacatgttgacttttacagtgtaggcttggagttggcacattgtcactttgggttatgttccatgggccaaagaaagtcacgtgactgggcccagcatcagtggggcaaagaagtgcatgctgtctatagaagtcacggaggggagtggtgaatacatatttgatgaacaataatataatatacccataaaatgtaacagaataacatttttcataatcaataacattgctaawattattaaacagtttttattttatgtaaaataaaatgaaggcttaacattgcctgggtgaagtttgatataggatttgaagtcca

SEQ ID NO: 723829 - DNA, 1402 bp, Homo sapiens
cccagcatacagtatgatcttccaatttatagattatgttcttttctaatgtcccatgtatattatatatctgaatacgctgctttttcagggctgaatgttgtttctatctacttgttctgtgatccaaggtttttcggacaaggagaggtgggggaaaaggggatgtgtggaattcagctcagacagagtataaagcttgctggaggaactcaaccttcacatctgagattcctttaagtcctctggcagctggacttcaagctagccaagggaacatcccatgcctcagagtttcagttcatttgctcagttcagcacagtatcccagaaagtgggaaactttcctgcctctggcaagatccaacagtggtatgcaaaggttcctcaacatctcacaggtgtgccctgcctttccacattgggggacgtttgtgagaattcttaggatttggtctgatcatctttttcctcaacatgtcttgcagcggtgggtggagggctgggcagacataggttcatctggagacaaagcacgcctccatagaatcttctgttctctttgtttttgctatcaattctcaaattttacattataaggttgtacttttttcttctttggttgcagcatgtaagttttttgttgctttctttcctttgggtgatttagtgttttgttttgtttttgagacagagtctcgctctgtcacccaagctggagtacagtggcatgatcttggctcaccgcaacctgcctcccgggttcaagcaattctcctgtctcagcctcctgagtagctgggattataggcgtgcaccatcacaaccggctaatttttgtatttttagtagaggctggtatgggggtgctgggttggggggaagttcgccatrttagccaggctggtctcaaactcctgacctcaggtgatccgcctgtctcagtctcccaaagtgctgggattacagacgtgagccaccatgcctggatgatttagtattttaattttgatttttttagtgcttccttgtgccatctttatccagaagtcagtcaagcagtctttctttctcactggtaatgaactatatgaaatccttttttatctttaggttatttccacagtggtctctttgaacatgactatgttgacctggtagctgtgacacactctttttctcctgagctttccctcaatgacgcatgctttggcattacagcatgccctagcaaagcttctggagcaggggttgcaaactcaaatctctacaaagtttaaaacagtgaggaacaatgggactgtggtaaagtgaaaaggacattctttgtgtaaggggcagatgctcagctcaggccaatggctgccatgtttgaactcagggcagggttgccacatctgca

SEQ ID NO: 723830 - DNA, 1402 bp, Homo sapiens
cccagcatacagtatgatcttccaatttatagattatgttcttttctaatgtcccatgtatattatatatctgaatacgctgctttttcagggctgaatgttgtttctatctacttgttctgtgatccaaggtttttcggacaaggagaggtgggggaaaaggggatgtgtggaattcagctcagacagagtataaagcttgctggaggaactcaaccttcacatctgagattcctttaagtcctctggcagctggacttcaagctagccaagggaacatcccatgcctcagagtttcagttcatttgctcagttcagcacagtatcccagaaagtgggaaactttcctgcctctggcaagatccaacagtggtatgcaaaggttcctcaacatctcacaggtgtgccctgcctttccacattgggggacgtttgtgagaattcttaggatttggtctgatcatctttttcctcaacatgtcttgcagcggtgggtggagggctgggcagacataggttcatctggagacaaagcacgcctccatagaatcttctgttctctttgtttttgctatcaattctcaaattttacattataaggttgtacttttttcttctttggttgcagcatgtaagttttttgttgctttctttcctttgggtgatttagtgttttgttttgtttttgagacagagtctcgctctgtcacccaagctggagtacagtggcatgatcttggctcaccgcaacctgcctcccgggttcaagcaattctcctgtctcagcctcctgagtagctgggattataggcgtgcaccatcacaaccggctaatttttgtatttttagtagaggctggtatgggggtgctgggttggggggaagttcgccatgttagccaggctggtctcaaactcctgacctcaggtgatccgcctgtctcagtctcccaaagtgctgggattacagacgtgagccaccatgcctggatgatttagtattttaattttgatttttttagtgcttccttgtgccatctttatccagaagtcagtcaagcagtctttctttctcactggtaatgaactatatgaaatccttttttatctttaggttatttccacagtggtctctttgaacatgactatgttgacctggtagctgtgacacactctttttctcctgagctttccctcaatgacgcatgctttggcattacagcatgccctagcaaagcttctggagcaggggttgcaaactcaaatctctacaaagtttaaaacagtgaggaacaaygggactgtggtaaagtgaaaaggacattctttgtgtaaggggcagatgctcagctcaggccaatggctgccatgtttgaactcagggcagggttgccacatctgca

SEQ ID NO: 723831 - DNA, 1152 bp, Homo sapiens
taaagttatcaatgtaattagccagggaaaggaagtagaggatataggacaaactaggcggccatagaactgatgcgggcaaggtgagtaaagacttgttgtgcctaaggcagaacaaagaagacatcagagctgattcctgaagagatacccagggttgtgattgcctgaagtgtttcagggaaggtaggtgagagccagtgggagtagaatctatataattcaacatctgtgtcttaggtctggttagtggattgtcacatagacaggggcaaaaggctaggcagtactcacacacagcctgttagggcagtgttcattggggaaaactttctgagggtagggcagtagcagtgtgcaggttcatcattgtccattgcattccagggaggcacatggggatctagcaggaccaggggtgaggctgtgggctttgaggctgacaaaccacatggttagggaagcattgggctctgctttgttgagctcagtggtgtggatgccatgataatgtgtcatggcagaaccttaactctagtcctgtcttgccagtttggtgatagtgttagatggagaaccagcctctcccctgtgtggtcagaaagctgagttctgagccatggagttgaatctgtatgtcagggcaatctgggagaaagatttacatcagcttccttgatgccagcccttcccttgacacattgtatgtgggaaaggagatttgggttggcctggattgattgtcttaagtcctaagccgtagttagcatccatgaaatttgcaggagctagcttctttttctgggagacatgaataaaagggatcagtcctgggcaagtcagcccttccttctcaccgagtgatcagacacttgttttcataaatcatcaacatgtcctgggaaagacatagaggtgcagaaataacagaaactgccattaattgaatgcctagtatatgccagataccttactaarcactttctcaatgaattatatcattaaatagtggcaacacttaaggacaatagcattttaggtaagggacctatgataatcagaggttaagtaactggttcaagaccattccactaatcagtgaaagagctggaatttattctcaggagttccaactcctaagcctgtactaac

SEQ ID NO: 723832 - DNA, 2078 bp, Homo sapiens
atcaagacaaatgggctaagggtacattgtgtgaattctatttctcatgagacatttcctatcttgcacgccaagtccggtcccattcttctcttgtgttaaaactccaaaatctttcattgaaatagaaaaagaaatgctgacattgatagcacagtaacaatctaaatcgggcatgtagctcctgcatgtagttctgctttctttgtgcatgcgatacctcctaaatgttgaacagcaggggagataatatagaagccagtgtgctccacaggggatgggtgggcatgagtcatgcccattgccacctgctggactcttcctcctcaagaatcagcttagtccttgcaaagcatcactatccccacccctgctggggccccctgtctcaatgatgatactggttccctttgtctcygctgtcctgtcccatcctcctgttaaggtaatatttccaataaaggcatgctgaattattattatttttttctttgcaacttctgaccgtgatttcactcttctggctttttctcccagtattccgttggtgtagctctgcatctttgtccttcactttagaaaatggtaatttattattttaaatgtttcccaaaggtataaaatgccctcaggtgtttcacttctaagaagtgaactgttaggagacaagtcaccacaatctccttatgccagtttaatcacagaccgccagagtatttttaaactattatttgcatttttacttctctaagtgagccacatagtttttatattccctgtggtcttaagccagccccctactctagtgttatatctctctggccccggatgtttggcaatgtgtcttctgagaaattaaccttgcttttgcaatgggaggtttgtctgttcagcaagactagaactaagttaaaacgttcagaaaaggagaatttgattctctgtgatattttcttaaaaagagcctggaggtatattattgcaacgctgtttctctctctctcttttctcagttcattggtgttcatccttgctcacattgatataagagccgctggggactctaatagagctgctaatgccacttccttagagaggacttttctaatcatgttctgcaaagtagtttcccttaccgttctgtttctcagctcccagtttctttccttcacaccacttgtaacggttagtagttttttttttgtttgtttgttttgttttttttcaattatttgcttgcccacatctccggacttctaccctctatgagtgagtgagctactgtattcttggcatatagtgcactgctttgcaacaggaaatattcagtaaattttggttcagttaattgatgaaaaggaaaggagttgtggaagttcaaagactatgtttttcttgcttatgaccacttcttccccttttagctgcttgtgtttaatggatgctgggagttcacacacaatgcccttgctctcctcccagcgttgtattcagccttacagtaatttctccacagggggtgatgagagaaagagtgagaaatctcttgaaaaggaatcctgatgtatctcctgtggaggatatgtgtgcacatttaatgtggtccacacaggaagaaaatttgttgggctacatgcttggaagtggagaggtaagggggtggtttcagtgtcattaattgatgatgtgataaaaatccatattctttctgtatctctgctttgtagtcttgtgccggcttcactgcagggcaggatgtccttgtggttgcagcaggtagttttgggggctatgtgctttgtttttcacgtcaggtgtgtgtgtgtgagagagagagcgagcaagagatcaagagagtaagagagagagcaagagtgtgagagtaagagtaagagacagcaccagatccccaaccactcaacaaaaggccttttcttttctttcttttgttctaatctgattgtttctaatcaaattgggttggttacatgcccatctctgaaccagtaattccctatggcccttattcaaatttcatttcagtaaggcttaccctgatgactgagtctaaaatcaca

SEQ ID NO: 723833 - DNA, 2078 bp, Homo sapiens
atcaagacaaatgggctaagggtacattgtgtgaattctatttctcatgagacatttcctatcttgcacgccaagtccggtcccattcttctcttgtgttaaaactccaaaatctttcattgaaatagaaaaagaaatgctgacattgatagcacagtaacaatctaaatcgggcatgtagctcctgcatgtagttctgctttctttgtgcatgcgatacctcctaaatgttgaacagcaggggagataatatagaagccagtgtgctccacaggggatgggtgggcatgagtcatgcccattgccacctgctggactcttcctcctcaagaatcagcttagtccttgcaaagcatcactatccccacccctgctggggccccctgtctcaatgatgatactggttccctttgtctccgctgtcctgtcccatcctcctgttaaggtaatatttccaataaaggcatgctgaattattattatttttttctttgcaacttctgaccgtgatttcactcttctggctttttctcccagtattccrttggtgtagctctgcatctttgtccttcactttagaaaatggtaatttattattttaaatgtttcccaaaggtataaaatgccctcaggtgtttcacttctaagaagtgaactgttaggagacaagtcaccacaatctccttatgccagtttaatcacagaccgccagagtatttttaaactattatttgcatttttacttctctaagtgagccacatagtttttatattccctgtggtcttaagccagccccctactctagtgttatatctctctggccccggatgtttggcaatgtgtcttctgagaaattaaccttgcttttgcaatgggaggtttgtctgttcagcaagactagaactaagttaaaacgttcagaaaaggagaatttgattctctgtgatattttcttaaaaagagcctggaggtatattattgcaacgctgtttctctctctctcttttctcagttcattggtgttcatccttgctcacattgatataagagccgctggggactctaatagagctgctaatgccacttccttagagaggacttttctaatcatgttctgcaaagtagtttcccttaccgttctgtttctcagctcccagtttctttccttcacaccacttgtaacggttagtagttttttttttgtttgtttgttttgttttttttcaattatttgcttgcccacatctccggacttctaccctctatgagtgagtgagctactgtattcttggcatatagtgcactgctttgcaacaggaaatattcagtaaattttggttcagttaattgatgaaaaggaaaggagttgtggaagttcaaagactatgtttttcttgcttatgaccacttcttccccttttagctgcttgtgtttaatggatgctgggagttcacacacaatgcccttgctctcctcccagcgttgtattcagccttacagtaatttctccacagggggtgatgagagaaagagtgagaaatctcttgaaaaggaatcctgatgtatctcctgtggaggatatgtgtgcacatttaatgtggtccacacaggaagaaaatttgttgggctacatgcttggaagtggagaggtaagggggtggtttcagtgtcattaattgatgatgtgataaaaatccatattctttctgtatctctgctttgtagtcttgtgccggcttcactgcagggcaggatgtccttgtggttgcagcaggtagttttgggggctatgtgctttgtttttcacgtcaggtgtgtgtgtgtgagagagagagcgagcaagagatcaagagagtaagagagagagcaagagtgtgagagtaagagtaagagacagcaccagatccccaaccactcaacaaaaggccttttcttttctttcttttgttctaatctgattgtttctaatcaaattgggttggttacatgcccatctctgaaccagtaattccctatggcccttattcaaatttcatttcagtaaggcttaccctgatgactgagtctaaaatcaca

SEQ ID NO: 723834 - DNA, 1005 bp, Homo sapiens
ggccagtctggtctggaactcttgacctcaagcgatccacctgcctcggcctttcaaaatgctgggattacatgcgtgagcaccacgcccagccggcacttccatcaatttttgagtctgaagcccacccacacgcaaccccaacatttaacctggtaagctggttaattctgctacaactgcagccaatcatctgtcaatcatcaaagctgcctttaagatcaacctaggactctaccgtgggaacagtagatgtggggcaggtatgtgtcctatactggcctctgtcttcactttctgccaccacacataggcagtacccaagtgtcagattttcctgaaggctgggtaactgaagggaaatacaacagaaaaggaaaaaaattgaaactccactctgaaagtgactttccccataatccaagagaaaagcaacaagaaaacaccttcagttttaaaactattttttttaagctaagttcgtgctctgtcgcccaggttggagcacagtggcacgatcatagctgactgctggctcatctcctgggctcaagcactgcycccacctcagcctgtccagtagctggaacttcaggtatgtgccaccacgccaggttaattttttgaaatttatttttagtaaagacaaggtcccactacattatccaggctggtctcaaatgatcctcctgcctcggcctcccaaagtactgggattacaacaagcgtgagttacaacacctggtcagatttttttttttttttaaagaaaggcaaaatttattattagactcaaaatattcacaaccattttcttttttttttatactttaagttctagggtacatgtgcacaacgtgcaggtttgttacataagtatacatgtgccatgttggtgtgctgcacccattaactcatcgtttaacattaggtatatctcctaatgctatccctcctccctcccccgaccccacaacaggaccctgtgtgttgtgttccccttcc

SEQ ID NO: 723835 - DNA, 594 bp, Homo sapiens
gtccttctttggtcaaaggtatacgagtacctgtgctcccctgccagaacctccaaacaagctctcaagattggtgaaaaagccgggcatggtggctcacacctgtaatcccaacactttggggaactgaagcaggtggatcacctgaggttaggagttcgagaccagcctgaccaacatggcgaaaccccctctctactaaaaatacaaaaattagccaggcgtggtggtgggcacctgtaatcccagctactcaggaggctgaggcaggagaatcgcttgaacccaggaggtggaggttgcagtgagccaagttgccccattgcactccagcctgggcaataagagcaaaactccatctcaaaaaaaaaataaaaaataaaaaagattggtaaaagaaacaaactggagaaaaaggtataaagtacacttccacttacaaatgagggatacgtatgtgtattttaaaggaatctcrgaataataaacaaaccaaaaaaaggtagtcctaaagatctcttttaataggaaaaatagtgagactaagatgtcaggccccaaactctggctgtaaaactagaagcaaaggatgag

SEQ ID NO: 723836 - DNA, 1757 bp, Homo sapiens
tgaagataagctaataaaaaaatagaaaactgtttatgagaaaagggccataaaaatctatgcacaatgtaatctcaattttgttattaaaatatatatgcaaaatatcttcctattttctatatctcctgaattttcaatagtacatgttaaacacatattttataatttaaaaaatatatatattttttaattttttgagactgagtctcactgtgtcgcccagcctggagtgcagtggtgtgatctcagctcactgcaaatgctgcctcctgagttcaagcaattctcctgtctcagcctccgaagtagctgggataacaggcgtgcgccaccatgcccagctaatttttgtatttttagtagagatggggtttcgccgcgttgtccaggttggtttcgaactcctgagctcaggtgatcgacccgcctcagcctcctaaagtgctgggattacaggcgtgagccaccacgcctggccaaatttaagtttttgaaatagttcttcccgtgttatactattgttgactacctaaaggtaattaagacattacttgtatttttatatttaaaatcctttgtcatttgagactatcaatcaatgtgttattgaataaatccacttggaacttcattacatttaggttaagtacattacacggcagtgcaagtctcatattgtttattgaatattgatatattttctaatataagcctaggattcacatattatatatcatattcatatattaactaatatatcaacatattttctaatatatttatatcatatttatgaagcaaggatgaatttacaaagaatttaattaaaaagacagatgatagatgaaatttcttttatgctaatttyatcatccccgagaaaaatgaaaaagttaagcctaaaacttacctcaaaggtatggtctagtctgtatactgacactgaatttactgcactgactatctccaatacgccattgaaattattcaaatcttgaaaaacttgcagaatttctataattctacttagtactgccacccgttcttcaaaattttctgcttccacaatgcatctaacaacaacaaaaattcatggcttagaaaagtttcttcacctcacttagaaaacaagataattatgagtagccagaattttagcttaaatatgacttaatattatggctattaggaggtagtaagagtaaattaaaacttacttttcaaaccagagggtgagatttgtggtatggcgaatcatttttaataaatttggagaatttatttctttatcttctttggtccacacactccctacaagttcagacggttgaactttcctatggaattgaaaatcagtgcaacttaacctataaaggatttgtattacttaaagatcttctaaaacttaataagaaaaagacaattaacccaaaagacagatgaacacatatatgaacaagtaattcagagaggaatagacccaaatagctacaaacacgaaaacacactttatcccttactcagggaaaataacataaaactacaatgaaatcccattttactcattagatgaacaaaagtctgataactcaaggccaggcgtggtggctcatgcctgtaatcccagcgctttgggaggccgaggcagatggatcacctgaggtcaggagttcgagaccagcctgaccatcatggaaaaaccccgtctctactaaaatacaaaattagccgggcatggtggcacctgcctgtaa

SEQ ID NO: 723837 - DNA, 650 bp, Homo sapiens
attagaatagcacagatgaaaaagtttgattacacactatgatggtgaagatatgaggaaacaagcattctaatatattgtaagtgtattaggactataaattgtttcaacttctgtcaaggggaactagataatatcaaagtttctctttgacctagcaaattctaggaatatgtcctgtagatatacttgctcttayatgaagtcacttagagacaaggttattcattgcagtgttgtttattataccagaagtaaagcaaaacaaaaaacgccctagaaataaacagtttaaataatcatcagtaggaataggggactagttcaataaataatagtaaatccatacagtggaacctataaagttattttaaaataaccaggcctctgtggaacattatctaagatatgctgcaaaatgaaaagtgcaggatgtatagtactgcaagtatggttcctcatatatatatatatatatatatataaggaatgcagcattttattatataagcatttgactcaaataatttctctgcatttaccgtattggtctgttcgcatgctgccaataaagacatacccaatactgggtaatttataaaggaaagaggtttaaacaactcacaattccacagggctggggaggcctc

SEQ ID NO: 723838 - DNA, 905 bp, Homo sapiens
tacttttaaactttacatttacaagagtcaaggcttccactatcaccaatgagagtagaaggtaaggaggaagatagtaatgaaggtacctactattgatgtgggcagagataggaaaggcctaggaggaagacctgggaacactgagagtcttacatattcaatttttttccaggtcagtgaacattttcttatgaaaacaatttcattctaccacccaaattcctctccctgaagtactgtggccaaactgaaaaaaggataagtaggtattagctgaacaaagtaagggaayagacgatatagagcgtttccatcagagaaaatgctggatacaaagaccaggtgacacaaaggttggaaaagcattccaggatctatccaaagtcagttaacatactgatacatctgcctgttgggcctaaaattcagcctcctactaaaaatttgtgccgtcattcaagtattcattttttaaaatttgtggcatattacaaaatgtataaaacagttcctgtaaggaagcttgcaatgtaattttatatttctatcattacttatcaaaataaagtatcaaattcctaaaacaacactgactatgaaactcccaattagaaaaacatcattagtaaccaatgttaaaagcaattatatgcaagtatcataagtattacatttacatttgtcataaataatctccacagaaatttctcacagtaattcagtattcctttcatggcagaggttatagttcacagttgtttcatctgcatctcatcagtctttattgtgtcttgatggacttgatgaacctgcataggctataatgatttgactatacctggtgttataatccatggaatcacctttcactgtagttgttcattttagacagcacacaatga

SEQ ID NO: 723839 - DNA, 1468 bp, Homo sapiens
agatatctaatatctaatcaacagattttatttcctttctgtcctggattctgagtttggctgaaatattaataagcatgccaggatgcatagaggagcaagattgaatgaggaattctttaattttataggcaattttcttccgatagaggcttgccccttctacatgtggatatatcccagaaagattttctttaaactatatctggcattaagatctgaaactaaacaaacaacccattaatttttatcatgaaagtaatcataaacttattttcataatatatgtatattatcattggaattcttatgttacttcactttttttatcaaatgtttgcaaaaagatgaagcaagattgtagctacatgattaaaaattgctataacagctaaatactctgagaggtggatttcacaagtcccttctgatttttttcactattctgtttgtgtgtgtttcaagtatagaaaatttaaaataacaatctattttctatattaagtatagaaacttaataaattaagaactgcattatatctattattaaaacaagtgtgataattagatcaaaggcattatccttgactatgtggaaaaaacaaagtgtaattaattatgagatagatgttaagacaacgatttcataggatactttaactgcagtgctctttatcacttaatcttccacataaagaaaatgatggctgggcatggtggctcacgcctgtaatytcagcatcttgggaggcctacgtggcatatcgtgttagctcaagtgtttgaaaccaatatgggcaacatggcgaaaccccatcactacaaaaaatacaaaaactgtccaggcatggtggtgcacgcctatagtaccagctcctcaagaggataaggtggaaggatcacttgagtctgggaggcagaggtagcaatgagccgtgattggtccaatgcactccagcctaggtgaccttgttgggggggaaaaaaaacaaaaaaaaaacaaaaaaagaaaaccacaaaaaaaaaaaaaaagaaagtgacacataagcagacatgggacaataaaagactgttacatttctaacacaaacaaacattttctttttttaaaaaatgcatttttattgtgtgtattaaaggtatacagtataatgtcagggccatttttgctttactaaagaaatacctgagactgggtaatttataaagaaaagatgtttaattggctcaaggttttacaggctttgcaggaagcatggtgctggcatctgctcagcttctagaggggcctcagcaagttacaaagtcccaatcatggtagaaggcaaaggggcagcaggcacttgatgtggtaaaaggagcaagcaagtggcaggaggcacttcatgtggtaaaagaaggagcaagtgagacagaaaaaaaaagagagagagaattggtggaaaggtgctatacaattttaacaacc

SEQ ID NO: 723840 - DNA, 1320 bp, Homo sapiens
atctcaatatatgcagaaaaggccttcgacaaaatttaacaccccttcatgctaaaaactctcaataaactaggtatcagtggaatgtatctcaaaataataaggctatatgacaaacccacagccaatatcatactgaatgggaaaaaactggaagcattccctttgtaaactggcacaagacaagaatggcctctctcaccagttccattcaacatagtatcggaaattctgtccagggcaatcaggcaagagaaataaataaagtgtattcaaataggaagagagaaagtcaaattgtcctgtttgcacatgacatgatacttcgaaaacccatcatctcagccccaaatctccttaagctgatgagcaacttcagcaaaatctctggatacaaaatcaaagtttaataccttctaaacctgtcttatttcttctttcattgtccttttcaggaagaatggttacaataaaacaaaagttagatcactcacttctcagttaagaagtcttcaataacttcccttcttttttagagtaaaagctgaagtcagatttagctgatttctctgacccatctactaccatctctggactcaatttttccttctcgatggcagccacactgtcctttcactgtgtcctgaatactccaggcagtttcccccagactgtcagacttgatgtttccatggtccatgatgatctttacctagatgaatgtgagttttgctctttcaccttctgtactagtcaagttccaaatattgattcacaatttttaagtatttaaaacaggcattttaaatatttggaaatagcagatttaacacatggtatttgctatctcctgctgggaatactaaatacacatgaatttaaaacagtagggagctatctacctctttctttcattgccaaaagaaagagacaatattatcagactgtaagatctggggtcaagaagaaaatgttggaaccacagttaccccattcagtaaaagagccagaggcaaaacaatgctagaggcactgcccaaaacataggtgggcaaaagggaacactctggcttctttcttccccttagttttcaatgctctcctttagccaaacctagctagatgctgctggtctagatcagaatgccttgcatatacagcagagcaaaagagggctgagaagtgtaactaaggaaagacacactcattccagcatacctttattcagctctttattcagatatccttcagtctggcyttctctaatcacttcatctaaaattgcatatcccaggtccccctggaatttcctattcttcc

SEQ ID NO: 723841 - DNA, 848 bp, Homo sapiens
tgttttctaggtattagattttggttttatacacagactctaaacttctaattatttcaatatacttttaaatataaaataacctacaatttttcttaatattatatattagcagttaagcctagagtgtgatttttcttctcagatctatgtatatgcctaaacyatattttatttaagtgtattatgtacataatataggagagacaagaactcaacataaaatcaacaaaaaatggatatgtaataagaagtccattttatttttgatgcttactatgcatcagaatcttttgggaagcttttttaaaaatgcagatgtaaagttcctagcttttcagagactctgattcagttgtcttggggtgaggcatgggtattgctctaggtatgtttttaaatttcagatttcacattattccaatgtgtagccaggattgaaagccgttgtatatctagtttccttggagcatgggcaaaggaggagtcaaaaagaattgactttttatatcctgcactctctaggagagagagtctgaaactgggagatgtgaacaactttttctagaaagacaggtactgtctgctgtgtctcacaaaagtctggattagattttgcttaagacaatccacatttctttgctaattactaactttacaagtaacatcagcctccttgatacttcaaaactataaaaggatgtgcctgaaataaggtgtttaagtattctttctagatacttgagtatctaaaattgtcattctagtttatctattggtataccttgtgagtttgctaacaaggggaactgacaagatcgagttttaaagttgtgagtctgaatact

SEQ ID NO: 723842 - DNA, 848 bp, Homo sapiens
tgttttctaggtattagattttggttttatacacagactctaaacttctaattatttcaatatacttttaaatataaaataacctacaatttttcttaatattatatattagcagttaagcctagagtgtgatttttcttctcagatctatgtatatgcctaaactatattttatttaagtgtattatgtacrtaatataggagagacaagaactcaacataaaatcaacaaaaaatggatatgtaataagaagtccattttatttttgatgcttactatgcatcagaatcttttgggaagcttttttaaaaatgcagatgtaaagttcctagcttttcagagactctgattcagttgtcttggggtgaggcatgggtattgctctaggtatgtttttaaatttcagatttcacattattccaatgtgtagccaggattgaaagccgttgtatatctagtttccttggagcatgggcaaaggaggagtcaaaaagaattgactttttatatcctgcactctctaggagagagagtctgaaactgggagatgtgaacaactttttctagaaagacaggtactgtctgctgtgtctcacaaaagtctggattagattttgcttaagacaatccacatttctttgctaattactaactttacaagtaacatcagcctccttgatacttcaaaactataaaaggatgtgcctgaaataaggtgtttaagtattctttctagatacttgagtatctaaaattgtcattctagtttatctattggtataccttgtgagtttgctaacaaggggaactgacaagatcgagttttaaagttgtgagtctgaatact

SEQ ID NO: 723843 - DNA, 2084 bp, Homo sapiens
tatttttagtagagacagggttttgccatgttggccaggctggtctctaactcctgactccaggtgatccgcccgcctcagcctcccaaagygctgagattacaggcttgagccactgcgccaggcccattgttttctttttaaacaaacttttagttttgaggtgatgctagattcacccgtggtcacaagaagaaacatggagagttctcttgcacactttccccagctcctcccagtgataacaccttgcgtagctacagcacagtgtcacaactgcaaattggtacgtatgcaattcatgacattcaggttccaacaactttacaagtgctgggtgtgtgggggtgtgtggatttagttttatgtaattttatcatacaaatagattcatgtgaacaccatcatggtcaagctacaaggcaggaatccagcaccagcatctctcagtctaccctattacagccaccagcacctccccactccctccctcagaattttaaaaatgaaccttaaacatcatttactcaaaaaaaaaacttccttgatcatctaggctacattttcctctcatcataatgcccccaatttcttctttatgtcttcttatcacaattttgagttaggagtaatgggtttaatgcccttgaaatgtctctcgacttaggtttcctcattggtaagcagtttttctatccttgatgccctctactctgtttccaatgaaagggagagggcaggtactactttaaaacaaggaggggctggggatggtggctcacacctgtaatcctagcactttggaaggccaaagtgggaagatcacttgagctcagaagttcaagaccagcctgggcaaacataggcagacctcatctctacaagaaatttaaaatattagccagtcgtgatggtacatgtctgtggtccccactacttgggaggctgaggtaggaggatcgcctgggcctgggagggtggggctgcagagaaccatggtaacgccactgcactccagcctgggcaacagagcaagacccattctgaaaattaattaattaaaaataaataaataaataaaaggaggagactataacatagaagtgtcttgacctgatagaaaggaaaaggtgagaaatcagtgtttatacttcagtgtctgtgggggaaggaggaggacagaggagatagaagcttgcagagatgcctgtgttgtggcctcctgttctgggctgagtcaaagagtgaagaagaaggttacacagaaggaagtagacagcacacggaaggttgtcctgtttccaacctgggactctgaatagagacctctttgctgaacttggggcaactgcagagtccgacaaagtgagcctctgtgaggcctcttgcgtcattcggggccccctctgtgccatagaaccggctcacaaatccccattgtctcctgtgacagggagacggcagtttctgagaccgtacagggagctggccagagaaaaaggtccatgtggagactgaggtgaatgacatcggggcctagggctaaagccaggctggtcaagccaggaatggaaatgaagttctacagccagagcaggtgtcaggttcagccaaaccgacgggaggaaccccgggccgagaggcgcacgttctgtgttgccccatctcagacatcggctcctgatagcaaccccactgctaaccttgctaatcctgctaacctcactaatcccgcccagaccagcccactcggggactggagcccgtttagctccatctttccacactacatggtcacacaagcctcctacacacccacaggccattttggacataaatcgatagaagatgaggaaacctgaaaaatggatttgtccaaaagcaactgaatttgaagggctggattagcctgcatttaacagattgaaatgagttttttaaatttcctctaggaaagccggcaggtggctttgaggaagattagatgaggtttggaaaacatggggcctctttttctttccatagctgagtacagtgtgggtaaatttgcaaccctgtgacatatatatttgttgataggatta

SEQ ID NO: 723844 - DNA, 2084 bp, Homo sapiens
tatttttagtagagacagggttttgccatgttggccaggctggtctctaactcctgactccaggtgatccgcccgcctcagcctcccaaagtgctgagattacaggcttgagccactgcgccaggcccattgttttctttttaaacaaacttttagttttgaggtgatgctagattcacccgtggtcacaagaagaaacatggagagttctcttgcacactttccccagctcctcccagtgataacaccttgcgtagmtacagcacagtgtcacaactgcaaattggtacgtatgcaattcatgacattcaggttccaacaactttacaagtgctgggtgtgtgggggtgtgtggatttagttttatgtaattttatcatacaaatagattcatgtgaacaccatcatggtcaagctacaaggcaggaatccagcaccagcatctctcagtctaccctattacagccaccagcacctccccactccctccctcagaattttaaaaatgaaccttaaacatcatttactcaaaaaaaaaacttccttgatcatctaggctacattttcctctcatcataatgcccccaatttcttctttatgtcttcttatcacaattttgagttaggagtaatgggtttaatgcccttgaaatgtctctcgacttaggtttcctcattggtaagcagtttttctatccttgatgccctctactctgtttccaatgaaagggagagggcaggtactactttaaaacaaggaggggctggggatggtggctcacacctgtaatcctagcactttggaaggccaaagtgggaagatcacttgagctcagaagttcaagaccagcctgggcaaacataggcagacctcatctctacaagaaatttaaaatattagccagtcgtgatggtacatgtctgtggtccccactacttgggaggctgaggtaggaggatcgcctgggcctgggagggtggggctgcagagaaccatggtaacgccactgcactccagcctgggcaacagagcaagacccattctgaaaattaattaattaaaaataaataaataaataaaaggaggagactataacatagaagtgtcttgacctgatagaaaggaaaaggtgagaaatcagtgtttatacttcagtgtctgtgggggaaggaggaggacagaggagatagaagcttgcagagatgcctgtgttgtggcctcctgttctgggctgagtcaaagagtgaagaagaaggttacacagaaggaagtagacagcacacggaaggttgtcctgtttccaacctgggactctgaatagagacctctttgctgaacttggggcaactgcagagtccgacaaagtgagcctctgtgaggcctcttgcgtcattcggggccccctctgtgccatagaaccggctcacaaatccccattgtctcctgtgacagggagacggcagtttctgagaccgtacagggagctggccagagaaaaaggtccatgtggagactgaggtgaatgacatcggggcctagggctaaagccaggctggtcaagccaggaatggaaatgaagttctacagccagagcaggtgtcaggttcagccaaaccgacgggaggaaccccgggccgagaggcgcacgttctgtgttgccccatctcagacatcggctcctgatagcaaccccactgctaaccttgctaatcctgctaacctcactaatcccgcccagaccagcccactcggggactggagcccgtttagctccatctttccacactacatggtcacacaagcctcctacacacccacaggccattttggacataaatcgatagaagatgaggaaacctgaaaaatggatttgtccaaaagcaactgaatttgaagggctggattagcctgcatttaacagattgaaatgagttttttaaatttcctctaggaaagccggcaggtggctttgaggaagattagatgaggtttggaaaacatggggcctctttttctttccatagctgagtacagtgtgggtaaatttgcaaccctgtgacatatatatttgttgataggatta

SEQ ID NO: 723845 - DNA, 2295 bp, Homo sapiens
atgcatctgtatgtttctaagtgtgtgtcttcatttcctgttttagatattgtttatatctcagatagacatttatatgtatatgtgtttttttctatattagtttaaatatctatatctataaatagttatacataatatttcttatatctctttcaatacatacaaatayatgtatacataggtaaacattcctggtgtatttgtgtgctcattatagtagcacttttaattttcttcaagaactttccatttgcactgataaaagaaaatcttcagccaaattaaatttaaaggtgtttaattgagcaatgaacgattcacaaatcgggcaaaccccagaattacagcagattcacagagactccagcgcagccacgtggtggaagaagatttatacacaaaaaaggggggaaataatgtacagaaattgaaggtgaggtacagaatggctggattggttacagcttggcgtatgcattatttgaacacagtttgaacactcagcagtgtatgattggttgaagtacggccactgggattggccaagacttagctattgttacagctgcatactactagttaggttttcaattctaacaaacaacagacaaaaaaagaaaaaaaaaacaagaaagaaagagaaagaaatacggagtccttctcaggccatatttaatttcctttaacagtgtttccaacttaactaactgctttgtgtaagaggtccagcttggtgcctgtctgtcttggctttcagcatgccttcctcactaagcttaatcacgtctagctttggatttaaagtgagagacctgtgactcttcctttcacttgaacacttagaagccatcgtagggtaattaattggcctaatttcaatatttttttgtttcggggaatatgggggcccaggagagggagaatgacaggagaatggatggtcagtggacagtcagaacacatacaacatttacccactatgtttgctcattgctagaaaggcaacgtttgtgcatccccaaacaattacaacatcaaagatcacttattacatatcactgtcatagatctaatagtaatgaaaacgtttgaaatattaagagaattactgaaacgtaacacagagacataaagttagcacatgctgttaaaaaaaatagtgccttatagacttgcttgattcagggttgccacaaaccttcaatttgtaaaaacatacaatatctataaagctcaataaagcaaagtacaataaaatgaggtatgcctgtgtacgcttttgtgtgttttgaattttgagcctcagaactctaacacttatttagaaaattacatgttacattagcaaaaatcttgtaaaaatgctacctaagaagctctacagtaagtgaaaagttcagaaaagtggaaacttgctaacatggacaccaagaaatactaaaattattttctatatccttgtaagttatctctttccttaattagtctgagtgacataaactttctatatgtatatgtgatagaaacactgtaaaatgaaaaaaaaatatattatttagagactttatagtcacagaagggaatagatgcattattttcaaatgaggaaatatttttattaatagaaaagcaagtcgagtcttagaataaaaatcacatcattaattgacagataaaagactgataaagttcaacctctacttttgattaaatctttcagcaaactaagaataaaagataacattcttaacttgttaaaggttatacctaaaacctatagtaaatagtatacatttttgagaaactgtagaaatattccctttaatattaaagaaaacacaaaggtccctatatcccaggttctgcttatcaaagaaagagaaaaggatcagaatgaggtgtaaatattagaaaggaagacatataattgtcattatttgcagataatacaatcatatatacagagaatgccacacagtcaacaaactattagaatcaataagttttactaggtagctagatataatatcaactccagaaaatcaatagcatttttctacaccatcaataagtaactaaaaaacacagttaaaaaagataccatatactatgataacaaaaactataatatgtttaagaatcaacaatcaagaactcctaagacctatatgaagacaactttttaaaaaatctgataaggtaatggacatgaaaaaactcaacaaatccaggcattctatgatcttggataggatacaatgatataacaaatgtgctatattattattaaat

SEQ ID NO: 723846 - DNA, 2295 bp, Homo sapiens
atgcatctgtatgtttctaagtgtgtgtcttcatttcctgttttagatattgtttatatctcagatagacatttatatgtatatgtgtttttttctatattagtttaaatatctatatctataaatagttatacataatatttcttatatctctttcaatacatacaaatacatgtatacataggtaaacattyctggtgtatttgtgtgctcattatagtagcacttttaattttcttcaagaactttccatttgcactgataaaagaaaatcttcagccaaattaaatttaaaggtgtttaattgagcaatgaacgattcacaaatcgggcaaaccccagaattacagcagattcacagagactccagcgcagccacgtggtggaagaagatttatacacaaaaaaggggggaaataatgtacagaaattgaaggtgaggtacagaatggctggattggttacagcttggcgtatgcattatttgaacacagtttgaacactcagcagtgtatgattggttgaagtacggccactgggattggccaagacttagctattgttacagctgcatactactagttaggttttcaattctaacaaacaacagacaaaaaaagaaaaaaaaaacaagaaagaaagagaaagaaatacggagtccttctcaggccatatttaatttcctttaacagtgtttccaacttaactaactgctttgtgtaagaggtccagcttggtgcctgtctgtcttggctttcagcatgccttcctcactaagcttaatcacgtctagctttggatttaaagtgagagacctgtgactcttcctttcacttgaacacttagaagccatcgtagggtaattaattggcctaatttcaatatttttttgtttcggggaatatgggggcccaggagagggagaatgacaggagaatggatggtcagtggacagtcagaacacatacaacatttacccactatgtttgctcattgctagaaaggcaacgtttgtgcatccccaaacaattacaacatcaaagatcacttattacatatcactgtcatagatctaatagtaatgaaaacgtttgaaatattaagagaattactgaaacgtaacacagagacataaagttagcacatgctgttaaaaaaaatagtgccttatagacttgcttgattcagggttgccacaaaccttcaatttgtaaaaacatacaatatctataaagctcaataaagcaaagtacaataaaatgaggtatgcctgtgtacgcttttgtgtgttttgaattttgagcctcagaactctaacacttatttagaaaattacatgttacattagcaaaaatcttgtaaaaatgctacctaagaagctctacagtaagtgaaaagttcagaaaagtggaaacttgctaacatggacaccaagaaatactaaaattattttctatatccttgtaagttatctctttccttaattagtctgagtgacataaactttctatatgtatatgtgatagaaacactgtaaaatgaaaaaaaaatatattatttagagactttatagtcacagaagggaatagatgcattattttcaaatgaggaaatatttttattaatagaaaagcaagtcgagtcttagaataaaaatcacatcattaattgacagataaaagactgataaagttcaacctctacttttgattaaatctttcagcaaactaagaataaaagataacattcttaacttgttaaaggttatacctaaaacctatagtaaatagtatacatttttgagaaactgtagaaatattccctttaatattaaagaaaacacaaaggtccctatatcccaggttctgcttatcaaagaaagagaaaaggatcagaatgaggtgtaaatattagaaaggaagacatataattgtcattatttgcagataatacaatcatatatacagagaatgccacacagtcaacaaactattagaatcaataagttttactaggtagctagatataatatcaactccagaaaatcaatagcatttttctacaccatcaataagtaactaaaaaacacagttaaaaaagataccatatactatgataacaaaaactataatatgtttaagaatcaacaatcaagaactcctaagacctatatgaagacaactttttaaaaaatctgataaggtaatggacatgaaaaaactcaacaaatccaggcattctatgatcttggataggatacaatgatataacaaatgtgctatattattattaaat

SEQ ID NO: 723847 - DNA, 2295 bp, Homo sapiens
atgcatctgtatgtttctaagtgtgtgtcttcatttcctgttttagatattgtttatatctcagatagacatttatatgtatatgtgtttttttctatattagtttaaatatctatatctataaatagttatacataatatttcttatatctctttcaatacatacaaatacatgtatacataggtaaacattcctggtgtatttgtgtgctcattatagtagcacttttaattttcttcaagaactttccatttgcactgataaaagaaaatcttcagccaaattaaatttaaaggtgtttaattgagcaatgaacgattcacaaatcgggcaaaccccagaattacagcagattcacagagactccagcgcagccacgtggtggaagaagatttatacacaaaaaaggggggaaataatgtacagaaattgaaggtgaggtacagaatggctggattggttacagcttggcgtatgcattatttgaacacagtttgaacactcagcagtgtatgattggttgaagtacggccactgggattggccaagacttagctattgttacagctgcatactactagttaggttttcaattctaacaaacaacagacaaaaaaagaaaaaaaaaacaagaaagaaagagaaagaaatacggagtccttctcaggccatatttaatttcctttaacagtgtttccaacttaactaactgctttgtgtaagaggtccagcttggtgcctgtctgtcttggctttcagcatgccttcctcactaagcttaatcacgtctagctttggatttaaagtgagagacctgtgactcttcctttcacttgaacacttagaagccatcgtagggtaattaattggcctaatttcaatatttttttgtttcggggaatatgggggcccaggagagggagaatgacaggagaatggatggtcagtggacagtcagaacacatacaacatttacccactatgtttgctcattgctagaaaggcaacgtttgtgcatccccaaacaattacaacatcaaagatcacttattacatatcactgtcatagatctaatagtaatgaaaacgtttgaaatattaagagaattactgaaacgtaacacagagacataaagttagcacatgctgttaaaaaaaatagtgccttatagacttgcttgattcagggttgccacaaaccttcaatttgtaaaaacatacaatatctataaagctcaataaagcaaagtacaataaaatgaggtatgcctgtgtacgcttttgtgtgttttgaattttgagcctcagaactctaacacttatttagaaaattacatgttacattagcaaaaatcttgtaaaaatgctacctaagaagctctacagtaagtgaaaagttcagaaaagtggaaacttgctaacatggacaccaagaaatactaaaattattttctatatccttgtaagttatctctttccttaattagtctgagtgacataaactttctatatgtatatgtgatagaaacactgtaaaatgaaaaaaaaatatattatttagagactttatagtcacagaagggaatagatgcattattttcaaatgaggaaatatttttattaatagaaaagcaagtcgagtcttagaataaaaatcacatcattaattgacagataaaagactgataaagttcaacctctacttttgattaaatctttcagcaaactaagaataaaagataacattcttaacttgttaaaggttatacctaaaacctatagtaaatagtatacatttttgagaaactgtagaaatattccctttaatattaaagaaaacacaaaggtccctatatcccaggttctgcttatcaaagaaagagaaaaggatcagaatgaggtgtaaatattagaaaggaagacatataattgtcattatttgcagataatacaatcatatatacagagaatgccacacagtcaacaaactattagaatcaataagttttactaggtagctagatataatatcaactccagaaaatcaatagcatttttctacaccatcartaagtaactaaaaaacacagttaaaaaagataccatatactatgataacaaaaactataatatgtttaagaatcaacaatcaagaactcctaagacctatatgaagacaactttttaaaaaatctgataaggtaatggacatgaaaaaactcaacaaatccaggcattctatgatcttggataggatacaatgatataacaaatgtgctatattattattaaat

SEQ ID NO: 723848 - DNA, 1315 bp, Homo sapiens
ggttttataaagggcttccccttttgcttggctctcattcttctctctcctgccaccatgtgaagaaggacatgtttgcttccccttccaccatgactgtaagtttcatgaggcctccccagccctgtggaactgtaagccaattaaacctcttttctttgtaaatcacccagtcttgggcagttctttatagcagcctgagaaaggactaatacagacatccaatctatccaccctgctacttttttatcttacattttcatgttctcacttccattcttgtctagtttagctcccattgccccacattataatcacttgctagctgctctatctcttttgcatttgcctgagaaaaccacgagatgggtagttcactgctccatatttgggcacaagggactggccagttgagcatagccattcttttgggctcctctcctgccactctcttttcaatctctacattttaactgcttctatccctagacttctgaaagtaacccaagcctgccaacctgccccaattcagaatctatcaattttctctttcctctacctggagcagtctgcaacattcaaatgctcttacctggctcascttctcatccttcaaatctctgctttaacattttgcccttttttcatttttagttttattgtgatgaaattaacataaaattaagcattttaaagtgaacaattcagtggtacttagtacattcacagtgttgtgcaacaaacacctctacttccaaaacattttcatcaccccaaaagaaaacccgtgctcactaagcagtccctcctcattcctacctcccaccagcccctagaaatcaatgatctgttctctgtctctgtggatctgcctattctgggatatccttcctttttgataggctttctctaagtatcctcagagaacaacctttatggttccctatcctctcctactcactggtttctcttaatagcacatattactatctaaaactatgttatttatatattagcctgtcttttcctctaagctgtgagctccataagcaaagatcttgttttatttatttttctgttctcagtgtttggaatggtggctggcatagaaagttctcaatacatatttgtcaagtgaataaagataatcttatgaggtggtatagtcttagactctacttagttttcaggtaagtaacaatactaaatttaaactaattcaggcaataataagtaaacagatgaggtgactctctctcttcatcatcatcatctcaggccattttcttcatatggatggcttcccgatgaatta

SEQ ID NO: 723849 - DNA, 955 bp, Homo sapiens
atagtaacagatgcaaggtgtggatacttatgaagtaaacagaaagctgagaatgtgagcccagatgtgcacagatttacagtggtttcagggtcagggcatgatctagttctttatggaatatgatctggttcctggagcacaggtacactcaaagagatgctggctctggggccaaagtgtgaacaattttctatggcaatggctctggtgtctgagacattggcaggcacagtgcagccacagagctggggtccatagtgtgagcaataacaaagcagctgcagcttgagagttagatctcacatgggaatgggacaagtggcagctctggtcctgaagcagcacaattttggctgcttcttgaagggacttaggggtatagctgcatctcacactctggtgttcctcagagaaaatgattgttcattatctcagtgacctaagatgctggcatcttctgcagagcgggtcactgaggaccatggtggttcctgctattaatgccaataatcatcaacttctttttttgtccctagccatctcctggcatctcaggtatgctgatctcactagtgatcctttttatgtggataatctgtttcatttgcttcattgtgttgctacagatttttaaataggctcttgagctctcccagggcaaatttgcttgcggatgtctatctatctatctctctaactctctctctctatctctctatctgtctatcatcttttcttatggggcaataaagggtgatatctcccactccatcattttggtggtttctgaggaatgcattatattcttcaccttcttcagcatttttataaacattattttgactctttgtttttaattaatgcatctccattttctttatggtcccttactttagatttactttgttcaattgtttgkgctatgtttctttgtttctgcttctgtctcata

SEQ ID NO: 723850 - DNA, 1847 bp, Homo sapiens
agggtgtgagttgaggagggggtttgagtgaggcaaggaaaggataggagtcttggggtggcggaatcagtggggcaaagagaaggggtttggtcgggatcatctcaccttaacgccgcttctggaccttcgttgacggggtgtcttccccttcttcctccctttggtacttgaggttgatggggtctgttcgtccacatcttcattaggcttctgtggctcactggtcacctttgccatactgaattgtcccagtggtctgctcacagctcctgatcatcctatgtatacccctcccagcacaatgaggggccacacccttcaactttgattggtcagcaaggcactcgcccagccaatgagagctaagggacactaagacgtcacaaagcactactcttgtcacttctatgtgagagaggggtggggaggtacctggggagtcttagtcatcagaatgtaccactcctgccacctctgttttggatggtgggggggtgatataaaggcaaggatagcctggtggtagaaaagaggcttctctatgacagcctcttctatgccttcccatcatgaactaccacccctcctcatatacccatgttcaattgtggtggcccacatagcagacagtttcctttaatctattccccaaggccacacctactcattggtttattctgaagtctccctccctaagtcattagctgttatttttgatattttacctaaaatcccactaaaaacaatatggctgtctttcaatgtcagtggagaggtgagtaattctacaaacaaaagacagttcccacaaataaacatctttctacctatcacatttggcattaaaggcagcttattttcattaatttctgctagccctgcaattgatagaaagggattagaattaactgtctatttatgaaggttgcttttatctttacttttatcctattcttgggctctgaccacattatcattattgatttttgaaaggttatttctctattttattggatttttctttctaccttcctagtttctcttactaatttctttcccaccaaaagacacctgcatgtgacacacctgatgtgtttgaatgatttgctttcctatgtttttattcttgttaaacatatggctttgttaaatacgtgcatgtgtgaaagtgtaacatttgacttaagctgctatatgcatctcttgttcattgcttttaatgttgcatcgtgcttgttcattttcttccccctttragtgtaacctatgttgatgctgttccttactgctactaatgatgctgctatgagcctcgttagtagctcatgaccctttgtggaattctgcctatatttctttaaggtgtatgttcaggaacagaatttctaggtaatagacatatataattgtcttagtcatttcaggctgctataaaagaatcctatagactgggtagcttaaacaatagacatttatttatcacagctctaaaggttggaactgaaaaatcagggtgtctctggtaccagtttactgtattggtccattttcatgctgctcatgaagacacacccaagactgagaaatttagaaaataaagcggtttaataagcttacagttccacatggctgggtgcctcacaattatggcgcaagttgaaaggcacatctcacatggtgacagacaagagacttattaaattacaaattcattctctttgttagttgcaggactaattatatcacctatataattttattaaatttatttttggtagtttgtgtttttctaacgaattgatcaattttttctatatcttggaatttatgagcatacggttgtt

SEQ ID NO: 723851 - DNA, 575 bp, Homo sapiens
ttggttcatataatataaattaaatgttaagattggcagtaaactctccatttgcactgtggaagcagattgccattcacactaccatccatttttccatattatggaggcttcgtaaaggtacaaaattgccacatatcaatgctttttttctcttttctttctcaatgacacattttatcaaggcaatttagaagtggccatgttgagtccattagctgaagtatataatatcaaagaaaaaacaatcctaagtgccaaaaatgttttgtcaataaagattgcctggctgttgcataacattttactcccatatataaatagaagacaagtatgcaaaaaccaatgggctctattctcacattatttctttcttattaaatagaataataagtaattggattagttgatcaacttggtaaaattaagctaagarcattatatgtgtatgtatgaacaaaaattaacaagccataatagaaattattaaaatccacacttgtgggtatcccacaaaagctttttttctcaaatagacaaacacactgcagtgaactgaaagtattgttcagaga

SEQ ID NO: 723852 - DNA, 575 bp, Homo sapiens
ttggttcatataatataaattaaatgttaagattggcagtaaactctccatttgcactgtggaagcagattgccattcacactaccatccatttttccatattatggaggcttcgtaaaggtacaaaattgccacatatcaatgctttttttctcttttctttctcaatgacacattttatcaaggcaatttagaagtggccatgttgagtccattagctgaagtatataatatcaaagaaaaaacaatcctaagtgccaaaaatgttttgtcaataaagattgcctggctgttgcataacattttactcccatatataaatagaagacaagtatgcaaaaaccaatgggctctattctcacattatttctttcttattaaatagaataataagtaattggattagttgatcaacttggtaaaattaagctaagaacattatawgtgtatgtatgaacaaaaattaacaagccataatagaaattattaaaatccacacttgtgggtatcccacaaaagctttttttctcaaatagacaaacacactgcagtgaactgaaagtattgttcagaga

SEQ ID NO: 723853 - DNA, 575 bp, Homo sapiens
ttggttcatataatataaattaaatgttaagattggcagtaaactctccatttgcactgtggaagcagattgccattcacactaccatccatttttccatattatggaggcttcgtaaaggtacaaaattgccacatatcaatgctttttttctcttttctttctcaatgacacattttatcaaggcaatttagaagtggccatgttgagtccattagctgaagtatataatatcaaagaaaaaacaatcctaagtgccaaaaatgttttgtcaataaagattgcctggctgttgcataacattttactcccatatataaatagaagacaagtatgcaaaaaccaatgggctctattctcacattatttctttcttattaaatagaataataagtaattggattagttgatcaacttggtaaaattaagctaagaacattatatgtrtatgtatgaacaaaaattaacaagccataatagaaattattaaaatccacacttgtgggtatcccacaaaagctttttttctcaaatagacaaacacactgcagtgaactgaaagtattgttcagaga

SEQ ID NO: 723854 - DNA, 2589 bp, Homo sapiens
tctggctttttattttatgacaaaatttatgttttccaaaagtctgttatatttctattttgtttaaagtttttctagcaatttttagttttaaaacataaatgctagaacatgcagcaaatgtaatttttgttaataagaaattgtaatcttttgtggatggtaatgcatgatcaatttttgtaaagatgttaagaaaaattaggaaaaagatatattttttgtttacagattatatatttccctacaaattccagcttttattttatattatttaaactatgcatttatttatctttgtgttcctcatctatcaaaggctgaaaactaatgaaggcttcttcattggttgcaattttgtccatttcatctttaaagtttttaatttatgcatttggcaagctgtgattttatgcatgccattttatgactgctaaatttacattgtgagtgtatattttaacaataaaacatgacattttaatttgaatcatccttcactcggaaagaatgtaaacttttggtaatgtactattaatattattcagaaagggtacaggattgatataatttcttaagacttgcatacttaagaccttatttttcttctgtccaaagaatgccgatttgactgtgtaggaaattactggattacaatccttttttgtttttttcttgactctgcttcattatctcctgacatttctttcctttttttttttttttgaagtaatttgtgttttcttaccatgtcactgttggattttgttttctgtgttttrctaattcaaaaatgcatccagtagttgtcaagttgtaatgttttttcttattgtttttgtttggttgtctgttggaatgtgtgagcttttttaaccagcatacttgagtactttcttgaactcttttctctttttcaaaacttagatcattattgtctttggttctgattttccttgttttgtctcatcaggtatgcctataagtcttaagctaaatttttatcccctaactctttgtatttaattttataccatattgtttttgtctctttatctttttcctttcagttctgagaaaaatatctcaattctgaccttcacagtctctgccccatcatgaactagattttcagcaatgctgcatctgttttatcttagctctagtgaggactttaattggattttacaacgtcagtgtccttaaaacccttccctatctcctcagtcaccttcatctcagctcactgttttgtaccttaccctgaggttatataatcatcttcgttattttttcttatacctttctgtttctattttatatagatgaagacgtgtcttctgtattaataggactcagactttcaatcaacggtgtttgctgaacatctattttgtgctcagggacacctttattaggcacagacattatacaaaataatcacccaaacaattgtatactgaaaaaatcatagggtgccctgagaggatgtaacaggaggcccactttaatctggggggtgaggaagggactccttgagcagctaccatttgaactaaaacctgaataaagagcagagggagccagttacggagaggtgggggagaggctggatgctcagcaaagcatgcagcatggcccaggaagccaaaaatgctgcctccttccatgtactcattgccaagatttcatgaaatcatctttcccttaatctgtacagttttttaaattttattattattttttgttttttaaggggatcctgtattgctgttttcttcttaggttgagaggagtttttctctggaccctaatcagggcacaggccctgtggataagccagagctcatctgccaactttggtgacagtggaaatcctctctcatgtcaaagctgaactgagttagtgccaatgtgtgtagtttccagtgcatcatgctatcgaagcgtgttcatctagtatgacattgctggactaggcgatgtcttctgctatgcaaattgcctgatgtgcctctcttactaaagaacacccaggcacggaagggctgccagctttcctcgtagggaggggaagtttagataccaaattctgagtcagtgtcaaattggtggaaggcatttttgtcttcatgtttcccagccaatagagctgctttgtctcatgaacaaggacttcatagagagaggacattccttccaaattctgaaactagattactcagcactccttgtttttgggtgatgtgatcagcttgttttattttagttgttttatcgtctgttcatttacatatgttttagtggtatgtaagaagttgtaacaagatgctattttaaactagaagtcttataactgagaacatgtggtatttggctttctgttcctacattagtttgctaagactaatcgcctccagctccactcatgtccctgcaaagtacatgatatcattctttttttatggctgcaaagtatgttgtatatgtaccacattttctttatccagtctatcactgatggacatttaggttgactccatgtctttgctcttgtgaacagtgctgcaatgaacatagacatgcacg

SEQ ID NO: 723855 - DNA, 1148 bp, Homo sapiens
tcgaattagaaggggagacatagagaagacaataaacataatacttaaatcttattgtgtattacaagatggaaagttccaaggaaatcaaagtagggcagggtcaggggtattgagagttaggagggtggtgcgagtagactgcactcttaaattggtgctcctttgcatagcaattcttaaatacccctttctttgccttctgtaggagtctacaaagtatttttttcttctgcaaagatccagaatataaatattttaaactttgtgggccatatagagtctctgtcacatttttttttgtttgttttatataaacttttaagatatatatatatctttaagatatctttaagatatatatatctttaagagatatataaagtattctgagctcctgggctataaaagaactaagaacagactgcattttgattttgatcatgggcaggagtttgccaacctttgtcccggaagacatcaaactgacaaggtttgccatggaaaagggaaaaaggttgttctaatgacttgataaagcctctatgattagagtagatatgtagagaaacaagagtcccaagaatgactccacatatcctgagtacctttaacttggccagtaagagcacacttataatatccattatttttaagacatagtttcagcaatacaaacccatttttgacattgaatgtgctaccatatttctgttaatcaccgatagaaataaggggctggcttgaagtagccatgtctagagtaaagcccttcctgaaacgtgctggttgagaacatttgactgtgttttctggattagcaaatggatattgccttcaattaggcaacacacacagtaacatgtgatatactgaagcatttttatgggcaatcactggcttataactgtgacatttttggcaycttgacaaaggtggctttaggttctttatatctgaggttgccaacttagtcgacttgggaggcaagcccttattggtttccaggtttgtcttctaagtcagtctttagagaaagcccagatctgccaccttgtcaaggtgtgggtaggatctggctgtgtctgtagtatgagatgcttataaacatgagacaagactaagagaaccaaacatgagtgatggaa

SEQ ID NO: 723856 - DNA, 612 bp, Homo sapiens
tatgttactcagctgctttgttacaactactgttaaggttgtgagactctaacgygcactgcttattctgaaagaaatcctaaaagcaaaaatgcgaatgcaacgtagtattaacactctctaatagttgtagtaaatccttaagctacacatttttggattccactgtgatacaacaattgagtatattccactataataaaattttcggaatgttaactggcattgtcagctgtgtatgttatcagagtatagctaacacattttcccccaaaggaagtatgccaactatccatgtctaccgctgctaataaggcatgctaatttaagacattcaaggcaaattcagtatacaacatgtttatgtggtactttttccctactattacatacgcaattgaattttctcctttttaatagactatttttaaggcagttttagattaacagcaaaactgaacaaaaaccagagttcccaatagccacagatacaccctctacacacatgtatatctaccattatatggtcataccaacttgctataatcattaattagttccaggaagttttttgtcaattcttttagattttctacacagacaattatgtca

SEQ ID NO: 723857 - DNA, 1771 bp, Homo sapiens
attcacctatatttagagagtctgtgttatgcactgcaaagagtggaatatttctgagttgaaggaggtaggtttgcaatttttcatgcatataaatgtcacaagaactggcctttatctttttttttctttttggctatatcaaagaatatctttaagttttttttgtgacaagaataccaaaataaataaaaataaaatattttgtacatcaaaaactaccaatgcttgataagagtcaggaagcaagatatatagctttattattttttatatgagaaaaaaatgtagtaccaattactgtgtggaattaaaaaaaaaaaacctctctcaattaaaggcactacaaaataaatgacagtttccaggcatcagcacaaagctaaagggatttcaatggcctcattacttttattaccctgcattgctcagccaaatctactgcaagattgtgtttaggcataggatttgtcctggtacttgcagaaatgtgggcaatcgatcagctcacctggaattaagagagcaggcatgcaaaatcagaacatagcaaatgctatacttagacagttattctgctctctggagataggagaaaaggtattggctagaaaacaaattaataccaaatgaaagacaaattcaaccattttagttaaatctcaccacatctggtcatgtagtttaaggtgcttgaacctattcctattgccttacctttttgaatatcccattttctggcatttatttcctaaaatacatacaaataatgcacatttttgttaatttctgcaactggcaactaggagagtgattttttaaagtcaatctaaatgggagaaaatgttccacattgtgctataattttctcctgggcttgaaggtcacagtgatgaactgttctgtgttattctagagttgcacaattacccaataatcaggaattccacccagagctgccatgacttaactaaggggacccttgttcctagttttcataaatgtctagtctctgaggacaaaagaatggagttcatctaaaggtaaactgtcttgctgagtttaaaaaagcagtgtgtaattagaaaaaacaaggaactaaatagcttccatctaactctcaaatcaccttaccatttttaatttcaatctttaagagtaacagtttttcagtctatgataaaagtattattgtttttcttatttaaaagatcccagggtactagtatctgaaaagaaaatattacttattcaatactctcatagagctattatatttaaaattatgcattcgttttatgctgccttttgtaatttcataagaaagcaactaaatgcagtggtatttattttacggggaaaggattaccaaaatctgtggaatttagaatataagttgtttatctaacttccctatgatgaaaaccccaaaattctgttcaggaggcagatatttaaaatatgagcaatatataagacaatctaggtgatatagtatttgaaatacattttacctgaatttaatcaaatatgtaaattattcrttctggctgaaacacatatccaataggaaattaacaaagatcatttacctttgaattatattgaaatattccatccagaaattctttggtcattatataagtcagggtacttttaatcataagtgatagaacctttgggaagtgttgattaatctaaccaagccagaggaagggcagtaacaaagccaaatccctcaaactagggacctgaatgtagcaaggactcc

SEQ ID NO: 723858 - DNA, 590 bp, Homo sapiens
ttcaaaatagtcatatctgaggtaattatgacaaagaggaaatagaatactacaatctaaaaacctataagctatgactaaagcagtattcagaagaaaatttatagcttcagacatacttaatacacaaataagaatgaaaataactatataatgtattcaacttgggaattttaaaaagaactgcaaaatgaaacctcaggaaaacagaagaaagacacaagataaaacctgggaataaagaattaagaaaactataacaaaatcttacataaatatttataaaattcctaaataaaatattagcaaatacaattgcacaacgtatgaaaataataaaatatgtctaagtgaagctcattttgaaaatttaaggctcactccccttcaggaaatctgtaaataaatgacatgttttaataggtcaactctagctaggtctggataagaaaaagaaacaaaccacttgtaataaataacagccattgattactgaatccagattatcagcacacacttgtyctgtgttaagtgttgagggtggtgagggtgggaatggaggtgcatgtaggtgtatgttaaaacaaaag

SEQ ID NO: 723859 - DNA, 916 bp, Homo sapiens
cactttgggaggccgaggcgggtggatcacctgaggtcaggagttcaagaccagcccggccaacgtggtgaaaccccgtctctactaaaaatccaaaataagccgggtgtggtggtgtacgcctatagtcccaactactcgggaagctgcggcaggagaattgctggaatctgggaggcagaggttgcaktgcactgagatcaagccactgcactccagcctgagcaacagagcgagactatttctcaaaaaaaaaaaaaaaaaaaagaatatttaaacataatttaaaaaattctatatatgtgtaaaagtaacagccaacatcatcattaatggtaatatattagtctatgacatggcaacagtaacatctatcaccacaattatttataaatttttagggagtgcccaataatgcaacaggaaaatataataaaaatagtaaagactggggaattctgattcaacgtagctgagtaatcctctatcagacctaccctcccacagatgaaaaccatagactctagacaaaatgctctagacaaaatacacacagacacacacacagacacacacacagacacacacacacacatgcatgcacacacatgaccttaaggtcctggagaataaacaaaagcaggtggcaaagaaaaagtattgacacttggtataactgacttgcatggggtggagctgctatttgtatagcttttagcttgaaggcagactgaagttggcattgtatggagcatctaaaattctgctagaaaaaccacgttgtttctggccagaagaaccagaagacaaagttaggacaaacagagctgctggaaagtgagaaaggaatgctagaaagaagagagccaaagatggcagctccattccctgcatgagagactcctatgtgtaaggg

SEQ ID NO: 723860 - DNA, 1500 bp, Homo sapiens
tgaattattcttctattaatatttgtgtacacgttttgtgtagacatatttttatttctcttgggcatatatttaggaatagaattcctgggtctcttggtaactctatgtttaatcttttgttcaactgccataatgttttccaaagcagccacaccattttacattcccaacaacagtgtataagggttccagtatctccacattcttgccaacctttgtttttatcttggttattgccatcctagtggatgcaggttaattctttcaagcctgacttacctgccttctgaggttcctgatartaaaactgcattgcaaattccagacagatgaaccacaatttgaaaaaatatatttgttggatacaattttaaacttgctaacccccacctaatttcctatttagtatcataaaaatattttctgaatattttatatgactatgtattatatatttcttttaaaatcctttaatgtgttcaaaattatgtatgtttacatttatttacacatgacttttgaggaacacattcactttataaagtaaggaatatttgtagtagttatgagtactaagattgttctcagtactcaaaaagtcactctgaaagtattaagaatgagtttactaaagagaatgctttcagaaatattcattgggaagagcatgggctttagagttttagatttaatttccagttctgaaacttaccagtcaggtgtcttttatgatacaaatatcagaaaactcaagtgctggccaggcgcagtggcacacgcttgtaatcccagcactttgggaggctgaggcagatggatcacttgaggtccggagttcaagaccagcctggccaatatggtgaaaccccatctctactaagaatacaaaaattagcagggcatgtaatcccagctacttgggaggctgaggcaggagaatcgcttgaacctgggaggtgaaggttgcagtgagctgagttcatgccattgcactccagcctgggctacagagtgagactccatctcaaaaaacaaaaaaataaaagaaaaataaaaaaactcaagtgcagtcacttaaatagacatggacttatttatatcaggtcataattatatgtagtaacagatggcatgataattcagtaataccccagggatctaggctcttttcctctttctactctgccatcttcagtgtgttgaccttaatcttcagatgctgtatctccaggcttcttatccaagttccaggcaggaaaagtggtaaagagcaaaggagttcctcctgtggacttcgacctacactgagttggccacaacagtgtcacatgtctactctgtctggatgggaacctggcagaagggcattgtaaatggagttggataccgtcatccaacagtatctgccatagttgctagctgtgtaatcttagaagagttatttagccttgctgagcctcagcctcctgtgaaatgaggataattaatgccacaaag

SEQ ID NO: 723861 - DNA, 1354 bp, Homo sapiens
tgcacagactaattcatagtagaaactattaatgtattatttttgcagccaacaagttattaaaacacttcaacatggccaaaagacttttttcttcttgtgagactggaaaagtcaaaagcctcttaaaaaaaaaaaagtttgaaatttctttccacggggcactcaaaaaagtttttacaagtccggtccagggactcatgtctataatcccagcactttggtaagctgaggtgggaggatcatttgaggccaggagatcaagaccagcgtaggcaacacagcaagaccccatctctactaaaattaaaaaaaattacctgggtgtagtgatgcatatctgcagtccagctattcaggaggctgaggtagaaggatcccttgagccctggaggttgaggctgcagtgagctgagatcacgccactgcacaccagcctgggtgacagagtgtgcagtgggataattaaggaatcagagagaccgtgggattgaggaggaattatttaattatttaggtgcacggacccagtcgattaacatccaaagggctgagacccaaacagagttaagctaccttttaagcatttcgtggggcagggggagatttgtgcagggggaagcgtattacagaagggagaaacaaagacagttattcaattaagacatgcattacattatttcttactttttaaggaacaacatgttttatgacttgagattatctgtttagtgaccttgcagctgcacagctagagaaacagtcttcacgatggctgggaaagggagagataaggctcactagccacagaaaaacaggcagtcaatttttaaaggacttcagctctttctcttcctcagggggarttggtttttcttacatacaactgagttttcacttacacattttaaaatttcttttaattcctgttccaagtgagatcctttctcaaaaaagtaaaagataaaaaattaaattaaaaagaatatttttataaattatataaagctaaagactaaaacaataatttggtgagtttaaaagtaaaagataaaccaatgaaaaatggaaaaactcagagtggataaaagaaaattctgtagccatcccattttaaatgcttctctactctttattccagttttgtggcacttttacctaaaggaatggcagaaacacttttgtgttatgcagagctgaagcctctcccattggcctgctctcacaggtattttataaatacagcaacacagaaatatatttttaaatttatttattttttattttttgaggcagagtttcactcttgttgcccaggctggagtgcaatggtatgatctcggctcactgcaac

SEQ ID NO: 723862 - DNA, 1354 bp, Homo sapiens
tgcacagactaattcatagtagaaactattaatgtattatttttgcagccaacaagttattaaaacacttcaacatggccaaaagacttttttcttcttgtgagactggaaaagtcaaaagcctcttaaaaaaaaaaaagtttgaaatttctttccacggggcactcaaaaaagtttttacaagtccggtccagggactcatgtctataatcccagcactttggtaagctgaggtgggaggatcatttgaggccaggagatcaagaccagcgtaggcaacacagcaagaccccatctctactaaaattaaaaaaaattacctgggtgtagtgatgcatatctgcagtccagctattcaggaggctgaggtagaaggatcccttgagccctggaggttgaggctgcagtgagctgagatcacgccactgcacaccagcctgggtgacagagtgtgcagtgggataattaaggaatcagagagaccgtgggattgaggaggaattatttaattatttaggtgcacggacccagtcgattaacatccaaagggctgagacccaaacagagttaagctaccttttaagcatttcgtggggcagggggagatttgtgcagggggaagcgtattacagaagggagaaacaaagacagttattcaattaagacatgcattacattatttcttactttttaaggaacaacatgttttatgacttgagattatctgtttagtgaccttgcagctgcacagctagagaaacagtcttcacgatggctgggaaagggagagataaggctcactagccacagaaaaacaggcagtcaatttttaaaggacttcagctctttctcttcctcagggggaattggtttttcttacatacaactgagttttcacttacacattttaaaatttcttttaattcctgttccaagtgagatcctttctcaaaaaagtaaaagataaaaaattaaattaaaaagaayatttttataaattatataaagctaaagactaaaacaataatttggtgagtttaaaagtaaaagataaaccaatgaaaaatggaaaaactcagagtggataaaagaaaattctgtagccatcccattttaaatgcttctctactctttattccagttttgtggcacttttacctaaaggaatggcagaaacacttttgtgttatgcagagctgaagcctctcccattggcctgctctcacaggtattttataaatacagcaacacagaaatatatttttaaatttatttattttttattttttgaggcagagtttcactcttgttgcccaggctggagtgcaatggtatgatctcggctcactgcaac

SEQ ID NO: 723863 - DNA, 1056 bp, Homo sapiens
aaaaaaaaaaaaaaaaaaaaaaaaaaacagaaaaagmaagacaagacagaatgtgagctaagcagcttagggtttaggcaaggcttctgcctacaagagagactaggatatgaggggtaatattagtcctgatgggccaaaccaactggagggatatagggaggtgccaagttgcagaggtatcatgttgcccagcacttgatctagaatcctagattctaggtctgggtagtagcagatttactaggtggtagatctgaggctacctatagaacttcctttgcagtcataattagctcagaaactacaaaagggcttgctcttgaaaatggagcctttgtctatttcatgctgttataacagaatgccacagactgcataatttaaaacaaaaaaaaaaggatcgataccatcctggttaacacggtgaaaccccgtctctgctaaaaatacaaaaaaaattagccgggcctggtggcgggcgcctgtagtcccagctactcgggagctgaagctggagaatggagaatggagaatggcgtgaacccgggaggcggagcttgcagcgagccgagatctagccactgcactccagcctgggggacggagcgagactccgcctcaaaaaaaaaaaaaaaaagaaagaaagaaaagagaaagaaagagagagagagtgaaggaagtgagggagggaggaaagaaaataagaaaagaaaagagaaaagaatttcttacagttctggaggctaggaagtccaaggtcaaggaacctgcctctggtgagggtcttcttgctgcatcatcccatggcagaaggcagaagggcaagagagagcgaaagagcaagagggcaagagggcctgaactctctttcacaaaggctagcaaagaagtatgcacaggttaagggaaaaagtcacaatgaatcctgtagtacagactactttatcaaaagcagctaaaaaaagatctcattaactcccccaactcatctccacccacatctaaagagccacacacagcaccaccaaaggcagcagaatgagaacagcgttc

SEQ ID NO: 723864 - DNA, 1056 bp, Homo sapiens
aaaaaaaaaaaaaaaaaaaaaaaaaaacagaaaaagcaagacaagacagaatgtgagctaagcagcttagggtttaggcaaggcttctgcctacaagagagactaggatatgaggggtaatattagtcctgatgggccaaaccaactggagggatatagggaggtgccaagttgcagaggtatcatgttgcccagcacttgatctagaatcctagattctaggtctggktagtagcagatttactaggtggtagatctgaggctacctatagaacttcctttgcagtcataattagctcagaaactacaaaagggcttgctcttgaaaatggagcctttgtctatttcatgctgttataacagaatgccacagactgcataatttaaaacaaaaaaaaaaggatcgataccatcctggttaacacggtgaaaccccgtctctgctaaaaatacaaaaaaaattagccgggcctggtggcgggcgcctgtagtcccagctactcgggagctgaagctggagaatggagaatggagaatggcgtgaacccgggaggcggagcttgcagcgagccgagatctagccactgcactccagcctgggggacggagcgagactccgcctcaaaaaaaaaaaaaaaaagaaagaaagaaaagagaaagaaagagagagagagtgaaggaagtgagggagggaggaaagaaaataagaaaagaaaagagaaaagaatttcttacagttctggaggctaggaagtccaaggtcaaggaacctgcctctggtgagggtcttcttgctgcatcatcccatggcagaaggcagaagggcaagagagagcgaaagagcaagagggcaagagggcctgaactctctttcacaaaggctagcaaagaagtatgcacaggttaagggaaaaagtcacaatgaatcctgtagtacagactactttatcaaaagcagctaaaaaaagatctcattaactcccccaactcatctccacccacatctaaagagccacacacagcaccaccaaaggcagcagaatgagaacagcgttc

SEQ ID NO: 723865 - DNA, 1307 bp, Homo sapiens
ttccaaaaacctatggcttcccactgcccttcaaagaaaagcctaactccttactgcatcttacaaagccctatgtgacctgacttgcactggcttcttggtctcggttcctactacttgcctcctcactcactcagctccaactacactgactctctgtttctctaacatggtgggtctcaacgtgtactccctggaccagcagcctcagcatcgcctgaaatcagttagacatgcatttctccagccccattccagacccactgaatagaaactccagaggaaacctgagcactctggtttaacaggccatccaggcgattctgatgcatgcttgagacccagtgatctgacagagaggctcatttctacctcgggacctttkcacctgctcttctctttgtctggattattcttcccccagatcttcaggtgatgaaatcctcattcaagtctcaactcagttgatacttcctcacacaggccttccctgaacattctgtctagctgtcctctgacccaagttaataacacattcctttgtaacaagtgttatttcattatatggtaagttatttgtttgcatttattttctcccctctctgatacaacgtaagctccactggagagcaaggattctccagtgttcattgatctatccgtagtgtccagggcagtgtctgtcaaaatgtgtattaagtgattgaataagtggaagatctgattggtgggaaagcaggggagaaactaaaaccaaagagggtttcaatttacattatattgagaagtggagacaggaaaaaagagaaaaaaatactcagactgggatatttaagaattttgactcttggagatggaaggagtggatgcttgagaaggaggaaaaggttttctgagacgtgttcttgttgacattacaaaacacccaagtggagactcagttcccacagggctgctgaactgtgctgggtagaaggcgactttatgcagaggtgatgtgggtccctgggactgaagagatttacacaagaacatcctgcattcattcaacacacatagaagtcccagatacacacaaaaaaagttctggggggaacacaagagatgaattagatacaaatcctgtcttcaggaaacttgaggtttaagtcaaaggtaagactcacacagaggtgatcacgtgaaaagggagacaatgccaagaaagaaaacgtttttctcagctatgtactctatatacagcatctccttggtgctttatataaagtatgtcatggaatatccacaaaaactctgttaagtatccc

SEQ ID NO: 723866 - DNA, 1768 bp, Homo sapiens
catttgaattgccttggtcccttttgtctaaaatcaatcagtaatatatggatctatttctggtttctccatcctgttcagctgctctatttgtgtctatccttacactttaaatttttatcagccatcagatatttcacagcatgttgattagaaagctgtacatatgcctagaagtggtattgttaggtcatatgaaagtatacgtttctttaacttgcctacatatgcctaatccctctatggaaaaattatttcagtatctcctctgctctcagaatccttctctttttaatctgtcttccacagtgccatcagaatgatattttcgaaaccaaatatgactttctctcctaaggccttccatggctgcttagtgtatagaaactccttgcttagaatataggatataagctccttcacataaacagcctgcttttcaaaatgtgccctgcactccataattcactagtccacctacaaatgtattccttgaaagttttgtgtacttttactgatatactgggaacatgtaattcttcctctctagagaatatctttcctccacttcatcccatgaaatcctatttatcttttagtatcattccctttgtgatatttccctccaattgtccccatgttttcactgtatttaaacagttcatgtttctttgagtatactgtgagttctttaagaagcttgtcctatttatttttgtttcctcattgcctaatactactggccaatacttgttactcagtttttttaaattaaattgtctatgataagcagaatggtccttgaaaaattttaatctccttctgaatctatcaaataaagaaaataccaccttacctatgttattcaaaggtttctggtgaagagcaaatgaagtaataggcatggaaatgtttgaagaatgttttaaaaatgtgatggccttattgttgtttataacaaaatttcactagaattaatcctcttggtttcttacaagctttattatggtggaactttgccttcatatatttgcattggttaaaattatcctaatattaaaagactttaaakatttttatttctaatgtttccagtaaaactgaaaataacttagttaaaaaatatttttgcatttaaaactatagaaaataaggcattttctttataaaatctcagttgtatgtgtgtatgtgagtgtctttttggatatctttgattcagtgaatatactgagtactgctcagttcaggcactatgatcgtgatcacattacagtaatagctaatatttagtgaaccatactacgttactgtgctaagaacatcacatataatctaatttaatattcacaataacccttattatccacattttatataggtaagtaacttgccagaggtagtacagccgctgatacagaaacccagtctgacttcaaaacctgacctttaaatattgtgctcagggatcagcaaactataacacccacagcctggttttgtaaggcctgccatattttcaacaggttgttttaaaaaaaagatgtgacagagacatatgtggcctgcaaagcataaaatatttactatctggccctttacagaaagtgtttgccagcctaaagatggttaaagagagtccctgtaactctggaagctcccaatccaaataggaaataaacacaaacattttaaaagtctgcctcaagaggcaaaatgtggttagtgatgttattataaagatttaaacaagaatcccaagggggcc

SEQ ID NO: 723867 - DNA, 825 bp, Homo sapiens
taatcgttaattttattaggtctgcttaatacatatgctctaacaaaaattcagtaatctgctgtaaatccagtgccataagatattttcaccaaagattcttgctcttttgagtacatgaagaaaattaaatgttactgttgagagaaatgtcattgtagtctagaaaattttttcagaaaaccgatagattttaatagtagagtaacttgataaacaggattagtattgtacactttagccaagtaaacgtagaataatgtgtctaaattccccacaacaatccatttctttctttaaagatactcatctcttaatgcaaaacctgtttgtaaaagatgtgtcaattggattttccatttacttgtatttcagtttacaaatgctctattttcacttcactgattactttagctggttatatgacagagctttgttattttgtcctgcctttaccacttcatacttctttttcctcctagctctaagtagtcagtgatttgtttgtgttacttcatktatgcaaaaaatattaatgaagcaactactatgtgtcgtgagaatgtgtcatgtgctaggtatagaatagtgccctcacagatttgaatgtagcgggatagagtgacaaataagcgcttacattaaataagtggttatagaaacaacttacatttaaatatcagtaggggatgggttaagagatgatgatgtctccatgggatgaatattttgcagctgttaaaatatataaaacatttgtaaaaaatatgcataagacgatatttgtagtaacatgggtttcatggggactagacttgttattat

SEQ ID NO: 723868 - DNA, 923 bp, Homo sapiens
gggctttaagaaacaggcatggaggccgggcatggtggctcacgcctgtaatcccagcactttgggaggccaaggcaggtggatcacttgagcttgggagtttgagaacagcctgggmaacatggtgaaaccccatctctactaaaaatacaaaaagtagccaggtgcagtggtgtacacctgtagtcacagctacttgggaggctgaggtaggagaatcacttgagcctgaaaggcaggggttgcggtgagccgagattgcaccattgcactccagtctgggtgacaggagtgaaaccctgactcaaaaaattaaaaattttaaaaaaggaaacaggcatgaaaattgtatttaataagaaactgaagcaaatattttttaaattgcttctaataacataatcaattaggataattttgggaggagatgccataaaagctactatggatctctgagtaccagaatgtcaaatttggtattacctggcaagctgttcagatgcgtcttccattagttcagaacttgcccgtttttcctaatgtgattcatccatgattcttcagagtcaaattaataaagttgaaatgcctgcagggctgccacagggttggtgtatgtttccaatattgttgcatgtttgtggcctcttcaaaggctgagtagtgagatctaaatcaagaccccaaagactgaggtgcaacacagtagaatacagtgttaccgcttctagtgtcttcatgctgaatttgaggcacttcatttagaacgttcttactttgtaaaggaacattctgcaaaatgcctcactctttttactgcttcatttaggattatttgctttaaagatagtgtcagcattctaaagacatcatgtttggaaactcccaggagtccccttgctgtctttgttaaagcccagaaa

SEQ ID NO: 723869 - DNA, 923 bp, Homo sapiens
gggctttaagaaacaggcatggaggccgggcatggtggctcacgcctgtaatcccagcactttgggaggccaaggcaggtggatcacttgagcttgggagtttgagaacagcctgggaaacatggtgaaaccccatctctactaaaaatacaaaaagtagccaggtgcagtggtgtacacctgtagtcacagctacttgggaggctgaggtaggagaatcacttgagcctgaaaggcaggggttgcrgtgagccgagattgcaccattgcactccagtctgggtgacaggagtgaaaccctgactcaaaaaattaaaaattttaaaaaaggaaacaggcatgaaaattgtatttaataagaaactgaagcaaatattttttaaattgcttctaataacataatcaattaggataattttgggaggagatgccataaaagctactatggatctctgagtaccagaatgtcaaatttggtattacctggcaagctgttcagatgcgtcttccattagttcagaacttgcccgtttttcctaatgtgattcatccatgattcttcagagtcaaattaataaagttgaaatgcctgcagggctgccacagggttggtgtatgtttccaatattgttgcatgtttgtggcctcttcaaaggctgagtagtgagatctaaatcaagaccccaaagactgaggtgcaacacagtagaatacagtgttaccgcttctagtgtcttcatgctgaatttgaggcacttcatttagaacgttcttactttgtaaaggaacattctgcaaaatgcctcactctttttactgcttcatttaggattatttgctttaaagatagtgtcagcattctaaagacatcatgtttggaaactcccaggagtccccttgctgtctttgttaaagcccagaaa

SEQ ID NO: 723870 - DNA, 923 bp, Homo sapiens
gggctttaagaaacaggcatggaggccgggcatggtggctcacgcctgtaatcccagcactttgggaggccaaggcaggtggatcacttgagcttgggagtttgagaacagcctgggaaacatggtgaaaccccatctctactaaaaatacaaaaagtagccaggtgcagtggtgtacacctgtagtcacagctacttgggaggctgaggtaggagaatcacttgagcctgaaaggcaggggttgcggtgagccgagattgcaccattgcactccagtctgggtgacaggagtgaaaccctgactcaaaaaattaaaaattttaaaaaargaaacaggcatgaaaattgtatttaataagaaactgaagcaaatattttttaaattgcttctaataacataatcaattaggataattttgggaggagatgccataaaagctactatggatctctgagtaccagaatgtcaaatttggtattacctggcaagctgttcagatgcgtcttccattagttcagaacttgcccgtttttcctaatgtgattcatccatgattcttcagagtcaaattaataaagttgaaatgcctgcagggctgccacagggttggtgtatgtttccaatattgttgcatgtttgtggcctcttcaaaggctgagtagtgagatctaaatcaagaccccaaagactgaggtgcaacacagtagaatacagtgttaccgcttctagtgtcttcatgctgaatttgaggcacttcatttagaacgttcttactttgtaaaggaacattctgcaaaatgcctcactctttttactgcttcatttaggattatttgctttaaagatagtgtcagcattctaaagacatcatgtttggaaactcccaggagtccccttgctgtctttgttaaagcccagaaa

SEQ ID NO: 723871 - DNA, 550 bp, Homo sapiens
ctcccaaagtgctgggattacaggcgtgagccaccacgcccggcctgttttcttaataatccaacaattcagatcactcagaataaaataacaacatcatagatactggcacaggctgaaagaatacagttggtacaaaggctcaggtgttgaggtagctctcctatcaaagttgatccttgraccacctgcattagagtaatttagggacattattaaaataacattgttgtgtgctccagccagggctgcctgggactgcacagggtcttggccgtgggtacagctcagcactgtcagcccctagttgggaggccttgccagggaaggctggcagtggctgcaggaagcctgagatgccactcaaggggaggccactgaaggactggttgagtgcagccctggccagtgagatgaggaggctgggaccatggccctagccacccgtgtttcctccggtgaaatttgtgatactcaccaagaaagaaccacttatggtgttttagtaatgtactgaactttgcaaaatattaattcaaaataaatgcat

SEQ ID NO: 723872 - DNA, 889 bp, Homo sapiens
gaatgagaaactcatccatccctgacaaaaacagcttaagaataaattccaaatacccaagtgttattttcttcactccacaaacccgggaacattacaggaccatgacacaagtttggatgacatcctatggctatcagatgatagatgttttcattggtttctccttaaatcagggctgtgaacagtccatgatactgaatgggaacccttagcaagacagctcaaattgtatctgacaaggctcacttcataaacctcaactattttcctaatgaagagatgctgtgttaaggcaattctctttatataaccattatgcatttatattccctttaaagataaatgatatttttatgaagaatgaattgcatacaaaatactgtcttagtgagatgccaaaatacacacccattcaaaatatacaaaacagaaacaactagccaatatttctcctaaccaaaataaatggtgtgcagaattctcttttgaatagtatggtgatcttaatgacaaaagcaaaattaatatattactattaggaaataacctgagaaatagattaactgtaccttataaaaattatactaatatgyttactacagcgcttaggatatttacgtttgaatttaaattatgatataatttagtattctctgcataatataaattaggatgatctaactgaatgtgcaaaaatgccaacattcattcattcactcactgaatttacaggtacgtatagacaagggaacatgaaaagacactattattaccagctcagagtcttaggaaaaacagatgcataattataaaaaaaaatgatataagcactggaattattcaaaatgctatgctgggaaataccaacatttaagtagctggtaga

SEQ ID NO: 723873 - DNA, 889 bp, Homo sapiens
gaatgagaaactcatccatccctgacaaaaacagcttaagaataaattccaaatacccaagtgttattttcttcactccacaaacccgggaacattacaggaccatgacacaagtttggatgacatcctatggctatcagatgatagatgttttcattggtttctccttaaatcagggctgtgaacagtccatgatactgaatgggaacccttagcaagacagctcaaattgtatctgacaaggctcacttcataaacctcaactattttcctaatgaagagatgctgtgttaaggcaattctctttatataaccattatgcatttatattccctttaaagataaatgatatttttatgaagaatgaattgcatacaaaatactgtcttagtgagatgccaaaatacacacccattcaaaatatacaaaacagaaacaactagccaatatttctcctaaccaaaataaatggtgtgcagaattctcttttgaatagtatggtgatcttaatgacaaaagcaaaattaatatattactattaggaaataacctgagaaatagattaactgtaccttataaaaattatactaatatgtttactacagcgcttaggatatttacgtttgaatttaaattatgatataatttagtattctctgcataatataaattaggatgatctaactgaatgtgcaaaaatgccaacattcattcattcactcactgaatttacaggtacgtatagacaagggaacatgaaaagacactattrttaccagctcagagtcttaggaaaaacagatgcataattataaaaaaaaatgatataagcactggaattattcaaaatgctatgctgggaaataccaacatttaagtagctggtaga

SEQ ID NO: 723874 - DNA, 1185 bp, Homo sapiens
tgaagcaaccatgttacactgttgtytttacagatgaaggaaaaggtgggcataaaccaaggatgataagaaagcagttctagaagctagaaaaggaaatggaacagattttcccctaaagccccttgaaggtggccatatcttttatccccagagtgaccacctaacctgttttcgtcctcacataaagagaagcagatatttggctttatactctacatctcttgtcaacagttattaattctaagccatggtaattttaatagaatatgacatatttcaatccttaaattaaaccatcaggactgccaaatcattaacaagcttaaacatttaacaagttaaacaataccccccccaacaccaatttctttctagattttgacaaaacatactaacaaaccaatttaggctctcttttctcatagctaaaaataatctatccattagcatataggacaaatgaatcttttttctcatattttgatacttatctatataaataataaagcaacaactcagaaaaacatacatttaataacaaataattcactcataagaaatcaacttgtcttttctccaactcaaaggcatggagtaactttcagttaaccagattaaattaaattccctgtaccctttatacccatttcgcaacccagtaaaatggacaagcattttgaatagacttcgaaatacacacacaggcgcacacacacacacacacacacacactcacaattttcagcagctattaggcaaccaaacacttcttaaagtcgctgccttttaaaaaagacagaactttcagtaacaaatttcaagccataaactgattcacaatctatgtatctctaatatataaaatatattctgttttcagtaatagtttgtaggtagctgtatcttaatatatgtatctaaaatatttctgctcataaactataaaaaagcaagcaatcaaggagcatataaaaccaattgaatggtcagtatactttgtaataaatctgataacctctataaaataaatgaaaaaagttagggatgatgctatataaaaagtataaaactcatgggggtactcatgagttagaaaatttccctttttgggtttttcttttattttgtcattttgctttcctcatttataatgaagaatgaaaagtctgaatgatcttcatt

SEQ ID NO: 723875 - DNA, 1185 bp, Homo sapiens
tgaagcaaccatgttacactgttgtctttacagatgaaggaaaaggtgggcataaaccaaggatgataagaaagcagttctagaagctagaaaaggaaatggaacagattttcccctaaagccccttgaaggtggccatatcttttatccccagagtgaccacctaacctgttttcgtcctcacataaagagaagcagatatttggctttatactctacatctcttgtcaacagttattaattctaagccatggtaattttaatagaatatgacatatttcaatccttaaattaaaccatcaggactgccaaatcattaacaagcttaaacatttaacaagttaaacaataccccccccaacaccaatttctttctagattttgacaaaacatactaacaaaccaatttaggctctcttttctcatagctaaaaataatctatccattagcatataggacaaatgaatcttttttctcatattttgatacttatctatataaataataaagcaacaactcagaaaaacatacatttaataacaaataattcactcataagaaatcaacttgtcttttctccaactcaaaggcatggagtaactttcagttaaccagattaaattaaattccctgtaccctttatacccatttcgcaacccagtaaaatggacaagcattttgaatagacttcgaaatacacacacaggcgcacacacacacacacacacacacactcacaattttcagcagctattaggcaaccaaacacttcttaaagtcgctgccttttaaaaaagacagaactttcagtaacaaatttcaagccataaactgattcacaatctatgtatctctaatatataaaatatattctgttttcagtaatagtttgtaggtagctrtatcttaatatatgtatctaaaatatttctgctcataaactataaaaaagcaagcaatcaaggagcatataaaaccaattgaatggtcagtatactttgtaataaatctgataacctctataaaataaatgaaaaaagttagggatgatgctatataaaaagtataaaactcatgggggtactcatgagttagaaaatttccctttttgggtttttcttttattttgtcattttgctttcctcatttataatgaagaatgaaaagtctgaatgatcttcatt

SEQ ID NO: 723876 - DNA, 1103 bp, Homo sapiens
ctgtttcccaggctgaaatgcagtggctcaatcacagcttgctgcagacttgacctcccaagctcaagtgatccttccatcttagcctcccaagtagtagctgggactataggtgtgcctatcaccatctcttcaccacctctaggggtctcactatgttgctgaaactagtctcaaacttctggcctcaaacaatcctcccaccttggcctcccaaagtcctgggaatacagttgtgagccactgcacccagcctcacccacatttaaagtgagggaattacrtggggtatgtacactagtggtggggatcttggaaaccatattggaattctacttacataatgactctttagcaaggaaattgatcatgtttaccacttattgcaccgatttacttgcctatttgaacccatcattgttcttttaaacacctgccccccacctcccgcgtctagcacagtgcttgccacaggacaagggctcattacatattagtataatgaattcatgtacaaatcaacatgatatgggggtacagtgaattcatgtgtgttctgcaaaagaaaatatcatgagtattttctcatatacattgttgttcagctatgtaatagattataatatacaaaattatttacaaagcaacagctaaattaacttcccactagcaaaacaaaacacctagtgtcacaattaaatatttagcagtaggtaattagaaagaaagggtatgcatgggaacttttcattaaagacaattcattttttctgcatgagtagatgtttgttcaatgcaatttccattatttcacaaaaactttgattatgataaaatagtatccagaaatgtattacttataatacatttcaatctcataatagtttcagaaaaagatcttgtttctatttgaattctctatactactaagcattgctattgcaaaaagtagccacttgatagatttttttttattgaaggaaatttttatttttatgttcttgtgaagtagttttttttcattttttttttttttttgctgtacttggaaagtgaagtcctgagcatctccattttggtacagttttattgctcttatttta

SEQ ID NO: 723877 - DNA, 1103 bp, Homo sapiens
ctgtttcccaggctgaaatgcagtggctcaatcacagcttgctgcagacttgacctcccaagctcaagtgatccttccatcttagcctcccaagtagtagctgggactataggtgtgcctatcaccatctcttcaccacctctaggggtctcactatgttgctgaaactagtctcaaacttctggcctcaaacaatcctcccaccttggcctcccaaagtcctgggaatacagttgtgagccactgcacccagcctcacccacatttaaagtgagggaattacatggggtatgtacactagtggtggggatcttggaaaccatattggaattctacttacataatgactctttagcaaggaaattgatcatgtttaccacttattgcaccgatttacttgcctatttgaacccatcattgttcttttaaacacctgccccccacctcccgcgtctagcacagtgcttgccacaggacaagggctcattacatattagtataatgaattcatgtacaaatcaacatgatatgggggtacagtgaattcatgtgtgttctgcaaaagaaaatatcatgagtattttctcayatacattgttgttcagctatgtaatagattataatatacaaaattatttacaaagcaacagctaaattaacttcccactagcaaaacaaaacacctagtgtcacaattaaatatttagcagtaggtaattagaaagaaagggtatgcatgggaacttttcattaaagacaattcattttttctgcatgagtagatgtttgttcaatgcaatttccattatttcacaaaaactttgattatgataaaatagtatccagaaatgtattacttataatacatttcaatctcataatagtttcagaaaaagatcttgtttctatttgaattctctatactactaagcattgctattgcaaaaagtagccacttgatagatttttttttattgaaggaaatttttatttttatgttcttgtgaagtagttttttttcattttttttttttttttgctgtacttggaaagtgaagtcctgagcatctccattttggtacagttttattgctcttatttta

SEQ ID NO: 723878 - DNA, 1313 bp, Homo sapiens
ttaaaaaactataatagcaaaatcatttcaaattaattggggaagttaaggatatattaatacatggtgttaagcctttaacattaacattaacattacagtccaggcacggtggctcgcgcctgtaatcccagcaccttgggaggctgaggtggggggatcatgaggtcaagagatcgagaccatcctagccaacatgttgaaaccccgtctctactaaaaatacaaaaattagctgggtgttgtggcgcgcctgtagtcccagctactccggaggctgaggcaggagaatgacttgaacctgggaggtggaggtgcagtgagctgagattgtgccactgyactccagcctggcgacagatcaagactccgtcaaaaaaaaaaaatcatataaaataattgaagaaaaaatattttttaatccagaggaaagtcagtaacaaacatggaaaaatacttaaccttgttagtaatctgaaggaaatataccctgaaaaggtactgttttagttattaaattagcagataatatcaagtgttggtgaggaactttacgttgttagttgctgccggggctgggcacagtggctgatgcctgaaatcctagcactttggggggacaaggtaggatgggcgcttgaggccaggagtttgagaccagcctgggcagcatagtgagaccccatcactatagaaagaaaaagaaattagctgggcatggtggcatgtacctgtagtcctagttaatcaggagtctgaagtgggaggatctgttgagcccaggagttcaagattacagtgagctgtgatcatgccactgtactcctgggcaacagagccagcccctgtcatcctccctgcatctgcccaccataattatgtattaatacatacccttcataatcctctctgtgaaatttatcctaaagaaacaattcaaaggaagaaacagtttgctacattaagaatattcattattttattatttatataacatcagaatattggaaaccaccctaaataaccaagcaggtagaaatcgtgaagtcattcgattcatttatgaattatgttcataatcaacacaatcaattctttcaaatgttttatttagaacatttgtatcaatgtttacttacatattttgtacccatttaaaatgataggaagtgggctgggcgtggtggttcacgcctgtaatcccagcactttgggaggccgaggtgggcggatcacctgaggtcgggagttcgagggccgcctgaccaacatggagaaaccctgtctctactaaaaatacaaaattagccaag

SEQ ID NO: 723879 - DNA, 663 bp, Homo sapiens
ctgattagagactgaagagtcttcagtgctgctattttcataaatgttaatttaacgtaattttgctggtctttttttatgaaaaataggcacgactagacattcattttctgtttctgaggcagtcacctacgaaaagcctcagcactggagatgccaaggcagccgtgagccattctgggtgagaaacaccttctagcagggccctggggccacagcgcggtgggtgtcccctggcttagacatctgcttctgcttctgcttctctttgcttctacrttcaaaatcttcttgctttggttgtatgaatcacttttctattcgcctttagaaaccactaaaagtgatgtgctttccctcgtatggtgtgggttccaaatacactgagtgacttagtgggtctttaaatggaagaaatggaattgtacatactcttaattttaaacaatgtgaaaatatttttgctgtatcccacgtttagttacacacagaaaaacagcacaaaagtataagagatatgtagtttcgcaaggctttttgttgttatgtttagttggatatatttctaatgaagcacaaagacctctacatatgaatacttatgttaactattgtctaaactcgaataacgcaacaaaatcaatatcctaaaatattctccca

SEQ ID NO: 723880 - DNA, 603 bp, Homo sapiens
aacctcctgagcagctgggactacaggtgcctgccaccacgcccggctaattttttgtattttttagtagagacggggtttcaccatgttagccagtatggtctcaatctcctgacctcgtgatccacccgcctcagcctcccaaagtgctgggattataggtgtgagccactgygcccagcctacgtttatttcttttgcattcaaaagttctaaactaaactatataaatgttatttttcaatggggatgtttgcatcaatgtttttctacacctataattctgtgtactaaaaaaatgtgatcttaaagaataaagaaatagatatctcttacaggacacttagaaaattcaaaattttaggaaaataaatatttaaaaaattacccacaataaaaccaacaacaccttggtatatatctttccagataattttatctctctgtgtgtttatatcaagaaagatagatttattcactgcattatttaaaacttagagacaagtatgtctttgcattttgtcatatcattttagttattcttaatggattaatttattcataaaacaacatgcattttgaatatgtatgtcccgatttccc

SEQ ID NO: 723881 - DNA, 603 bp, Homo sapiens
aacctcctgagcagctgggactacaggtgcctgccaccacgcccggctaattttttgtattttttagtagagacggggtttcaccatgttagccagtatggtctcaatctcctgacctcgtgatccacccgcctcagcctcccaaagtgctgggattataggtgtgagccactgtrcccagcctacgtttatttcttttgcattcaaaagttctaaactaaactatataaatgttatttttcaatggggatgtttgcatcaatgtttttctacacctataattctgtgtactaaaaaaatgtgatcttaaagaataaagaaatagatatctcttacaggacacttagaaaattcaaaattttaggaaaataaatatttaaaaaattacccacaataaaaccaacaacaccttggtatatatctttccagataattttatctctctgtgtgtttatatcaagaaagatagatttattcactgcattatttaaaacttagagacaagtatgtctttgcattttgtcatatcattttagttattcttaatggattaatttattcataaaacaacatgcattttgaatatgtatgtcccgatttccc

SEQ ID NO: 723882 - DNA, 633 bp, Homo sapiens
taatggaatgctattcactcatgaaaaggaatgaaattctgtcatttgcagcaacatggatgagcttggaggacattaagtaaaataagtcaggtacagaaagacaaatactgcaagtttcactaatatctggaggctaaaaaacattgagctcataatagasagtagaattatggttattagaagctaggaagattagtgggaagaggaagacagagagtttgggtaaggaatacaaaattagagctagataggaagaataagttgtagttttctattgcactatggggtaaatatagttaataacaatttattgtatacgttcaaagctagaagagaggattttgaatgttcccaacacaaagaaatgataaatgtttaaggtgatgaatatgctaattactctgatttgatcattatgcagtgtatacatatataaaaatatcactctgtatcccacaaatatatacaactatttggtgtcaactaaactttttcctttttttaaaaaggaaaaaaaggtaccacagaatgactactatgagcacagtactttctacttcactaaatgttttcagatccatgtgaaagacatttcaggttacagtgatgagctcagaggaacctttcagg

SEQ ID NO: 723883 - DNA, 633 bp, Homo sapiens
taatggaatgctattcactcatgaaaaggaatgaaattctgtcatttgcagcaacatggatgagcttggaggacattaagtaaaataagtcaggtacagaaagacaaatactgcaagtttcactaatatctggaggctaaaaaacattgagctcataatagagagtagaattatggttattagaagctaggaagattagtgggaagaggaagacagagagtttgggtaaggaatacaaaattagagctagataggaagaataagttgtagttttctattgcactatggggtaaatatagttaataacaatttattgtatacgttcaaagctagaagagaggattttgaatgttcccaacacaaagaaatgataaatgtttaaggtgatgaatatgctaattactctgatttgatcattatgcagtgtatacatatataaaaatatcactctgtatcccacaaatatatacaactatttggtgtcaactaaactttttcctttttttaaaaaggaaaaaaaggtaccacagaatgactactatgagcacagtactttctacttcactaaatgttttcagatccatgtgaaagacatttcaggttacagtgatgarctcagaggaacctttcagg

SEQ ID NO: 723884 - DNA, 640 bp, Homo sapiens
ttcattacagaaaatttggataataaagactgttttaggctgggcatggtgactcacgcccgtaatcccagcactttgggaggccaatgctggcgggtcacctgaagtcagaagtttgaaaccagcctggccaacgtgatgaaactccatctctactaatgatacaaaaatgagcygggtgcctgtaatcccagctacccagaagctgagacagaaaaattgattgaacctaggagacagaggttgcagtgagccaagattgcgccactgcactccagcagattgcgcactgctctgttgctctgggcaacagagcaagactgactcaaaaaaaaaaatgcggttctccttcaaaaaccacaagttatctatagagaaataacttggtagttatgtaatttttaaattttttccttctcagaaaaataaaggataattcattcagcagttattgttggagtaccaattctgaactagactgtgcttggttccaggtataaaaagaatgaggtagacacagtccctgccatcaagcagggaggtagatactatggatacctaatactacttgttcatataaaatgcactatgcttgcttataaaccatttaaaaaatcacctgacatctcatgtctcttaa

SEQ ID NO: 723885 - DNA, 640 bp, Homo sapiens
ttcattacagaaaatttggataataaagactgttttaggctgggcatggtgactcacgcccgtaatcccagcactttgggaggccaatgctggcgggtcacctgaagtcagaagtttgaaaccagcctggccaacgtgatgaaactccatctctactaatgatacaaaaatgagctgggtgcctgtaatcccagctacccagaagctgagacagaaaaattgattgaacctaggagacagaggttgcagtgagccaagattgcgccactgcactccagcagattgcgcactgctctgttgctctgggcaacagagcaagactgactcaaaaaaaaaaatrcggttctccttcaaaaaccacaagttatctatagagaaataacttggtagttatgtaatttttaaattttttccttctcagaaaaataaaggataattcattcagcagttattgttggagtaccaattctgaactagactgtgcttggttccaggtataaaaagaatgaggtagacacagtccctgccatcaagcagggaggtagatactatggatacctaatactacttgttcatataaaatgcactatgcttgcttataaaccatttaaaaaatcacctgacatctcatgtctcttaa

SEQ ID NO: 723886 - DNA, 640 bp, Homo sapiens
ttcattacagaaaatttggataataaagactgttttaggctgggcatggtgactcacgcccgtaatcccagcactttgggaggccaatgctggcgggtcacctgaagtcagaagtttgaaaccagcctggccaacgtgatgaaactccatctctactaatgatacaaaaatgagctgggtgcctgtaatcccagctacccagaagctgagacagaaaaattgattgaacctaggagacagaggttgcagtgagccaagattgcgccactgcactccagcagattgcgcactgctctgttgctctgggcaacagagcaagactgactcaaaaaaaaaaatgcggttytccttcaaaaaccacaagttatctatagagaaataacttggtagttatgtaatttttaaattttttccttctcagaaaaataaaggataattcattcagcagttattgttggagtaccaattctgaactagactgtgcttggttccaggtataaaaagaatgaggtagacacagtccctgccatcaagcagggaggtagatactatggatacctaatactacttgttcatataaaatgcactatgcttgcttataaaccatttaaaaaatcacctgacatctcatgtctcttaa

SEQ ID NO: 723887 - DNA, 1271 bp, Homo sapiens
gatcatattatcattgaactttgtaactaaaaagcattgtaaaaatgttattctgaattgctcttatagtatatactgctaagcaacttctctgttaggcttgcttgacactccaaaacaaataaggtacccctactatgtgcacagcacccatacttctccaattatctcccaaacatgctgtcttcaatgtaactgctgctcatttgtctgtatgctccactaaactgtaaataaactgtaaatcctatgagggctccccgtcttttttttttttttttttgagacagggtctccctctgtcgcctaggctggactacagtggtgcagtcacagctcactacagcctgaacctcccaggttcaagtgatcctcccaccttagcctcccaagtagctgggactacaggtacacaccaccaaacccagctaatttttttaaaaaatttttttgtagagacagggtcttgccatgttgcccatgytggtctccaactcctgggctcaagtgatcctcccacctcagtctccaaaacaaaatgctgggattacaggtgtgagccaccatgcccagcctcccatgttgtcttgttcactgtcatattctgaatgactcactcatattagaaacaagcactcaataaacaaacaagtaaatcttgacagaagaaaagttcttccttgcagacttttgctaatgaaagtcctgataaagaagatactaaatagcaacctctgagtgctaaatactgactggtaagaacagaaagagaaaattaaatactagaatataaccacatttataattacataattggaaaagaataaccatgctatcaactaagggaatatgactcaccatcatattttgctaggactgcctgaacatctggataggcctgtaattctaaaagtgattctaagagattttcatggatgttcaacatggtaagaggaggaaattctttcatcaactgtatattaaaaggaaaagaaagattaaaatcataacaaaggaactcaatagagctgagccagattcattaagtagaaattcttgtttcttaccatagctgtgaagaagacctaacccttaagaaaggtacgtatattaaataaataccttgttctaaaaactaccaattaaaatacaatgattctgcattaaaataactggcaacttaactaaatttttagtttctggaggaataaatgtaatagtcccatcatcaatttacttacatctctcattatttttactgcttctcttat

SEQ ID NO: 723888 - DNA, 1446 bp, Homo sapiens
tactatatagaaataatatgtcaaggtatatagacttaaatgcatgtgtaataatgaatatttcagtatcttaacttgaacaygactcattttgtgaatttttttattacttaattaaacataacatgactctaggattttaaattactgaaaagaattttgaagctatgacacaggcagcctccctaatgtctcttcccagtcattctaagtcccaagaagccatgtgccccccatgaggactatgaacatcggggcctgagtccatcaggacagaagccagagctgtgaagactatacttggaggatccaaccgctcccacaatagccaggaggcaaaacagggaaagcagaggaggaagaggccatattgggcttgtagctggtggtctagactctaagaacgtgtctccagatgtcatcatggccacctatccagacccctgaatccagagactctaaaccaaagacataagctcacagtcaaatcaagtgggtatctaattatattcaactgataattttgaagacatttctattttaccaataaattaaaaactatctttatttaccagatatcacatacacataacacatatagacatacaaacaaacagaagcagatcttatagcttttgccagttttaaaatacttttttcttttctccatttggtgtatcaatctttctattacctgtttcatttccctaagcaattgttaactcagcaacaaatttgcatttctaaagggacaactcttaggtgtaacaaaaaggatgtatatttcataagcacagagctaagattctcagcctaagtattgattcattatttgttcaaatcaaggagaaaaaaaaattgctcaagtaaaagttcacttaagatagaaaagcaccttaaacaaaggcattacttattatttaaatttaaaagaatggttagagtttctattgtatgtaggcagacatccttaaaaattgagatttcttttatagatggaaatttcttatacaaaagagtttcaaagtagccaattaaattccagaaaggtgcattttatttcaatagggtgttctttttaatgtagccactgtctcttggttaaaattactgagttcaagggggaactcattatggaacagagccaagaaagcatcctctatgcctggcctcccgcatggataggtctgaacaagaagcaagtctattttacctgagggcttaacttttataaataccttatctaggatagctttctttctacctttagggtggaatagtaactaagcaaagattaacagatttaatttttcttatcaattagtttcttaagctttttatttgcctttcataaaatctttaaataaaaatattgaaatctttttagaagcttctgaatatcaatagacatccctagatgagactaatttgggagccctatttttc

SEQ ID NO: 723889 - DNA, 1550 bp, Homo sapiens
tgggttcaagtgattctcctgcctcagccccgagcagctaggattacaggcatgtgccaccacacccggctaatttttgtatttttagtagasacagggtttcaccatgttggtcaggctggtctcaaactcctgatctcatgatctgcccgcctcagcctcccaaggtgctgggattacaggcgtgagccactgcgcccggcctaaacataacatttatatgcactcggaaccaaaagatttaggacttgctttgctgtggtggtctggatcccagccttcactatcgctgaggtacacctgtatgagcaagtctgctaatccctcagcagagtaaatgacatcccttctaaccccaaatatctttatactaaagaaacctttttgactctcagattagtggctgccaaagaagctgatggaaaaaaaaatatttgttcaataaattatttgactccctactggatgccccacattgttctaacctcaatagcaatgaacaaatcaggcaaacagccttgccctcctcatggagcctatattctcatttgcatgtgtgcattagtgcccaggaggatggaggaaaggggctagggagaaaaacaagtaaaatgtaacacagaatatgtggtgtgtcagatgatgataaatgatatggagacaagtcagggagtgcactgtgaatagaagttgttatttgaaatcagttattcaagaaagtcctcactgaggtgacatttaaattgttacggaagtctttctccaaagaatgggaaacagcagatgggggaattttgtggaaggtcagagagggaaagagggttgaaggtggtggggtggcagattggctcatatagggccctcaggcttcagcttttcctttaggtgacacagaaaactgtgggagagttttaagtagcaacatgatcagacataggtcttaaaagcttccctctcactactgtactaagaataaacagcctgaccgttaagggtagaggcagtcaccagggggcaggctacctcaacaatccacaccaaagatgagctgctttacttgagtgacaacagttaacttggtgagtagtctgattcaggatatattttgaagacagaacaaaaagattttctatctgactggatttggggtatgagataaagaacagagtcatggaagactaagaatatggtctgaattgtcacttatactgaaatcaggaagactgtaagaggaacaggtgtcagtacctggaaataaaagtctacagaggtctagggaagggtctgagttggagatacgtaagtgtgagaacacagaaagttatgaaaagccacagaattggacaagaggaatgaaaaagttggtatagacagagaagaggtctaagggctggcagtcaccctcacccccagggtgatttagtatatatatctgagttaaggcccagtcatttgaatccttaacaagcttcccaagtgattctgctatccttcaaactttgaaaacacccacaggcaaatgtcaagataacctcaggctgaactgcaga

SEQ ID NO: 723890 - DNA, 1075 bp, Homo sapiens
aggcctgttctttcctgtgcttagcaggaaagcaaactggttatcagcaatttatctctgattcagagtcagtacaaacacaattccgcccacccgctttccaccttttgactcctacagtacagcatccaaaatgaggatgcaggctgggcatggtggcttacgcctgtaatcccaacactttgggaggccaaggcaggcagatcacttgaggtcaggagtttgagaccagcctgaccaatatagcaaaaccccatctctactaaaaatacaaaaattagccaggcgtgatgacactcacctatagtcccagctactcagcagactgaggcaggagaattgcttgaacccagcaggtggaggctgcagcaagcggagattgcgccactgcattccagcctgggtgacagagcaagactccatctcaaaagaaaaaaaaaaaaaaagaatgcagtttagtataatagccctgatacactgtaagaattccagccaggtgcggtggcrcacgcctgtaatcccagcactttgagaggctgaggcaggaggatcacctgaagtcgggagttcaagaccagcctgaccaacatggagaaaccccgtctctactaaaaatacaaaattagctgggcatgcctgtaatccaagctactcaggaggctgagacaggagaatcgcttgaacctgggaggcagagagtgcggtgagccaaggttgtgccatcgcactccagcctgggcaacaggtgcaaaaactccatctcaaaaaaaaaaaaaaaaaaaaaaagaattccagtcacccagctgggcagtggctcacacctgtaatcctagcactttgggaggctgaggtgggtggatcacttgaggtcaggagtttgacaccagtctggccaacatggcaaaacctcatctatactaaaaaaaaatacaaaaattagctgggcatggtagcaggcgcctataatcccagctactcaggagcctgaggcaggagtatcacttgaacctcagggtcggaggctgcagtgagccgagactgcaccactgcactccagcctgggcgggtgggggta

SEQ ID NO: 723891 - DNA, 2649 bp, Homo sapiens
ccatgatgggatcaaggaaaatttcctgtttcaccaggttcagccaaaccaagatgcccacatctctttatatagtatgcagttttcttttcatctctgttttttttttatgatgtctcttttcatctctctttttaaatactattggtgcatgttctctgtgttctgtataccaaagtcatatcataaactatattatgaatctatagtttcagaaggcttccctttgcttgcttcaagtaattctctaccttttggcctcagtgcaatatgaggaagaggaggaggcagatgtgatgaacacgaagccctgttgcacctctgcagaagaggccccacagtcattttcaacacaaggctccaaggagaacccactagcacagtaggctggaaagaaacatatttgctcccctgtctagctgtgaatgtgttcaactcagttctgtcttcctgtctctcttacaacactcatgagaaatatcgtttacagacaccactgtgtacccatgggtgtctcatccaactgttattaaatgccctggggccttggctgcatctcctttcttggtactcccaccccagacagaatatcataacatccatgagtggcaatgacattattattcctgctctaatttattttttaaaataatttgcatgcatcagtatacaacccaatctcgcttacttgcttgcttttcttttctttttcttttttctttttttgagtcattcttgctctgtcgcccaggctagagtacagtggtgccatctggctcactgcagcctcctctgcccgggttcaagcaattctcgtgccttggccaccaaagtagctgggactacacatatgcaccacaactcctgcctaacttttgtattttttctagtagagatgtggtttcgccatgttggtcaggctggtctygaactcctgacctgaagtgatctgcccggcttggcctcccaaagtgctgggattacaggcctgagctaccctgccctgcctctaaacttttattataatccaaacagaattgcattcaacaattgctcaaggccgggtgtggtggctcacacctgtaattccaacactctgggagcctgaggtggaaggattgcctgaggccaggagttcaagactagcctggacaaaatagagagactccatgtgtcccaaaaaaaaaaaaaaaaaaaaaataggcctataatctcagcactttgggatgccaaggtgggtggatcacctgaggtcaggagttcaagaccagcctggccaacatggcgaaatcccgtcactactaaaattacaaaagtagctgggtatggtggtgcatgcctgtagtcccagctactggggaggctgaggcaggagaatcacttgaacccagaagggggaggtttcagggagccaaggtcatgccactgcactccagcctgggtgacaaagcaaggctccctccgtctcaaaaaaaaaaaaaaaaaaaaaaaagccaggcgtgatggtacatgctatagtcccagctactcaggaggcttaggcaaaaggatggcataagctgaggagtctgaggctgcagtgagctgtgataatgccactgcactccagcctgggtgacagagcaagaccctgactctaaaaaagaaagaaaaaaaaaattgctcaaatgcttcatcattgaaaaaagcatttcatatgttgggactgcctttcataagtcataattaagccagaactgaattctccatcaagactgttggcagttaatggcattttaaattttcttcttttggtatattggcattttctaattttctatcatgaacacttgttaccatttcaagtagagaataactgcatactaggcaatgtgctaagaattttacatgcattatcttactaactgctcccaaccatctttgttttttttgttttgttttgtttttgttgttgtttttttttttttttttgagatggagtcttgttttgtcgcccaggctggagtgcagtgtcacaatctcagctcactgcaacctctgcctccagggttcaagtgattctcctgcctcagtctcccgagtagctgggattacaggccccagccaccacacctggctaatttttgtatctttagtagagacgggatttcaccatgttggccaggctggtctcaaactcctgacctcaagtgatccacccgcctcggcctcccaaagtgctgggattacaggcgtgagccaccacgcctggcccatctttgaaatactattgttagtacattttacagcaaaggaaacaaaagccataaaggttaaataacgtacctagttcagcttggctgtgcggctttatacaaaccactaattctcttaggcccttagttttatggcctataaaactgagatagtatctccctcattaaatgtaaggattaaaaaagaatgccaactgtgaaggagttcttatgtgagatacctggcctacggaaaacaatactcttcctttatgttctctgcagatgtcgagtactactattaaaacagactccttagcaatacagttcggaagatagctcaaatgcttggtacacgtatctcctctcaacttcaagttcactgtcctcagcctggggacttgaaattggccat

SEQ ID NO: 723892 - DNA, 602 bp, Homo sapiens
tgttttgttcttttgagatagagtctcgctctgctgcctaggctggagtacagtggtgtgatctcggctcactgcaacctctgcctcccaggttcaagctactctcctgcctcagcctcccgagtaatggggatyacaggcgcatgccaccacgcccagctaatttttgtatttttactggagatggggtttcactatattggccacactggtctcgaaatacagaccttaggtgatccacccgcatcagcctcccaaagtgctgggattacaggcgtgagccaccgcacccagacttagtattcttaatgaatactccaaaatatctccttaaagcaacaaggccttctctcatttttctttttggattttttttccttccccaaagctaatgagtcacccataccaaatattcctatgtggcttctgtcaccagcataaccttcgtagaaaactactcaggttttttcatcttcccaagatatggcaataaccaaagggctcaagatactgtactcccaaattcctacagaacatctgtgtaatatatctgtacatctgtacggaatgcatcagtgtaaagacaatcatgcccaatttta

SEQ ID NO: 723893 - DNA, 1294 bp, Homo sapiens
ttgaaaatgttcaccagcaaccataaccatcattaaaaatcagcaaatatctttagatttctttataaaacatatatttaggtatgaagaacatgaagaaaaagatatgatgctaatcagttaatgaagtatgtatagaaaacaagttttgtttaaaaataaaatatttatatgataatatatgcctagccatagtaaagttctttgctgtaacctaaagtttgataaacataactaatctagcatgaatgggatgggacaccaggaatgatgacaaacagtgtctatttcctagaaataaaatttgggttctgggtgaaagcactctatgagtctcaggtataattccaggaccaggaactagatgatgtgcaaagatcctctggatggtatgggctagttatttagtagttctatgakaatattgcagcctctcatgcaatgctcttgcccttagtatttatattctcttctagaagagaaaatgacgtaaagaacaagtccctaattgttttggtcagggttccctagagggacataactaatatgatagataaacacatataaaggggagtgtattaagtattaacttacatgatcacaagatcccacaataggctatctgcaagcttgaggagcaaggagagtcagtctgagtcccaaaactgaagaacttggagtccaatgtttgagggcaagaagcatccagcatgggacaaagatgtaggctgggaggctaggccagtctcacgttttcacgtttttctgcctgctttgtatttactggaagctgattagatggtgcccaccagattaagggtgggtcggccttccccagcccactgactccaatgttaatctcttttggcaacacccacacagacacacccaagattaatactttctatccctcaatccaatcgagttgatactcagtattaaccatcatgctaatctaattaaaatcatgtgaacaatgcttgtaaaacagtagatcataatatagtggattataacatcaactgaatgggacacaacaagcacttcttttaaagtgaaataaaatagaataatgaaaaaaatgcattacatggaataacactaagtgttattttgtgacaatgttgtataaattgtgtgtttttatatagatctgtatcaactgtatgttttgttttttgaatgtgggttgtgtccaaaaaactttgaaggtccctgaattaggagtccagggcagatttgttttaagaactaaaatagagtcacctcccagtaggggcttacagacacctca

SEQ ID NO: 723894 - DNA, 621 bp, Homo sapiens
taacttggccatctgatgggtgctatcaatgcctaagtgaaaggtgtggtgaagggttttaagtaatttccattggttagctgcaggcaaaagtatttttccttcttcrgtggctagccatcctgaggggaggaaactatgtcctcatgaggttccccatcctatttctcctgctgagtactggggcttggtttcctggaggggattatcccatactaggggtccttctataagcatttctaatggagggtcctgccttgcggctcttttggcttcaatatcagcttggtggttcccttctatttccctttcctttcctttctgatgaccccagcagtgtaagattgccacctctttaagtttctgtacaggatctggcacaaagtcttattcaaaggtcagcagactcttagagggagatgcagaataatgcaaatacactcaaaatatctccagtaggaagactttattcatccccaaatgctacatttcactacttctgtgatgcgcatattttatcctttgaactggaatgtgtcttacagttgttacagtcagggagtgcttgtgaagtgattgctcacctgcacatattcaaactgggtcatagctgtttatgtt

SEQ ID NO: 723895 - DNA, 624 bp, Homo sapiens
gggtgggagtgaaccaattttccaggtgccgtctgtcaccgcttcccttggctaggaaagggaattcccggacccctgcacttcccgggtgaggcgatgccccrccctgcttcagctcacactcgcgtgggctgcacccactgtccgacaagccccagtgagatgaacctggtacctcagttggaagtgcagaaatcacccatcttccgcatcactcacactgggagctgtagactggagctgttcctattcggccatcttgccatggttgatcacttttgtcatatttttaaaatttcagtttgcccaattttgcagatgttgttttgactgtgctgctctctgagggctcagtgaatgccatctctctacaaagcagtcacattcggattctgctcttgcagccacatctggctttgaccagttgctgctgcctgttctacaaaccccacctggaaatctcacagagctggtgcccagttcctcagggtgatgaccggagagggtgcagaacgcagtaggtgacctctgcaaagccccaaaccattgcttgctatttaaccattgcctgctattcaaccattgcctgtcatttaaccattgcctgctatttaaccattgcct

SEQ ID NO: 723896 - DNA, 624 bp, Homo sapiens
gggtgggagtgaaccaattttccaggtgccgtctgtcaccgcttcccttggctaggaaagggaattcccggacccctgcacttcccgggtgaggcgatgccccaccctgcttcagctcacactcgcgtgggctgcacccactgtccgacaagccccagtgagatgaacctggtacctcagttggaagtgcagaaatcacccatcttcygcatcactcacactgggagctgtagactggagctgttcctattcggccatcttgccatggttgatcacttttgtcatatttttaaaatttcagtttgcccaattttgcagatgttgttttgactgtgctgctctctgagggctcagtgaatgccatctctctacaaagcagtcacattcggattctgctcttgcagccacatctggctttgaccagttgctgctgcctgttctacaaaccccacctggaaatctcacagagctggtgcccagttcctcagggtgatgaccggagagggtgcagaacgcagtaggtgacctctgcaaagccccaaaccattgcttgctatttaaccattgcctgctattcaaccattgcctgtcatttaaccattgcctgctatttaaccattgcct

SEQ ID NO: 723897 - DNA, 1419 bp, Homo sapiens
tctcgtgatgttctgtgtagccctggcctcccctggccctgccccggaccccccattcccacctgtcatcctctggcctctctgtccctgcttcctcccaggctctgtggtccacctctgttcctctcctacacctagtggcacgtctcctcacagcccatgcccagtcagtcatcagggacagtttacctgccaggtttccacccatctgggcacttggcaagactagaaatctgactacatcaagcctaggagcaatgagagcttggtagccataaataccatcagcccttagattttgttctctaaacaccgtacctgtggtgtgtgtagtattcctgggaaaactgtcaaactcaaagtatcaagcacccatacataacttctagtttacaggcaggtcaagagggaggagtaggttaaacgccctcacgatgagcacccacacacccagagcacaggaggttctacgaggcagtgctgggcttttcacaaattaaggaaaaaagaggttgggtggagcggggggtctgttctaaattaagagaaacttcagagacataaaaacgaaatgcaatgtatgggccctatttaaatccctatgtaaatactccaaatgtttaaaaaaaaaaaaaaaaacaagagggagatagtttggaaacaattagagaaatctgaatataggtggtattacattatattaagaatgccattaatttatattcttttgataatgacattctgattatgtttttaagatgtcttttttttttttttttttttttccaaagacagggtctcactccgtcacccaggctggagtgcagtagtgcaatctcagctcactgcagccttgaccccctgcgttcaggtgattctcctgcctgagcctcccaagtagctggggctacaggcctgagccaccacacctggccaagatgtcttgaatctttataaaacacatctcatgacaatgtggggtgatatttcatgacatacaatgtctggaattcaatttttacattttcatcaatcaactcgatacctgccagtaggatgaaatatttaaagtgaaatctagattctttgactttggagaatccttatgctattctctctactcttacatagattttaattaaaaagttcaagaaacaagttgccycttccacagaaaataagtccaggaagcaatgatcatcacggcagaggcatcacccgaaacctctcagtcctggcttgggcaccgctgcctcttctctagcagcagccggaagagagacaaagacaaaaatggcataaaactgttcatccctaaaatatagatcacggtcatgcctggattttcttttttttaatttctgaaagagatgaagattacaatgcaatttgaaaatactttgcatttcaatgccacta

SEQ ID NO: 723898 - DNA, 634 bp, Homo sapiens
ggtttcaccatgttggccagcctggtctcaaactcctgatctcaagtgatctgcccaactcagcctcccaaagtgctgggcttacaggcgtgagccaccgtgcccggcccaactttttttattttaaaagcaccattataaaattactaacttgtttaggaatatttaaagcaaattgtaaaatctacataagataaatacctgctctaaattttcatctaattaatgtcttctctcacctttcccttaytgaaatgtaattcagctgattttcattatccaaattcattacccacagagcagagaaatacgtatacattaaaatgcagttttaatatgtacaaatatataataaaatgctatatatgtactttctaattttgaaatggataaattaagatgctaaaatatacacaattaccaaaataatttttacaggcagaaatgtggaagggactctatcccggcactgttttttaaaaaacattgtctttacatgggacattgattgcttccatatctcagcctaggacgccttaggatatttaattttgtctctcttctagtagaaaaccaactttttcagtagagcagcttttaattattaaggattatgtataaattgcacattttt

SEQ ID NO: 723899 - DNA, 649 bp, Homo sapiens
tcaatcttgtccattccattctattgcataggaaacaaatgttggtcaggatccatataattgattttttcaaaatgggtttcaaccttcagattgaaaaaatactaatttacatgtttccaagctccattttcatcaaccaagaaaggaaacarttatcagtactactatctcgatttactggtcctacacatccttcggatattagctggaatgcttctccctgatgtcatcagtctagatcttattcccttgttatttgttgccatgtgaccatgctccttttcttcagagcatttataacagttgataattatatacttatttgtcattttaaaatttaatatgtatctaaggtccatgagaacagaaactttgtttttttttttcattagtatatttttccatctagcccagcccagcacctagcacataagtactttatatatatagtcatatgtctcttaaccaccatggtgccttctgagaaatgtgttgttaggcaatttcatttaggtttatacaaacctaaatggtatagcttactatctatatacctaggctatatgatatagcctattactcctaggctacaaacccatatagcagtaagtgaattctgcaggcaattataaaacaatgtaagtat

SEQ ID NO: 723900 - DNA, 1490 bp, Homo sapiens
tcgcccaggctggagtgcagtggcatgatctcagctcaccacaacctccaccttctggtttcaagcgattctcctgcctcagcctcccgagtaactgggattacaggctcccgccaccacacctggctaatttttgtatttttagtagaaatagggcttcgccatgttggctaggctggtcctgaactcttgacctcatgatctgcccgccccagccttccaaagtgctgggattacaggcgtgagccactgcgcccagccttccgtggctttgaaaatgcttcgtaagttatcccaggccctttacgtacagaaagatgagtagataccgacatgcagtgtctgcaagggtcaggaaacaggagagccccgccttcctccccagcctaaacattgctcacccacgcttgtgtttgagtgtccctgagtagggcagctccttggtggccaaggcagcgctctggccccgatgatgtggggcatcagaacccgatagaaatgacgcagccctcgaggtgagtgtggccggaacccagctgccccacagccccaggcacttgtgttctgtgtccctggtctgggcagcggttcttgaatgcagctgtggatcaggaccccggggcctgttcttgcacattcctgggccccatctgcctttgcagtctgcatgggatccacatttttagcaaaaccttgcggggagatgtctgaggcaggggcatcactgcccatgtttggagaaggtgtgtgggttcaaagcttccatagcctccwactaaggaatgttttcgaggttctgagagctgggtcgggggggcactgatgatgccagggacagcctgctgggcacagccccaagacagtccttgctgtgtctccactcgcccccttcccaagggaggcctccgagacccttctggggccccctgcctccgctggccagagctcctcatccttctcagtggggtctgtgccacccaccgggcctttgttccgtcagcaccatgtgcccagtgcctcctacaggcctggtcctggcagagagctgggagtccagacagagccatctccctgacagaacgccatccagtggggcatcgggcagcgtagcgaggtgaggggctggcctccatgtggggttgggcctcgccaggttaagggctccaggcagaggcattggcaggtgccaggcccaggtggggaggatgcgagggattgaggcgctgtggggcatgggccggcaccagggtggacctgggtgtgcagtggaagccaggggtcagcagacccggccgcccccatggtggaggtgccacgagagggttgtgcacagaggctgccggctgccctcatccactcttcagacactcagactggcgcctgcctccgcccttgtgccgccatgctgctcccctgtggccagctctgcctcatcattaggtctctgcaggcatcccctccttcaagaagccaccctggcctttccccca

SEQ ID NO: 723901 - DNA, 1878 bp, Homo sapiens
taggtaggagacctttctccaggattccatccgttgggttgggaactttgtttccttctgtcttacggctccagcattctcttagggttccccttatctgcatggtcttaggttccttttgtcttattgctctggcattctcttgggataccccccatttgcatggttgaagcagtttcacctgcayttcagctctaccccagtccccaggagggggaaaagagagaaagaagagggagggcaaatagtttcatggacaggcctaatggcagggcaggctgggcaggtggccacaggccctgcttatacttagaagtaggggtgggggtggggataaaaggaggagaggttggatgctggggcaattagcagttgctgtggcagaatctgttgaggtgaactgaaccaaatgacggccctggataggatgtcagagactagctatttcctcacatttcataaaacaggaaaacgtaaccccatgtaaaccaaatgaatttgtttttaatgagatggcagcaattaaatgaagtaggtggatggtggtccacgtgagtgcctgggaaacctcaggggctgctcctgattgtaaacttagctatatttctttaaaaaaaaattttttttttttaagagatggagtctttctgtgttgcccaggctggtcaagtgatctacctgccttgccctcccaaagtgctggggttataggtgtaagccactgtgtctggctcatatttcttttatttttattattttcttctcgacagtcttaatagggctgaactttttaaaaataataattgttatcctcccacctcagcctcctgagtagctgggactataggcgcctgcatttcttttcatttgagggttctgtcagatgctgttctcttttttcttacagaaatgccagtgttcctggccctggcccatattctgaagccttgccctttctttttttatgtttttgagacaagggtctcactctgtcacccaggctggagtgcagtggtatgatcgcggctcactacaacttctgcctcccgagttcaagcgattcttatgcctcagcctccccagtagctgggattgcaggcatgtaccaccgcacctggctagttttcatatttttagtagagactgggttttgccatgttgcccagggtggtctcgaactcctgggctcaagtgctttgtctgcctcggcctcctaaagtgctgggattacaggcatgagccactgtgcctagccccttgtcccttctgaatcctcatctagatcctccatctttagagaaattactttgtttgtagtagaattaaatctgtcttctagcaattcagaagagggcataggaagatcttggtacttcttacaaatggagaaaagatcctgggaaaggggaaggtggccccagtatgtctctgtattcatggatggtctctgttgtcatgggctctgggtctttattctcagaaatattgttccccagtgacctggtgaatttattttcgaagacaaacaataaaactgggagtaacttcagagcatctgtcatcataaaaaacatggcctggatggctgtgcttaccttcttcatgactgacagggcttacaaggaaatggcagggtcatgcttgcgagaagtagcaccttcagatcgcagttggaaggatgaaaattgtaggtgggaggaagcagagactttaatggtttttttaataaagagcaggtctgtactatggttcgtgtgttccatgttaacaggtagtggacctgaaagttaacaatgactcccatttcccctgagcagttttagtggtgtgtctgggtcctgggtaggctcctgggacaggctgataccctgtctggag

SEQ ID NO: 723902 - DNA, 661 bp, Homo sapiens
gatgtctgcttttggagattcgggttctagctctgacttgattgtggcttgccgtgactttcagcaasctgtgggttccttgggtccccctttccccttcccaaaaatgttggttgagcttgatggtctctgagggtctttctggctctagctctagtcatctttacttcagtgaacagtgcctgtgctccctcatcttcaaaatctcatttcctagctgaatattcctgctatctcccagctagtcattatcacctgggccatctcctctttctttattctttttattattattattttttgagatgggtctcgtcctgtcaaccaggctggagtgcagtggtgtgatcacagctcactgaagcctctacctcctaggttcatatgagccttccacctcggcctcctttgtagctgggacaaggggtaggcatcaccattcctggctaattttactttttattttttgtagagacatagtctcactatgttgctcagggtggtcttgaactcctgagctcaagtgattcttccacctcagcctcccaaaatgctgggattacagacgtgtaccaccgtgcctggcttgcctctttcctacattgataaagattccaggctgatactggtttgtagctcatgaagcccacagccacaatgg

SEQ ID NO: 723903 - DNA, 1008 bp, Homo sapiens
tgagcaggcagctcagagattcacgtagggcttgcagatcagtgcttggctcagaagcggctcagcacgcagggttttactcttacctgggtagcaacagttgaacgtcctctctccaagggtggccatttgttcccttgcctctgagggaagagtgatgacaggggccttcggagtgtcagtgctttcagtggagaggcagtttgcttttggaacatcatcatcaagttctgaagctgaaattgaggcatagttttgcttagtttctcatttataaccaccatgctaagtcttagaatacagtaggtttgggcttatttcacctcccttcacctttccagaaaaaatttaaaaaaaatgaaagccatgtgaccaggcggggtggctcatgcctgtaatcccagcactttgggaggctgaggttggtggagcacgagttcaggagttcgagaccagcctggccaatatggtgaaaccctgtctctactaaaaatacaagaatcagccaggcatggtggtatgtgcctgtagtcccagctactcgggaggctgaggcaggagaatcgctggaacctgggaggcagaggttgcagtgagccgagatcatgccactgcactccagcctgggcaacagagcaagactctgtctttaccaaaaaaaaaaaaaaaaagcaagccatgtatgctctgtcttgcaaaagtcctcttccccttactacggtttccaagaagtacaggggacaggacactgtcacataacagggaaactggcaaaatctaaactaaaaaacataygagtacttcttaaatggcatgaagacctagttttttctaacaatttctaatccatcccaggctgatatttctgtaaaatatgataaacaagaattaggggagaggtggaataagataaaaagagcccaatcattagatacagcaaaaagctggatgccatggcaatgtcaaacttttttttttttttttaagatgcttactctggatttctga

SEQ ID NO: 723904 - DNA, 1008 bp, Homo sapiens
tgagcaggcagctcagagattcacgtagggcttgcagatcagtgcttggctcagaagcggctcagcacgcagggttttactcttacctgggtagcaacagttgaacgtcctctctccaagggtggccatttgttcccttgcctctgagggaagagtgatgacaggggccttcggagtgtcagtgctttcagtggagaggcagtttgcttttggaacatcatcatcaagttctgaagctgaaattgaggcatagttttgcttagtttctcatttataaccaccatgctaagtcttagaatacagtaggtttgggcttatttcacctcccttcacctttccagaaaaaatttaaaaaaaatgaaagccatgtgaccaggcggggtggctcatgcctgtaatcccagcactttgggaggctgaggttggtggagcacgagttcaggagttcgagaccagcctggccaatatggtgaaaccctgtctctactaaaaatacaagaatcagccaggcatggtggtatgtgcctgtagtcccagctactcgggaggctgaggcaggagaatcgctggaacctgggaggcagaggttgcagtgagccgagatcatgccactgcactccagcctgggcaacagagcaagactctgtctttaccaaaaaaaaaaaaaaaaagcaagccatgtatgctctgtcttgcaaaagtcctcttccccttactacggtttccaagaagtacaggggacaggacactgtcacataacagggaaactggcaaaatctaaactaaaaaacatatgagtacttcttaaatggcatgaagacctagttttttctaacaatttctaatccatcccaggctgatatttctgtaaaatatgataaacaagaattaggggagaggtggaataagataaaaagagcccaatcattagatacagcaaaaagctggatgccatggcaatgtcaaactyttttttttttttttaagatgcttactctggatttctga

SEQ ID NO: 723905 - DNA, 589 bp, Homo sapiens
taacttcmtttgatcagaattaaactactcttacaattattatttttatgtaattaatgaaaacaatgtgaatgtcccacacaatctgaatgatggaacgttgataactgaagctggttcctggggcagggaggatcattatggttctcactccattgtttatgtttgacatttcccataataaaaagtttaaacacatgtttaaaaaataagtatgtcacaaattctggttaacaatttctaaacaaaagaaatgtaacattttaccggcaataacattttaacaagatgtttaacaagatggatgtgacttgaatggtctctggttttggtgtcaaccaagtaggaaatactgtcatcaggttcttgtgtatctttccagagatattgatgaacatatgaataaacactcattcatacttttttgatctgcaaatggtaacatactgtgtgttccattctgcattttttttctgtctatatagctttagctatggccatgtcatatatctataaagcaagtctgtgtttatgtgtgtgtgtatatatacatagacttgtttatatatataagtgtgtgtgtgtgtgt

SEQ ID NO: 723906 - DNA, 589 bp, Homo sapiens
taacttcatttgatcagaattaaactactcttacaattattatttttatgtaattaatgaaaacaatgtgaatgtcccacacaatctgaatgatggaacgttgataactgaagctggttcctggggcagggaggatcattatggttctcactccattgtttatgtttgacatttcccataataaaaagtttaaacacatgtttaaaaaataagtatgtcacaaattctggttaacaatttctaaacaaaagaaatgtaayattttaccggcaataacattttaacaagatgtttaacaagatggatgtgacttgaatggtctctggttttggtgtcaaccaagtaggaaatactgtcatcaggttcttgtgtatctttccagagatattgatgaacatatgaataaacactcattcatacttttttgatctgcaaatggtaacatactgtgtgttccattctgcattttttttctgtctatatagctttagctatggccatgtcatatatctataaagcaagtctgtgtttatgtgtgtgtgtatatatacatagacttgtttatatatataagtgtgtgtgtgtgtgt

SEQ ID NO: 723907 - DNA, 653 bp, Homo sapiens
atcagtagatgctcaataaagagttgttgagtgaacaaatgaatgagccagtgattgcgtggatccatgttttctatgagaaggcagagctctgaggacagacagaggcccagtgtgcatgagaaagtccygctggcccaggcagtggcctaagagctgcctaccatggcggtcactgttcttggggaaccacagatgtttcccctctaatccctccatggggaccaggggggcatgagaatgggagagaacacaaagtccctttattcaggggagtggattccatctcaagacaaattgttacctccaaggccaccagccgcccagccggcccatcaccatggcctccctcttaaggatgtgggcacaggcccggccagagctgaaattgccctggaaactagtctcccctttaattaacagggagggcgaccaggcctgctaacggggtggggtatggagtcggggtggggtcaagttcataaagtccccaaagaatcaaggcctccttgtttattttcccgaaaatgttccccattacccagaacagcataggggccaagcaggccgcaggcagggaaaaagctttaacctccccgctgctcagctcagcacatcactatttgacttgcattttaaaaataattacaaac

SEQ ID NO: 723908 - DNA, 653 bp, Homo sapiens
atcagtagatgctcaataaagagttgttgagtgaacaaatgaatgagccagtgattgcgtggatccatgttttctatgagaaggcagagctctgaggacagacagaggcccagtgtgcatgagaaagtcctgctggcccaggsagtggcctaagagctgcctaccatggcggtcactgttcttggggaaccacagatgtttcccctctaatccctccatggggaccaggggggcatgagaatgggagagaacacaaagtccctttattcaggggagtggattccatctcaagacaaattgttacctccaaggccaccagccgcccagccggcccatcaccatggcctccctcttaaggatgtgggcacaggcccggccagagctgaaattgccctggaaactagtctcccctttaattaacagggagggcgaccaggcctgctaacggggtggggtatggagtcggggtggggtcaagttcataaagtccccaaagaatcaaggcctccttgtttattttcccgaaaatgttccccattacccagaacagcataggggccaagcaggccgcaggcagggaaaaagctttaacctccccgctgctcagctcagcacatcactatttgacttgcattttaaaaataattacaaac

SEQ ID NO: 723909 - DNA, 653 bp, Homo sapiens
atcagtagatgctcaataaagagttgttgagtgaacaaatgaatgagccagtgattgcgtggatccatgttttctatgagaaggcagagctctgaggacagacagaggcccagtgtgcatgagaaagtcctgctggcccaggcagtggcctaagagctgcctaccatggcggtcactgttcttggggaaccacagatgtttcccctctaatccctccatggggrccaggggggcatgagaatgggagagaacacaaagtccctttattcaggggagtggattccatctcaagacaaattgttacctccaaggccaccagccgcccagccggcccatcaccatggcctccctcttaaggatgtgggcacaggcccggccagagctgaaattgccctggaaactagtctcccctttaattaacagggagggcgaccaggcctgctaacggggtggggtatggagtcggggtggggtcaagttcataaagtccccaaagaatcaaggcctccttgtttattttcccgaaaatgttccccattacccagaacagcataggggccaagcaggccgcaggcagggaaaaagctttaacctccccgctgctcagctcagcacatcactatttgacttgcattttaaaaataattacaaac

SEQ ID NO: 723910 - DNA, 606 bp, Homo sapiens
caggtctgtcgggcttttagccaccacactaagtgctgtaaaaggagctggaggtagaaatgaagtaacaacaataataataataagcagctttcatggattgtagactatgtgccgtgcacygtgccaagctctttaccatctcttttaatctttgcaataactttatctggtaggtagtgttattgacccattttacaaacgacgcccagagcattggttcaaggttgtgcagctgggaaatggcctgtactcttctaccctgagaataatgctctacagtgagtcagggagtcttgtgaggtctcaagaacagggaccttgtctgtcttattcacttgtgtgtcctcagagcccagaagagagactggcatataatagatatttaatatctgtgttgtgaataagaatgaacaaatgcacctggacctagaagtaacttccgatgaaccatcccagttctcccttccccattccggattatctttacttacctggaagtgaacaagatattaaggggctccaaaagaactgagaaatagaacttggtttgaaagacagtagggagccacagcaggtccttcaggaatggagttccaagctagg

SEQ ID NO: 723911 - DNA, 606 bp, Homo sapiens
caggtctgtcgggcttttagccaccacactaagtgctgtaaaaggagctggaggtagaaatgaagtaacaacaataataataataagcagctttcatggattgtagactatgtgccgtgcactgtgccaagctctttaccatctcttttaatcttygcaataactttatctggtaggtagtgttattgacccattttacaaacgacgcccagagcattggttcaaggttgtgcagctgggaaatggcctgtactcttctaccctgagaataatgctctacagtgagtcagggagtcttgtgaggtctcaagaacagggaccttgtctgtcttattcacttgtgtgtcctcagagcccagaagagagactggcatataatagatatttaatatctgtgttgtgaataagaatgaacaaatgcacctggacctagaagtaacttccgatgaaccatcccagttctcccttccccattccggattatctttacttacctggaagtgaacaagatattaaggggctccaaaagaactgagaaatagaacttggtttgaaagacagtagggagccacagcaggtccttcaggaatggagttccaagctagg

SEQ ID NO: 723912 - DNA, 606 bp, Homo sapiens
caggtctgtcgggcttttagccaccacactaagtgctgtaaaaggagctggaggtagaaatgaagtaacaacaataataataataagcagctttcatggattgtagactatgtgccgtgcactgtgccaagctctttaccatctcttttaatctttgcaataactttatctggtaggtagtgttattgacccattttacaaacgacgcccagagcattggttcaaggttgtgcagctgggaaatggcctgtactcttctaccctgagaataatgctctacagtgagtcagsgagtcttgtgaggtctcaagaacagggaccttgtctgtcttattcacttgtgtgtcctcagagcccagaagagagactggcatataatagatatttaatatctgtgttgtgaataagaatgaacaaatgcacctggacctagaagtaacttccgatgaaccatcccagttctcccttccccattccggattatctttacttacctggaagtgaacaagatattaaggggctccaaaagaactgagaaatagaacttggtttgaaagacagtagggagccacagcaggtccttcaggaatggagttccaagctagg

SEQ ID NO: 723913 - DNA, 585 bp, Homo sapiens
tgttgttcagcctcctttgggggaagcagcaaacgagaagggggtaagaattggctgctgtgtaatcaactcacaatatctactcctgatctaactttctacctcacagaatttttgtgaaaatttggattgccagtagcactctgaaggccacaagcttataaaataataatctacttttattattattcatgacttattaagaaaaaatcaatattggaagagaataatacttygcatttgttcaacaatgaactttccgaaggtgaaaggaaaagcaattactgtctgagcccagcctgagtcccaagtccatgccaagcgcaagcctgcaagaccatttcctcctccagggacttgcttcgattgtgctaaaacagcttctgccaagccaaccaggattgcatgctgccaaatccagtactcattttcctgatcttattttatttgaattccctgagcattcaatccagttggcagcaccctccttgatacatgatcctgtctgggcttctgtatgctcacagccctggttgttcctcagtctcctctgctggcttctccccatctacctggtttctagat

SEQ ID NO: 723914 - DNA, 1233 bp, Homo sapiens
atggggcctgttccacggcaggggctcaacagcatcgacgttgaaagcaaatctctgcacttggaccccaaattggcctcagcatgactggagagaaatgggaaggaagcctgcatggagggaagcctgctgtgttaagctggtttttgtgttgctataaaggaatacctggccgggtgggtggctcatgcctgtaatcccagcactttaggaggccgaggcaggtggatcatctgatgtcaggagttcaagaccaacctggctaacatggtgaaactccgtctctactaaaaatacaaaaaaaaaaaaaaaatttgctgggtgtggtgacatgcacttgtaattccagctactcaggaggctgaggcaggagaatcacttgaacctgggaggcagaagttgcagggagctgagactgcgccgctgcactccagcatgtgcaacagagtgagactacctctcaaaagaaaaaaaggaataccagaggctgagtaatctgtaaaaaaaaaaaaaagagagatttatttgtctcacgattctgcagattgtacaggaaacatggcgcccgcacctgttcctggtgaggcctcaggaagcttccaatcatgatgggagaggacagagagcaggtgtctcacatggggacagaggaagcaagacagtggccgggggagatgccacacccttttaaacaaccagatctcacaggacctcagagcacaaactcactcagtacctcaaggatggcaccaagccattcatgagggatccccctatgacccaaatagttcccaaaaggccccacctccaacattggaggtcacatttcaacwtgagatttggaggggacaaacatccaagccttatcacctgccgtgtttccaggctggggagagatgtggctgtctgtggggttcagtagaccctggggttgttggggtgaagggacgtcccctgggaggaggggtcattggctgcgccccggccaggccagcccaggttaagtgacagacactatctgactcagcatttagaggggagccagtaggctagtgagaggtgaggaaaccaagtcaggcctgtgagtgttggcggagctggggagaaaagtctggggacagaaccactgggttcaaagaacaaggatgctctggtccaaagtcagggcctcagatcacacactgggggcagccgttcaaactagagaagagcttgggtccacactgccctgcc

SEQ ID NO: 723915 - DNA, 1218 bp, Homo sapiens
gttcagaggacttcacaggaagacgggtgagaaaattagccatgctttccccaaggccaagaataaaaatgtcccaagggatttggagaaagcatttgaagatgacgaaggaaagatagattgagaaggacatgaaagaccaatactaagatcagaatcatgtttaggggcaatgggagccaccaaatattttacagcagagaatgatcagagagatcctcctttaacagcaatacagaagagggctgggaggggtcaaggctgcaaaagacaatggaacatcagggcttaataaacccccatggtaacaggatttaccccggaaatgtctatcctgaagctttctgggagattccaagatgtccttattgccactgtcattagggaggaaactgaaagctggattaggcaagagccaaacccttgctctgcctttcgggtctggttttgatgacattttgtcaccaccacatacctacccccatttctgcatctttcaaaaaatgagttgcaaaggtggacttctctgggcttctgagtgaagaattattaaatcacaaggccccaaagaccccagggttgcttccttaggttacttgggcttggggtggtcaggggagggctcagagcatcattataaatgcaacaatggtaaggaacttctagttatggaaatgytggaggagcaggaacccagactagccttcccatataacatacaggacagtggttcctggcagataggaagcaaacagggtgagtctatgaacgctgaagctgattagctggagttttcaggctgcgtcacagagagcgtagctcagccagctccctgagtagaagagataggatggatctttcagaaggtcaaggctagagtttgcagagcacagtattagagagagaaaaattgcaaagatagaaagctcaggagaagcaaagaagctcctgtcatatactaggactgggtactgaccagctcatgctaggaggaaactacccaaagccagggggaatcaaataatcagtgaaaggaattgcagaaattcgcacagcctgggcatagttcctgtcctcaccagtcagagtaggaaactacataacctatggaacattcagtacagaacacaaaagaatgtaacttattagtgagaagaaatatcagtcagtaaaaacacacctggagttgacaaagatggtagaactcatgagcaatta

SEQ ID NO: 723916 - DNA, 1240 bp, Homo sapiens
ttgccatttgcaacttagattgaaattgaacacaaaggtttatgtaaacagatactcatgtaaacaaactttcaaaagacaatttttgttaatgcaaatatttacattaaaccaatcaataataaaagtttgccttgctttagcaaatgttttaaataaaaattaagatgtaaaaatatgaataagagaagccctaatcactggaaaataattatgtgtaaaaatttttaaagatacatgtgaacacttaaatgacttagttgaaatagatttacaactgtcttgtattacatacctattttataccgcaagcgtacctatatgtagattctggaaacctcatgccgaggtagagattttaagattaatagcaaagctccagatataggtagattttcatatatttcaaaggcatgtatgctctgatacaaaatacgttattagaggaaagcttgcttaaactgtataagagagaagcttttcttgtttctaagcacaggtttgaattttcttctgttcatttatttcccagcaggtgtctctatacagcagcgatattcagaaagcacaagaagacaagaactaattatataaaaaagaaaatgtagcaaggagagaaatgaactggtcatagagtatatctatgttgacaatatgaagtcaaactaaaaatatatactctccataaatagttgtatagcatattttattttcttcttgattttatttgtttaaacaactttttgaaaagagtcctaggaaaagcttttaaaacagtttgtactatatacaacctatataggttggttttttatatatatatatatatatatgtgcakatatatatatatatatatatttatatgtgcagattggaccaaatacaaacctctaacagtatcagtttactcattgccatcttgatctgataacttcagcatttcagatgaaacttaaaggaagtagaactgatctgtgctataatcatcaacaatgatttaaaggtgatagtagacagtaagatattaaaaagcagaaagatagtgtaaaataatatcactcaaagatgtaaattatccagctttccttgatcaatgcattacaaaagtcactattttcatttagaatgagatgcaaaagagtgaatatttttaatgcttaattgtcaatacataagctttttaatcaaacaaaatttatgctttgatggatcccagttgaatttctaccctaaaataga

SEQ ID NO: 723917 - DNA, 1450 bp, Homo sapiens
ttctgaactgggggactgtaacatttacaaaaggctggttttgcagtaggcttttcatgttctagttatatgaccttaggcaagtaacttgactcttctggttttattttcttcaactataaaattgatagggtaataataagatcaaattatagggttgcttttaagactaaaatgagtaatagatgtaaagcgcttagaagactacctggcataaaataaatgttcattattttccccagagttagaaagtgttctgacttgaacaaagcattactctcccctcacagtgatctatgagctatttatagctccatgtattgtacagtttcttcatgaaacctttttaccactttgatgccccacctttgatcattttcctgcttatagccaagaatacctgatagaaaacaggtgcaaatgagagaggatacagccatattttgtcataaaaactttcattcctttttaaagctttgcaaataactgatcaaggaagcagtataaattgagcatatcccatatgcatgtcgttgtttatcggtataattgttggtatatatcactcagtataattaagacacattaacaacatttttttctctttcttttcttggacttggagcaaatatccagtatgccaaattatactgagaccgggatgtctgatataattgtaagaagtggagaggtagaccagttctgagattcataatccagactctgcactggatgaggactgatgcttcttgcgtgacctcccaagtatttatttatgtaacacctattgaatgaagatgtgtgaagatgtaaggatgaaagaaaggttcctcccttcaacagcctccattcactctatataatgctatatatccatttaagcctgaatgtaattgaaatctaattcaatattactccggcaaaaatgagaaaaaaaagggtagtttaatggaagattaattgtgtaggggaagcaaactagtcagttattttgtgggtgtttttgtgttccttggaaagtattgtgagcaattaattagtatgcagacctcgtattctctagcggtatcttgactatagctaaagaagaataatatttggcaagaagtgattataaattattttaaaaaatcaarcataaaagaaaagtgaactttctggttccttaagtaggcctatggagacacagtggcagagccaggtggattattctccttgattttcaaaatcagtgttttaatggagggctaattacgtagaagagaagaaatgatggtatgcaagaaaaacaaattgtatagataaaagctctttttgtgtgtggtggggaggagatttacacattttggtggtagatttggacagaactagaatttccatgtattttggcgttgggcagcagaacagccgaagtcttagtaaaacacacatacacacagagatgtgcaca

SEQ ID NO: 723918 - DNA, 1450 bp, Homo sapiens
ttctgaactgggggactgtaacatttacaaaaggctggttttgcagtaggcttttcatgttctagttatatgaccttaggcaagtaacttgactcttctggttttattttcttcaactataaaattgatagggtaataataagatcaaattatagggttgcttttaagactaaaatgagtaatagatgtaaagcgcttagaagactacctggcataaaataaatgttcattattttccccagagttagaaagtgttctgacttgaacaaagcattactctcccctcacagtgatctatgagctatttatagctccatgtattgtacagtttcttcatgaaacctttttaccactttgatgccccacctttgatcattttcctgcttatagccaagaatacctgatagaaaacaggtgcaaatgagagaggatacagccatattttgtcataaaaactttcattcctttttaaagctttgcaaataactgatcaaggaagcagtataaattgagcatatcccatatgcatgtcgttgtttatcggtataattgttggtatatatcactcagtataattaagacacattaacaacatttttttctctttcttttcttggacttggagcaaatatccagtatgccaaattatactgagaccgggatgtctgatataattgtaagaagtggagaggtagaccagttctgagattcataatccagactctgcactggatgaggactgatgcttcttgcgtgacctcccaagtatttatttatgtaacacctattgaatgaagatgtgtgaagatgtaaggatgaaagaaaggttcctcccttcaacagcctccattcactctatataatgctatatatccatttaagcctgaatgtaattgaaatctaattcaatattactccggcaaaaatgagaaaaaaaagggtagtttaatggaagattaattgtgtaggggaagcaaactagtcagttattttgtgggtgtttttgtgttccttggaaagtattgtgagcaattaattagtatgcagacctcgtattctctagcggtatcttgactatagctaaagaagaataatatttggcaagaagtgattataaattattttaaaaaatcaaacataaaagaaaagtgaactttctggttccttaaktaggcctatggagacacagtggcagagccaggtggattattctccttgattttcaaaatcagtgttttaatggagggctaattacgtagaagagaagaaatgatggtatgcaagaaaaacaaattgtatagataaaagctctttttgtgtgtggtggggaggagatttacacattttggtggtagatttggacagaactagaatttccatgtattttggcgttgggcagcagaacagccgaagtcttagtaaaacacacatacacacagagatgtgcaca

SEQ ID NO: 723919 - DNA, 1492 bp, Homo sapiens
gcagcctggacctgttgcagagccttttctatttctgaaccacatgcaaaactagcagcttttgaggtcactcagtaaataagtcagagtaactaagaaatatgttgccaattccttacccaactagagtaagttgcctccaaaatgcaagtagccccactaggcattgtgcctctcttttggttgttagagggtcatatgcaacaacttatttttcaccttagatgggtaacttgacaagccctataccactgaaccactagaaatttcactgagatagaaggctcttgactttttgtcagatgtattttccaccttctgacgcacatatgtgttactaataagtctagaattggtgctactttgtgctcacttggttccatcagcataatgtcattgatgaatgtaccagtgtgatgtcttgtgaaagttaaaggagatacaaaatccctgagaactaaaccatgacattatattaatataaagaatttttcggaaatattaaagatatcaggaagctattcaaggtcatgttcaggctaaagctgcctggctttgaatgccaaagactaattataagtaatttatgcaaggctgtatgctaaaacctacaattctcttccaggaaacaaaaccattggcaaatactccaaacccttgtggagtgttagactaaattatctttacaaatctttcacacagcatggtgagggggaaggggtatttgctcctctacctattaagccacaggacttggaagaatgttccctacatcctgtcatgcaggacaggaggtttgacgtactttaattttaaattagagagattcttttaaaatagaggatatgtaaggggaagcagttagaattgagaataggccataaagatgagctgttggcttctggatgcaacatctggagactgttagtactcaggatttgtgtagctctctgtttagaatttgagaaacaaacttggcccacagcaatcttggatgggrttgctatccaaggcagaaagacaacgtttgcttatgtctctagcataataaatattaatttatgttatagaaaaaaataatcactcattcattcaaaaaacatttgtgaggttcctactctgattcaggttttgtgcaagtgttagagattgaaagacaaagactgaaacatgccttgaaacattaagaacttgagagaataactgtggacatttaaaacatcatcgtagtgagatattttctgatgaagtttaaaacaagaggaaacgtctctcaggcagataagtggggatgggagagtggtggtagaggagttaattccaaatagggtaactgctagcatgggaaaaggcaagtggagtgcaacacagtaagtttgcaaggaattataagacgagtgaagcacaagattcaagcagaattagagacagtaagtactgaagatgaaaaggtagcagggactggcacatggaggatattctacagctatga

SEQ ID NO: 723920 - DNA, 1492 bp, Homo sapiens
gcagcctggacctgttgcagagccttttctatttctgaaccacatgcaaaactagcagcttttgaggtcactcagtaaataagtcagagtaactaagaaatatgttgccaattccttacccaactagagtaagttgcctccaaaatgcaagtagccccactaggcattgtgcctctcttttggttgttagagggtcatatgcaacaacttatttttcaccttagatgggtaacttgacaagccctataccactgaaccactagaaatttcactgagatagaaggctcttgactttttgtcagatgtattttccaccttctgacgcacatatgtgttactaataagtctagaattggtgctactttgtgctcacttggttccatcagcataatgtcattgatgaatgtaccagtgtgatgtcttgtgaaagttaaaggagatacaaaatccctgagaactaaaccatgacattatattaatataaagaatttttcggaaatattaaagatatcaggaagctattcaaggtcatgttcaggctaaagctgcctggctttgaatgccaaagactaattataagtaatttatgcaaggctgtatgctaaaacctacaattctcttccaggaaacaaaaccattggcaaatactccaaacccttgtggagtgttagactaaattatctttacaaatctttcacacagcatggtgagggggaaggggtatttgctcctctacctattaagccacaggacttggaagaatgttccctacatcctgtcatgcaggacaggaggtttgacgtactttaattttaaattagagagattcttttaaaatagaggatatgtaaggggaagcagttagaattgagaataggccataaagatgagctgttggcttctggatgcaacatctggagactgttagtactcaggatttgtgtagctctctgtttagaatttgagaaacaaacttggcccacagcaatcttggatgggattgctatccaaggcagaaagacaacgtttgcttatgtctctagcataataaatattaatttatgttatagaaaaaaataatcactcattcattcaaaaaacatttgtgaggttcctactctgattcaggttttgtrcaagtgttagagattgaaagacaaagactgaaacatgccttgaaacattaagaacttgagagaataactgtggacatttaaaacatcatcgtagtgagatattttctgatgaagtttaaaacaagaggaaacgtctctcaggcagataagtggggatgggagagtggtggtagaggagttaattccaaatagggtaactgctagcatgggaaaaggcaagtggagtgcaacacagtaagtttgcaaggaattataagacgagtgaagcacaagattcaagcagaattagagacagtaagtactgaagatgaaaaggtagcagggactggcacatggaggatattctacagctatga

SEQ ID NO: 723921 - DNA, 1883 bp, Homo sapiens
atggaggagaaaatgtcattgctgaccaggttgctgtgggtcctgaggagagaacaactccagagacaactctgttaggactgcctcggtctcctgtgcccactgcaccccttccccactgcagtgccaggtggaggccagtagctaggagagtgcttagccgtcttgggaccctcaagctcttttcactttttttttttttaaagacggagtctctgtcatccaggctggagtgcagtggcgcgattacagctcactgcagccttgaactcctgggctcaagcagttctcccacctcagcctcccaagtagctgggaacacaggcacatgccaccacacctagcaaattttctgtagagatrtggtctcactgtattgcccaggctggtctcaaactcctggctttaagtgatccttccgcctcagcctcacaaagtgctgtgattacagatgtgagccactgcacccaatttttttttttttttttgagaccaattctcactctgtcccccaggctggcgtgcagtggcgcaatctcggctcactgcaagctccaccttccaggttcaagcgattctcctgcctcagcctcccgagtagctgggattacaggcgcccaccaccatgcccggctattttttttttttaatagagacggggtttcacctcttcaccaggctgatctcgaactcctgacctcgtgatccacctgcctcagcctcccaaagtgctgggattacaggcgtgagccaccacgcccagcccaacttttttttttttaatccaattttttttaaaatttttattatattctttgggcatgagtgttgatgtagaagataacaaagggaccctaaggcccaaaacagaaagcaaggcaaatgatcaatggtgcaactattctaaatccaatgacatacatacacacacacacacacacacatatgcccttgctaatattgccattgccccacagtgccttacacatatatggtaagaggtacaaagaatatgtgaggcaaccaagtacaaaaaaatggaagtacgtacaagaggggaattgtctagattttcttttcagtgcacagaagacaaagtgcaaactctgtgtcttggcctttggtctgggccactcttccagtcttcccacagactttgatcatgcagtttgggttggcagtagctgggcacagccttttcttgaccctccaccctctacctcccacagcatttcaccagctcagctgctaggaattctgttaggaaccagaggccaaggtataaaagatggaataggatgctgttctctgacttctctatcccagagactcttgaagcttctttgattctttgtctcccatagtttgtatctacttgaacaagaatggcagcacaggcccccacttagataagaagaaggtccagcaactccctgaccattttggaccagcccgtgcctctgtggtgttgcagcaggctgtccaggcctgtatcgactgtgcttatcaccagaaaaccgtcttcagcttcctcaagcaaggccatggtggtgaggttatctcaggtaagcacactttggctcatattgcctcccagccagaaggacccaccttctcaactggttgatttcttgtaaggcatcctggttcccacttcatacctgcaggctctggaaaaatgtgaaggtattccattcctcatctccaaccccccaagagcccctctgagccttatgcatacctctgccaaggagaatacccacagattctgcttcagtgagcctctaaactgattccccccatctacctgattgacctgtccgtacagaaagtataggagaaagaatccagagggggctatgttgtggcagcaggagggtttc

SEQ ID NO: 723922 - DNA, 1883 bp, Homo sapiens
atggaggagaaaatgtcattgctgaccaggttgctgtgggtcctgaggagagaacaactccagagacaactctgttaggactgcctcggtctcctgtgcccactgcaccccttccccactgcagtgccaggtggaggccagtagctaggagagtgcttagccgtcttgggaccctcaagctcttttcactttttttttttttaaagacggagtctctgtcatccaggctggagtgcagtggcgcgattacagctcactgcagccttgaactcctgggctcaagcagttctcccacctcagcctcccaagtagctgggaacacaggcacatgccaccacacctagcaaattttctgtagagatgtggtctcactgtattgcccaggctggtctcaaactcctggctttaagtgatccttccgcctcagcctcacaaagtgctgtgattacagatgtgagccactgcacccaatttttttttttttttttgagaccaattctcactctgtcccccaggctggcgtgcagtggcgcaatctcggctcactgcaagctccaccttccaggttcaagcgattctcctgcctcagcctcccgagtagctgggattacaggcgcccaccaccatgcccggctattttttttttttaatagagacggggtttcacctcttcaccaggctgatctcgaactcctgacctcgtgatccacctgcctcagcctcccaaagtgctgggattacaggcgtgagccaccacgcccagcccaacttttttttttttaatccaattttttttaaaatttttattatattctttgggcatgagtgttgatgtagaagataacaaagggaccctaaggcccaaaacagaaagcaaggcaaatgatcaatggtgcaactattctaaatccaatgacatacatacacacacacacacacacacatatgcccttgctaatattgccattgccccacagtgccttacacatatatggtaagaggtacaaagaatatgtgaggcaaccaagtacaaaaaaatggaagtacgtacaagaggggaattgtctagattttcttttcagtgcacagaagacaaagtgcaaactctgtgtcttggcctttggtctgggccactcttccagtcttcccacagactttgatcatgcagtttgggttggcagtagctgggcacagccttttcttgaccctccaccctctacctcccacagcatttcaccagctcagctgctaggaattctgttaggaaccagaggccaaggtataaaagatggaataggatgctgttctctgacttctctatcccagagactcttgaagcttctttgattctttgtctcccatagtttgtatctacttgaacaagaatggcagcacaggcccccacttagataagaagaaggtccagcaactccctgaccattttggaccagcccgtgcctctgtggtgttgcagcaggctgtccaggcctgtatcgactgtgcttatcaccagaaaaccgtcttcagcttcctcaagcaaggccatggtggtgaggttatctcaggtaagcacactttggctcatattgcctcccagccagaaggacccaccttctcaactggttgatttcttgtaaggcatcctggttcccacttcatacctgcaggctctggaaaaatgtgaaggtattccattcctcatctccaaccccccaagagcccctctgagccttatgcatacctctgccaaggagaatacccacagattctgcttcastgagcctctaaactgattccccccatctacctgattgacctgtccgtacagaaagtataggagaaagaatccagagggggctatgttgtggcagcaggagggtttc

SEQ ID NO: 723923 - DNA, 916 bp, Homo sapiens
caggttcatttctgcttagtgcccagaagatcctgttcctgacaaggaaatgccattagcatttttttttctccttttcaacatagagactttttctccctacagttgatagaaataatgtatttttttatattagccacacatatagttgttctgtattgatatattttgccaaataccagaaacaattttaacaggacagaacatgatatttgggtctcttcatgacaggcaatgatttcagaaaacacttattaaatgattagaaatactttctccaatcaattagttaagtacaagaaattaaactcattcggctgggtgtggtggctcacacctgtaatcccagcactttgggaggctgaggcaggtggatcacctgaggtcaggagtttgagaccagcctggccaacatggtaaaaccccatctctactaaaaatacaaaaattagctaggcatggtggtgggcgcctgtagtcccagctactcaggaggctgagataggagaatcgcttgaacctaggagacggaggttgcagtgagccgagactgcactgcactcctgcactccagcctgggtgacaagagtgagactctatctaaaaaaaaaaaaaamaaaaaaaaaaaaaaaaaaacactcatctttaatgcatcatctgatgaagtatgagaaatgttttgaagcagaaatgaacacttttttgggccataataaaatgtcatttcaaaatatagatttccccaggaagaaaaatgacctctcaaagaagattttatattcttcaccataactggagatcaatggtgccttctgtgatgatgtcatttgggaccagaaatagcatcttttattaaatcttgtctgagattgacccatcctaaactgaacacagcaaggaaagccaaatctctgga

SEQ ID NO: 723924 - DNA, 580 bp, Homo sapiens
tgaataaaatctctgtgtgtgtgtgtatgtgtgtgtgtgcatgcgtctgtgggttccaaatattaaaactttaaaaaaaactattaaaaaagtcaaagaagatgtacttattatgaaataatatgaagtttctcaataccatgaagtaaataggtttttggctttagtgctctcttctaaagccatgctgtttttagtgaatctcctgctaacamagaaatattatattcaatcagcaagaagtccagaagttaactgaaataaacagctctgcttttctttgatatttattttgctaccatgcctcgcatgtttaagtaatacagatctttcccaaatattattttattttatgtgaaatgttttttgtatcctgcaattttttagtatctttgtctcagggaaataataatagtggtaatgacgatgagctaggttctcgataaaattttttttaaatgctatattctaaattttgggagctgacatgagcctttggtaaacattgtaagcaattataattattttcaaaaatttttaagaagatttaattttgtagaagggcctcagtgtaatagta

SEQ ID NO: 723925 - DNA, 580 bp, Homo sapiens
tgaataaaatctctgtgtgtgtgtgtatgtgtgtgtgtgcatgcgtctgtgggttccaaatattaaaactttaaaaaaaactattaaaaaagtcaaagaagatgtacttattatgaaataatatgaagtttctcaataccatgaagtaaataggtttttggctttagtgctctcttctaaagccatgctgtttttagtgaatctcctgctaacacagaaatattatattcaatcagcaagaagtccagaagttaactgaaataaacagctctgcttttctttgatatttattttgctaccatgcctcgcatgtttaagtaatacagatctttcccaaatattattttattttatgtgaaatgttttttgtatcctgcaattttttagtatctttgtytcagggaaataataatagtggtaatgacgatgagctaggttctcgataaaattttttttaaatgctatattctaaattttgggagctgacatgagcctttggtaaacattgtaagcaattataattattttcaaaaatttttaagaagatttaattttgtagaagggcctcagtgtaatagta

SEQ ID NO: 723926 - DNA, 580 bp, Homo sapiens
tgaataaaatctctgtgtgtgtgtgtatgtgtgtgtgtgcatgcgtctgtgggttccaaatattaaaactttaaaaaaaactattaaaaaagtcaaagaagatgtacttattatgaaataatatgaagtttctcaataccatgaagtaaataggtttttggctttagtgctctcttctaaagccatgctgtttttagtgaatctcctgctaacacagaaatattatattcaatcagcaagaagtccagaagttaactgaaataaacagctctgcttttctttgatatttattttgctaccatgcctcgcatgtttaagtaatacagatctttcccaaatattattttattttatgtgaaatgttttttgtatcctgcaattttttagtatctttgtctcakggaaataataatagtggtaatgacgatgagctaggttctcgataaaattttttttaaatgctatattctaaattttgggagctgacatgagcctttggtaaacattgtaagcaattataattattttcaaaaatttttaagaagatttaattttgtagaagggcctcagtgtaatagta

SEQ ID NO: 723927 - DNA, 580 bp, Homo sapiens
tgaataaaatctctgtgtgtgtgtgtatgtgtgtgtgtgcatgcgtctgtgggttccaaatattaaaactttaaaaaaaactattaaaaaagtcaaagaagatgtacttattatgaaataatatgaagtttctcaataccatgaagtaaataggtttttggctttagtgctctcttctaaagccatgctgtttttagtgaatctcctgctaacacagaaatattatattcaatcagcaagaagtccagaagttaactgaaataaacagctctgcttttctttgatatttattttgctaccatgcctcgcatgtttaagtaatacagatctttcccaaatattattttattttatgtgaaatgttttttgtatcctgcaattttttagtatctttgtctcagkgaaataataatagtggtaatgacgatgagctaggttctcgataaaattttttttaaatgctatattctaaattttgggagctgacatgagcctttggtaaacattgtaagcaattataattattttcaaaaatttttaagaagatttaattttgtagaagggcctcagtgtaatagta

SEQ ID NO: 723928 - DNA, 580 bp, Homo sapiens
tgaataaaatctctgtgtgtgtgtgtatgtgtgtgtgtgcatgcgtctgtgggttccaaatattaaaactttaaaaaaaactattaaaaaagtcaaagaagatgtacttattatgaaataatatgaagtttctcaataccatgaagtaaataggtttttggctttagtgctctcttctaaagccatgctgtttttagtgaatctcctgctaacacagaaatattatattcaatcagcaagaagtccagaagttaactgaaataaacagctctgcttttctttgatatttattttgctaccatgcctcgcatgtttaagtaatacagatctttcccaaatattattttattttatgtgaaatgttttttgtatcctgcaattttttagtatctttgtctcaggkaaataataatagtggtaatgacgatgagctaggttctcgataaaattttttttaaatgctatattctaaattttgggagctgacatgagcctttggtaaacattgtaagcaattataattattttcaaaaatttttaagaagatttaattttgtagaagggcctcagtgtaatagta

SEQ ID NO: 723929 - DNA, 2794 bp, Homo sapiens
tctgtgccctgcccccagaggtggagcctacagaggcagggaggcctccttgagctgtggtgggctccacccagttcgagcttcccggctgctttgtttacctaagcaagcctgggcaatggcgggcgcccctcccccagcctcactgccaccttgcagtttgatctcagactgctgtgctagcaatcagcgagactccgtgggcataggaccctccgagccaggtgcgggatataatctcatggtgcgccgttttttaagccggttggaaaagcgcaatattcgggtgggagtgacccaattttccaggtgcgtccatcacccctttctttgactcggaaagggaactccctgaccccttgcgcttcccaagtgaggcaatgcctcgccctgctttggctcacgcatggtgcgcgcacccactgacctgcgcccactgtctggcactccctagtgagatgaacccagtacctcagatggaaatgcagaaatcaccggtcttctgcgtcgctcacgctgggagctgtagaccggagctgttcctatttggccatcttgatcaagaagcttactttcccaattctttaaccagtctgatcctaagtacctgctgtgacctcagatttaatttcttctgatgttcagtggcattttttgggagatatatttttgatttcactcaaagatacctccttcagctcatatttttgagacgtttggatgacttgagaamagtattcaagttgggcaccctggatttccctggagaaagcctactttctctgttccttagggtcaatcagggatccaagtcaacggaggctgtgtcattttcaacttgtagcttccaaggtcactctagtcatgcccattccagctagcaggaaggggaaagactggaagtcatgtctataaaattcatcttaagcatgagatgcggaaattgcacacatcagttctgctcgcatcgcatttgtgagggcttagttacatatgacctctactcattgcaggagaggctgcaaaatatagtccctaactggcccagacaccactttgtcactatggaagaagaggagaacagattttgttggatacccagcagtctctgccatagataagttgacacaattccttgaatctgccatattccataatatatgctatattatatattatggaactatgtattagaccataagctccctattccccttgactttgagaaagcttaaagctaaatttagtgctctcttatagtacatcattttcattttttgatgtttattcattattctgatctggtttttgatctccctttttacttacaatggtcttgtctatcacacattttagtatcttacgccattccaaattctttcaaaaagtgggtgggatataaataataatagaattacacaatgcagtaaggtacctgcacaaacagcagctaatgtaaggagactgaaaaaggaactatatttgttaaaatcaaattggctggcctgcaagaagtgtgggtagtagaatctctttggaggacatcgcaacacttcttatatccatgaggtgggcatgcagtggtggcatacagttcaagtagtataatgataaagaatggggtgaccctgtgtctgacaggcaaagttgcctatcaatatattggcatcttatcccataatctgtaagaattagtattttggtgctacataataaagtattttagagtataaaaattagttgttcatatgccagcaaccaccattagtattttcaaaaaagtgcagtgaattctgagcatctaatatgtgcttagcactctgctaatctccatgagagatggacaacatggtctcttccttaaggatcttacacatttataatcctgagagccataatatactaaacagcaaagtgtttttcattcacccttctaaaccctagcccctacatcagtgctaggcacagagtggactctcaacaactaatgccaattgaatgaaaaatattaaaatgtcacttaatgctgaactgaaatttgaaatagatatgggaaggctcagaaatacgcaggatttccgctgatgtttctaaagaataccaaggttttgcttgtgttgactcagaaagactaaaacttggtcactcatttgacagggaaattcatagtaaaactgtttaatagctccttctagatttatttgtcagtgagcctggatatttactctgcttcttataactgtgagaaaaaatgtatgtcttttctctaggcattttatgacaatgtgtagctacctaagatgtgtgggtaccctgggggctggatagtaaaggattaagcttttaaaatatctacccacaggcatttattagaaggtatgcttcacattttattaagttataagctctccaaaaatgctcatgttttaaatgtttttcatctttgttggtgtttatctttgttttttatgcctagcttctgccaaaaaactcccacaaacttttaaattctttaaaaaggcacttcagtagtatgtaagatctgatgtctgtttatatagttctgtgcttctaactaatgtgtttaaaaatgtgtccatgtattttttatatgtatacacacagattataatgctacctggacaatgatagagcatttcaactttaaatctctgtcatctttactgaatggctttcagctggtaattctttaccttttggtgacatcagagatatttttcattccagtgaactctatatggcattgttgcatttgatgatctttttttttttc

SEQ ID NO: 723930 - DNA, 2794 bp, Homo sapiens
tctgtgccctgcccccagaggtggagcctacagaggcagggaggcctccttgagctgtggtgggctccacccagttcgagcttcccggctgctttgtttacctaagcaagcctgggcaatggcgggcgcccctcccccagcctcactgccaccttgcagtttgatctcagactgctgtgctagcaatcagcgagactccgtgggcataggaccctccgagccaggtgcgggatataatctcatggtgcgccgttttttaagccggttggaaaagcgcaatattcgggtgggagtgacccaattttccaggtgcgtccatcacccctttctttgactcggaaagggaactccctgaccccttgcgcttcccaagtgaggcaatgcctcgccctgctttggctcacgcatggtgcgcgcacccactgacctgcgcccactgtctggcactccctagtgagatgaacccagtacctcagatggaaatgcagaaatcaccggtcttctgcgtcgctcacgctgggagctgtagaccggagctgttcctatttggccatcttgatcaagaagcttactttcccaattctttaaccagtctgatcctaagtacctgctgtgacctcagatttaatttcttctgatgttcagtggcattttttgggagatatatttttgatttcactcaaagatacctccttcagctcatatttttgagacgtttggatgacttgagaaaagtattcaagttgggcaccctggatttccctggagaaagcctactttctctgttccttagggtcaatcagggatccaagtcaacggaggctgtgtcattttcaacttgtagcttccaaggtcactctagtcatgcccattccagctagcaggaaggggaaagactggaagtcrtgtctataaaattcatcttaagcatgagatgcggaaattgcacacatcagttctgctcgcatcgcatttgtgagggcttagttacatatgacctctactcattgcaggagaggctgcaaaatatagtccctaactggcccagacaccactttgtcactatggaagaagaggagaacagattttgttggatacccagcagtctctgccatagataagttgacacaattccttgaatctgccatattccataatatatgctatattatatattatggaactatgtattagaccataagctccctattccccttgactttgagaaagcttaaagctaaatttagtgctctcttatagtacatcattttcattttttgatgtttattcattattctgatctggtttttgatctccctttttacttacaatggtcttgtctatcacacattttagtatcttacgccattccaaattctttcaaaaagtgggtgggatataaataataatagaattacacaatgcagtaaggtacctgcacaaacagcagctaatgtaaggagactgaaaaaggaactatatttgttaaaatcaaattggctggcctgcaagaagtgtgggtagtagaatctctttggaggacatcgcaacacttcttatatccatgaggtgggcatgcagtggtggcatacagttcaagtagtataatgataaagaatggggtgaccctgtgtctgacaggcaaagttgcctatcaatatattggcatcttatcccataatctgtaagaattagtattttggtgctacataataaagtattttagagtataaaaattagttgttcatatgccagcaaccaccattagtattttcaaaaaagtgcagtgaattctgagcatctaatatgtgcttagcactctgctaatctccatgagagatggacaacatggtctcttccttaaggatcttacacatttataatcctgagagccataatatactaaacagcaaagtgtttttcattcacccttctaaaccctagcccctacatcagtgctaggcacagagtggactctcaacaactaatgccaattgaatgaaaaatattaaaatgtcacttaatgctgaactgaaatttgaaatagatatgggaaggctcagaaatacgcaggatttccgctgatgtttctaaagaataccaaggttttgcttgtgttgactcagaaagactaaaacttggtcactcatttgacagggaaattcatagtaaaactgtttaatagctccttctagatttatttgtcagtgagcctggatatttactctgcttcttataactgtgagaaaaaatgtatgtcttttctctaggcattttatgacaatgtgtagctacctaagatgtgtgggtaccctgggggctggatagtaaaggattaagcttttaaaatatctacccacaggcatttattagaaggtatgcttcacattttattaagttataagctctccaaaaatgctcatgttttaaatgtttttcatctttgttggtgtttatctttgttttttatgcctagcttctgccaaaaaactcccacaaacttttaaattctttaaaaaggcacttcagtagtatgtaagatctgatgtctgtttatatagttctgtgcttctaactaatgtgtttaaaaatgtgtccatgtattttttatatgtatacacacagattataatgctacctggacaatgatagagcatttcaactttaaatctctgtcatctttactgaatggctttcagctggtaattctttaccttttggtgacatcagagatatttttcattccagtgaactctatatggcattgttgcatttgatgatctttttttttttc

SEQ ID NO: 723931 - DNA, 2794 bp, Homo sapiens
tctgtgccctgcccccagaggtggagcctacagaggcagggaggcctccttgagctgtggtgggctccacccagttcgagcttcccggctgctttgtttacctaagcaagcctgggcaatggcgggcgcccctcccccagcctcactgccaccttgcagtttgatctcagactgctgtgctagcaatcagcgagactccgtgggcataggaccctccgagccaggtgcgggatataatctcatggtgcgccgttttttaagccggttggaaaagcgcaatattcgggtgggagtgacccaattttccaggtgcgtccatcacccctttctttgactcggaaagggaactccctgaccccttgcgcttcccaagtgaggcaatgcctcgccctgctttggctcacgcatggtgcgcgcacccactgacctgcgcccactgtctggcactccctagtgagatgaacccagtacctcagatggaaatgcagaaatcaccggtcttctgcgtcgctcacgctgggagctgtagaccggagctgttcctatttggccatcttgatcaagaagcttactttcccaattctttaaccagtctgatcctaagtacctgctgtgacctcagatttaatttcttctgatgttcagtggcattttttgggagatatatttttgatttcactcaaagatacctccttcagctcatatttttgagacgtttggatgacttgagaaaagtattcaagttgggcaccctggatttccctggagaaagcctactttctctgttccttagggtcaatcagggatccaagtcaacggaggctgtgtcattttcaacttgtagcttccaaggtcactctagtcatgcccattccagctagcaggaaggggaaagactggaagtcatgtctataaaattcatcttaagcatgagatgcggaaattgcacacatcagttctgctcgcatcgcatttgtgagggcttagttacatatgacctctactcattgcaggagaggctgcaaaatatagtccctaactggcccagacaccactttgtcactatggaagaagaggagaacagattttgttggatacccagcagtctctgccatagataagttgacacaattccttgaatctgccatattccataatatatgctatattatatattatggaactatgtattagaccataagctccctattccccttgactttgagaaagcttaaagctaaatttagtgctctcttatagtacatcattttcattttttgatgtttattcattattctgatctggtttttgatctccctttttacttacaatggtcttgtctatcacacattttagtatcttacgccattccaaattctttcaaaaagtgggtgggatataaataataatagaattacacaatgcagtaaggtacctgcacaaacagcagctaatgtaaggagactgaaaaaggaactatatttgttaaaatcaaattggctggcctgcaagaagtgtgggtagtagaatctctttggaggacatcgcaacacttcttatatccatgaggtgggcatgcagtggtggcatacagttcaagtagtataatgataaagaatggggtgaccctgtgtctgacaggcaaagttgcctatcaatatattggcatcttatcccataatctgtaagaattagtattttggtgctacataataaagtattttagagtataaaaattagttgttcatatgccagcaaccaccattagtattttcaaaaaagtgcagtgaattctgagcatctaatatgtgcttagcactctgctaatctccatgagagatggacaacatggtctcttccttaaggatcttacacatttataatcctgagagccataatatactaaacagcaaagtgtttttcattcacccttctaaaccctagcccctacatcrgtgctaggcacagagtggactctcaacaactaatgccaattgaatgaaaaatattaaaatgtcacttaatgctgaactgaaatttgaaatagatatgggaaggctcagaaatacgcaggatttccgctgatgtttctaaagaataccaaggttttgcttgtgttgactcagaaagactaaaacttggtcactcatttgacagggaaattcatagtaaaactgtttaatagctccttctagatttatttgtcagtgagcctggatatttactctgcttcttataactgtgagaaaaaatgtatgtcttttctctaggcattttatgacaatgtgtagctacctaagatgtgtgggtaccctgggggctggatagtaaaggattaagcttttaaaatatctacccacaggcatttattagaaggtatgcttcacattttattaagttataagctctccaaaaatgctcatgttttaaatgtttttcatctttgttggtgtttatctttgttttttatgcctagcttctgccaaaaaactcccacaaacttttaaattctttaaaaaggcacttcagtagtatgtaagatctgatgtctgtttatatagttctgtgcttctaactaatgtgtttaaaaatgtgtccatgtattttttatatgtatacacacagattataatgctacctggacaatgatagagcatttcaactttaaatctctgtcatctttactgaatggctttcagctggtaattctttaccttttggtgacatcagagatatttttcattccagtgaactctatatggcattgttgcatttgatgatctttttttttttc

SEQ ID NO: 723932 - DNA, 615 bp, Homo sapiens
aatgcttctttagctcagaggagtttgttattacccaccttctgaaacgtacttctgtgaattcattaaactaattctccatccagttttgttcccttgctggtgaggygttgtgttgtgatcccttggaggagaagaggtattccagtttttggaattttcaggctttttatgctggtttttcctcatctttatggatttatcttcctttggtttttgatgttggtgacctttggacggggtttctgtgtggacgttcttttgttgatgttgatgctatttctttctgttcgttagtttttcttctaacagtcgggcacctctgctacaggtctgctggagtttgctgtggatctattccagacctgtttgcctgggtatcaccagcagaggctgcagaacagcaaagattgctgcttgttccttcctctggaagcttcatcccagaggggcacccaccagatgccagctggaggagaactcatgtttcttatcaccatacttcgatattgctgagggaaacacttgccattttatcaaggattatcagcacagggattgtgaatcctaaacatttatttggagttaaagattggcttatcaaaggaaatcttt

SEQ ID NO: 723933 - DNA, 645 bp, Homo sapiens
cctctgggggactggctggtcttccaggcccatggcttttgacccaggttctgtgttctgagcatgtgctcggtctcaagcctgccacatcatctgccccagctcgggggtttccatcatgaaaaaaaaaatcacttctcttccgctgtcatttgygataaccacatggacgctgaaacccaaacccaaggctgtttcctttctgtctcctccatacaccagcgccagcatgacccagaaagggtcagcactctcatggccagccctctcactgactcagtggggacagctcagagacacgcctagagccctactctcccgctgcctgcagccacaccccagggatgtccccagacagggcttggaaacagaaaatacttttttttgcttctttttacccctgagcacatttcttttgcaatactgtttggaaactgcacagttcttttttatttatttatttatttattttttaatcctatctccattcaaccagtccagagacgaaacttctcccgtgccagagaggcatgctggctctgctcactcctgcaaccttttctcattgtccttggccgtgtgcgtctgccatttctgcagtgaccccagtctcagcccacctttgagtgcagagtgcttccctcc

SEQ ID NO: 723934 - DNA, 645 bp, Homo sapiens
cctctgggggactggctggtcttccaggcccatggcttttgacccaggttctgtgttctgagcatgtgctcggtctcaagcctgccacatcatctgccccagctcgggggtttccatcatgaaaaaaaaaatcacttctcttccgctgtcatttgtgataaccacatggacgctgaaacccaaacccaaggctgtttcctttctgtctcctccatacaccagcgccagcatgacccagaaagggtcagcactctcatggccagccctctcactgactcagtggggacagctcagagacacgcctagagccctactctcccgctgcctgcagccacaccccagggatgtccccagacagggcttggaaacagaaaatacttttttttgcttctttttacccctgagcacatttcttttgcaatactgtttggaaactgcacagttcttttttatttatttatttatttattttttaatcctatctccaytcaaccagtccagagacgaaacttctcccgtgccagagaggcatgctggctctgctcactcctgcaaccttttctcattgtccttggccgtgtgcgtctgccatttctgcagtgaccccagtctcagcccacctttgagtgcagagtgcttccctcc

SEQ ID NO: 723935 - DNA, 605 bp, Homo sapiens
aaaccctgattaaccccattcctccactttcctggtctcctgatacttctctccaaggtgtttccttacatccgatccccaccttccccttgccctcattggctgcgacaaattggaataattctgtggctgcagttcaagtactttctcccagctggccacgcagaccttgccaagcactcctggactgtgtccttgctggtgatgggctataaaagaatctcacaccagccaaagagtgtaatcatcagcgcagtgaaaaagagtggaatctacttctcaaaattcggcttttccagcctagccacagcctctggcctcccctggcttcaagcctccaataaacttcctacaggttgatctttcagggcagacgtttcttctccaggtcggggaagggggcttggtgtctygcctgcctttggaccagccagctcctctgccttggtaaagaagcatcaaactcactcccttgaaaaggcagtgggtctcgggtctttgtgtccccttctgtccagcctgtgcctctttcatgaggataagaaggacgaaggtccaggggtctggggggaccacacagtcaggacaccaggctttggagaagg

SEQ ID NO: 723936 - DNA, 1330 bp, Homo sapiens
tttttccggctgcatagtactccatggtgtatatgtaccacatggtttaaatattttttaaacaatattttaaaccactttaaaaaagcaactgttataaaatatgttaccgacatctctattttagtgatgacaattctgaggatgcagtatgacagctgctattatttgagattaatttcttgtgtgatttaggattattttaatatttgccacaacaacaaaatacgaagacagattggatagtaaggctggtgtggccacagctgacaactataaccactaatktaaagatttgaggagtccatctgaacaacgtcattttctttaaatgtgaactaaacttatattaataaaacactattttatgtattagagttgagtgcagaattttatttgacaagagggtttattactaaacgaaatttgaaatctacttagattttccctgtagaatagcagttgtctgcactgggttttggacaggaatcatcaggcagataatttcccatttagatggatagccagtgtctgataaaagggcactttgccgttgactgaaagaagatcaatatactctatacatggagcatggacagtgaagttgctggtcagagcctaatttatattcaaaggttagtgaagggctaccccacgttgctgcatttgggcacagaagtaaggaaaacttttcttatattaactctggatctcctcaggtgctaaacagagtcttgtttgaaggctgagagttttttgtcttaaagatagaagaatatccttccttgaatatttttgagggcacaaatggttaaacacctacatttatcactataaccttaacattaatcaataaatatcagtttctttggatgagattgtgtcttgattattcctctaaaactatgtctttatagagagcagtttttaccattatctggaagcttgttaggaatgtagaatgttaggcactaccccagacctattacatctgaatctgtgtttttaaaagatccccaggtgattcataagcatattaccttttgagaaacacttcatagcaaagggaactctgaggcaattcatttaattaattagttgaatagagatttaaaaaatattgtcgccttggatgacccaattcacagtttgggtttaattatcaatatttaaatgttttccggtcaatatctgcctaataatatgagcttttctatagctaggagcacagtctactatagaatttggttatggaaatttcagaatttcaatgggctttgtgtaccttgctctgaattgtaccttgctctgaattgtacctttctctgaa

SEQ ID NO: 723937 - DNA, 1613 bp, Homo sapiens
tcatagcctaatctaatttactgagcatctactaagtgccaagcacagttgtagctctaacagggccagctttgctgtttctagttctgcttaggctactaacccaccatgtggtctcgacagactatgctgagctaaagtatcccatttctttttctgtgtaaaataagagggcttggataaatgttctctcaggttcttccagctcaaacacaatattatttattccttatatattctgaatatgtatactttaaaactttagctgctccacttgaaaatctaagtttttattgtcctcctcaaaggactccttgcttcattatctaatgtttttccctttgaagagagtatttcattcctaagaggggtttaaaagaagattcacctggtctgaacctgatattctccaaatgacaattctctaacctaaatttaaaaacacaagcaaaaaaggactgagaagctgagatgaggaagctctgttgggcaagtcaaaatggggccaataatatttacttcacagggttattaaaagagataacatatgtaaagcccatagttcagagcctgacgcttaacagacactcaacaagggatgttcttattctttttttcttgagaaacgagctaatcatttgaaatgtaaaattttgttcatggaattgcataagataccattctatttctacaactatttctgtagtcttaaatgccctgcattaaaagattgttgtttaatatattgtacctcttttgccatctatttgttaaatattggctgcctggtttctgattttgctgaatttgacttttttaaaaaaaaacctaattgttttcttcaagaatacaagccaacattgtaaaggatgatttactctaagataatgctgaaakagatgtggtatgaaattttgttaaatttataagataaatttgggatattcttttactggacaaactttttattaagaatatattgtttcttgaaacactaagttttgggataagttattaaaacaaatttgggagtggcttagttgggtgtttctcacttggatctctcatgagattgtaaacaagatgctagccagcgctacagtcacttgatagcttgtctcagggatttgcttccattggttcattcatgttcaggcaagttggtgctggcaattgtcaggagacaccagtttctggtcatgtggatctcttcatgggaaggcttcaatgtttttatgtcatggcatttgacttgctctaggatgagtgatctaagagacaggaagaaggaacccacaatgtcttttgtgatctaggcttgtaagtcaaactctgccacaactgaaatatcttactagttacacagatcagccttattcagtttgggaggagactacacaccagcttgaataccaggaagtgagaatcattgtggacgatcttggatgatagttactcccacatcagggttcttctggcttaggctcatttctcttatctttctgtgcattctctgtgaacaagcccattcacatctatagattcacataccacctttatgcctaattatttccaaatatataagtaagcccagatttctcttctgttcttca

SEQ ID NO: 723938 - DNA, 1613 bp, Homo sapiens
tcatagcctaatctaatttactgagcatctactaagtgccaagcacagttgtagctctaacagggccagctttgctgtttctagttctgcttaggctactaacccaccatgtggtctcgacagactatgctgagctaaagtatcccatttctttttctgtgtaaaataagagggcttggataaatgttctctcaggttcttccagctcaaacacaatattatttattccttatatattctgaatatgtatactttaaaactttagctgctccacttgaaaatctaagtttttattgtcctcctcaaaggactccttgcttcattatctaatgtttttccctttgaagagagtatttcattcctaagaggggtttaaaagaagattcacctggtctgaacctgatattctccaaatgacaattctctaacctaaatttaaaaacacaagcaaaaaaggactgagaagctgagatgaggaagctctgttgggcaagtcaaaatggggccaataatatttacttcacagggttattaaaagagataacatatgtaaagcccatagttcagagcctgacgcttaacagacactcaacaagggatgttcttattctttttttcttgagaaacgagctaatcatttgaaatgtaaaattttgttcatggaattgcataagataccattctatttctacaactatttctgtagtcttaaatgccctgcattaaaagattgttgtttaatatattgtacctcttttgccatctatttgttaaatattggctgcctggtttctgattttgctgaatttgacttttttaaaaaaaaacctaattgttttcttcaagaatacaagccaacattgtaaaggatgatttactctaagataatgctgaaagagatgtggtatgaaatkttgttaaatttataagataaatttgggatattcttttactggacaaactttttattaagaatatattgtttcttgaaacactaagttttgggataagttattaaaacaaatttgggagtggcttagttgggtgtttctcacttggatctctcatgagattgtaaacaagatgctagccagcgctacagtcacttgatagcttgtctcagggatttgcttccattggttcattcatgttcaggcaagttggtgctggcaattgtcaggagacaccagtttctggtcatgtggatctcttcatgggaaggcttcaatgtttttatgtcatggcatttgacttgctctaggatgagtgatctaagagacaggaagaaggaacccacaatgtcttttgtgatctaggcttgtaagtcaaactctgccacaactgaaatatcttactagttacacagatcagccttattcagtttgggaggagactacacaccagcttgaataccaggaagtgagaatcattgtggacgatcttggatgatagttactcccacatcagggttcttctggcttaggctcatttctcttatctttctgtgcattctctgtgaacaagcccattcacatctatagattcacataccacctttatgcctaattatttccaaatatataagtaagcccagatttctcttctgttcttca

SEQ ID NO: 723939 - DNA, 624 bp, Homo sapiens
tcatgtctgtaatcttagcagtctgagaggccaaacccggaggattacttgagctcaggagttcaagaccagcctgagcaacatagacctcctctctattaaaaaaaaaaaaaaagaagaagaagaaagaaggaaaggaaaaaaaaagaagagaggagaggagacgggaggggaggggaggggaggggactagccgagataagacgagactggtccagcaccacgaagatgccttgtgccatctcttaccatcacccaccggttttccgtgtccccttttctttttgttttgtttttgakacagagtctcgctctgtcacccaggctggagtgtggtggcgcgatctcggctcactgcaagctccgcctcccgggttcaccccattctcctgcctcagcctccccagcagctgggactacaggcgcacgccgccatgtccggctaatttttttgtatttttagtagagatggggttccaccgtgttagccaggatggtctcgatctcctgacctggtgatccgcccgccacagcttcctaaagtgctgggattacaggcgtgagccaccgcgcccggccccgtgttcctatttatttatttatttatttaattttttttttttt

SEQ ID NO: 723940 - DNA, 677 bp, Homo sapiens
catttaaactgagattttcctggttcttgtatgatgagtgctttttgattatatactaagcattttgagtattattttgtgaggctgaatcattttctctctctgcctctctttctctctctctacctctcttcctcacttcttctctctctttctttcttcatttggcatgcagtcamcctgtttaggtagagcacacagttcctaaaagtggtaaatgttcagctccccactgggtcccactgacacctttccaggaaaagctgagcactgactcccaccaccttcttgctgccgagtcggggtggaagtttagctctctgcagtgatttgctgatacccagagggacaggagaatgtggatgaattgtctcaatacttcttctttccgcctcatgactcctggtggaatttttattggaaatgcattgaatctatagatcaaattgggaaaaattgacttcttaacaatattgagtcttccatctcatgaacaaagtatatctcttcatttatttaggtcttctttaatttctctcagtaacgttttataattttttttttttttaagacggagtcttactctgtcgcccaggctggagtgcagtggtgcgatctcggctcactgcaagctccgcctcacgggttcacgccattctcctgcctcagcctcccga

SEQ ID NO: 723941 - DNA, 677 bp, Homo sapiens
catttaaactgagattttcctggttcttgtatgatgagtgctttttgattatatactaagcattttgagtattattttgtgaggctgaatcattttctctctctgcctctctttctctctctctacctctcttcctcacttcttctctctctttctttcttcatttggcatgcagtcacmctgtttaggtagagcacacagttcctaaaagtggtaaatgttcagctccccactgggtcccactgacacctttccaggaaaagctgagcactgactcccaccaccttcttgctgccgagtcggggtggaagtttagctctctgcagtgatttgctgatacccagagggacaggagaatgtggatgaattgtctcaatacttcttctttccgcctcatgactcctggtggaatttttattggaaatgcattgaatctatagatcaaattgggaaaaattgacttcttaacaatattgagtcttccatctcatgaacaaagtatatctcttcatttatttaggtcttctttaatttctctcagtaacgttttataattttttttttttttaagacggagtcttactctgtcgcccaggctggagtgcagtggtgcgatctcggctcactgcaagctccgcctcacgggttcacgccattctcctgcctcagcctcccga

SEQ ID NO: 723942 - DNA, 677 bp, Homo sapiens
catttaaactgagattttcctggttcttgtatgatgagtgctttttgattatatactaagcattttgagtattattttgtgaggctgaatcattttctctctctgcctctctttctctctctctacctctcttcctcacttcttctctctctttctttcttcatttggcatgcagtcaccctgtttasgtagagcacacagttcctaaaagtggtaaatgttcagctccccactgggtcccactgacacctttccaggaaaagctgagcactgactcccaccaccttcttgctgccgagtcggggtggaagtttagctctctgcagtgatttgctgatacccagagggacaggagaatgtggatgaattgtctcaatacttcttctttccgcctcatgactcctggtggaatttttattggaaatgcattgaatctatagatcaaattgggaaaaattgacttcttaacaatattgagtcttccatctcatgaacaaagtatatctcttcatttatttaggtcttctttaatttctctcagtaacgttttataattttttttttttttaagacggagtcttactctgtcgcccaggctggagtgcagtggtgcgatctcggctcactgcaagctccgcctcacgggttcacgccattctcctgcctcagcctcccga

SEQ ID NO: 723943 - DNA, 677 bp, Homo sapiens
catttaaactgagattttcctggttcttgtatgatgagtgctttttgattatatactaagcattttgagtattattttgtgaggctgaatcattttctctctctgcctctctttctctctctctacctctcttcctcacttcttctctctctttctttcttcatttggcatgcagtcaccctgtttaggtagagcacacagttcctaaaagtggtaaatgttcagctccccactgggtcccactgacacctttccaggaaaagctgagcactgactcccaccaccttcttgctgccgagtcggggtggaagtttagctctctgcagtgatttgctgatacccagagggacaggagaatgtggatgaattgtctcaatacttcttctttccrcctcatgactcctggtggaatttttattggaaatgcattgaatctatagatcaaattgggaaaaattgacttcttaacaatattgagtcttccatctcatgaacaaagtatatctcttcatttatttaggtcttctttaatttctctcagtaacgttttataattttttttttttttaagacggagtcttactctgtcgcccaggctggagtgcagtggtgcgatctcggctcactgcaagctccgcctcacgggttcacgccattctcctgcctcagcctcccga

SEQ ID NO: 723944 - DNA, 677 bp, Homo sapiens
catttaaactgagattttcctggttcttgtatgatgagtgctttttgattatatactaagcattttgagtattattttgtgaggctgaatcattttctctctctgcctctctttctctctctctacctctcttcctcacttcttctctctctttctttcttcatttggcatgcagtcaccctgtttaggtagagcacacagttcctaaaagtggtaaatgttcagctccccactgggtcccactgacacctttccaggaaaagctgagcactgactcccaccaccttcttgctgccgagtcggggtggaagtttagctctctgcagtgatttgctgatacccagagggacaggagaatgtggatgaattgtctcaatacttcttctttccgcctcatgactcctggtggaatttttattggaaatgcattgaatctatagatcaaattgggaaamattgacttcttaacaatattgagtcttccatctcatgaacaaagtatatctcttcatttatttaggtcttctttaatttctctcagtaacgttttataattttttttttttttaagacggagtcttactctgtcgcccaggctggagtgcagtggtgcgatctcggctcactgcaagctccgcctcacgggttcacgccattctcctgcctcagcctcccga

SEQ ID NO: 723945 - DNA, 1193 bp, Homo sapiens
tcaagaataaccacaaaatgaatagaaacacagtagtagagtgaaataagctagtagagggaaaaatgaagtcataaaaataatctcaatacaaagaaggaaataaaatgagataaaacgtagaatagttagaacatgtaaaaattataaaataagatggtggrtttaaccacaaaatatggcagtaatcatattaaatgcaaatgtatcaaaatgtagttaaaaagacagcttttctaaaagaatttttttttaaatccaagaatacgctgtatacaaaagaatttattaaacatgaggatagagaaaggttacaaatacaaatcagaagaaagctgaagtaattatattaatataagacaaaattgatttttaagataaaaagcattgctagagacccagtgatcactacatgatgataaaacttcacaaagtagatagacaattttaaatttatatgcatttaatactgtttaaaattatataaagcaaaaattgattaaggcaaaatggcatggtcaaatacaaactcatattgcaagatacttaaaacatctctctgaataacagatataggaggaagaaatcagcacagacatagattatttgaacaacacaattaataaacgtgatgtcttaacctattttgtgttactataaaatactacatgaggccaggtagtttataaagaaaagagatttagctcacagttctgtgggctgtacaagaagcatggtggagaaagtcaaaggggaagtgggcacctgcaaggagagggacaaatgaggaacatcctggttttataacaacgcactccaatgggaactaagctgattccacaagagtcaatccagcctccagtttcatgagaaaaagaactcactacttctagaacagcaccaagccactcataaggaatctgccccataacccaaacacctcccagtaggcctcacattctaacactgtcacaatgataaccaaattttaacttgagctttgatggggacaaacaaatcatatcaaaaccctagcacctgcctagtgcacatattcagaataccacactcctaaaaggcagtagatacattattttaagggacatacataattttaaaaatttactgtatattgggtcataaagaaaatagcaattatttttaaaagttgaaataatttaggctctgtcctg

SEQ ID NO: 723946 - DNA, 1193 bp, Homo sapiens
tcaagaataaccacaaaatgaatagaaacacagtagtagagtgaaataagctagtagagggaaaaatgaagtcataaaaataatctcaatacaaagaaggaaataaaatgagataaaacgtagaatagttagaacatgtaaaaattataaaataagatggtggatttaaccacaaaatatggcagtaatcatattaaatgcaaatgtatcaaaatgtagttaaaaagacagyttttctaaaagaatttttttttaaatccaagaatacgctgtatacaaaagaatttattaaacatgaggatagagaaaggttacaaatacaaatcagaagaaagctgaagtaattatattaatataagacaaaattgatttttaagataaaaagcattgctagagacccagtgatcactacatgatgataaaacttcacaaagtagatagacaattttaaatttatatgcatttaatactgtttaaaattatataaagcaaaaattgattaaggcaaaatggcatggtcaaatacaaactcatattgcaagatacttaaaacatctctctgaataacagatataggaggaagaaatcagcacagacatagattatttgaacaacacaattaataaacgtgatgtcttaacctattttgtgttactataaaatactacatgaggccaggtagtttataaagaaaagagatttagctcacagttctgtgggctgtacaagaagcatggtggagaaagtcaaaggggaagtgggcacctgcaaggagagggacaaatgaggaacatcctggttttataacaacgcactccaatgggaactaagctgattccacaagagtcaatccagcctccagtttcatgagaaaaagaactcactacttctagaacagcaccaagccactcataaggaatctgccccataacccaaacacctcccagtaggcctcacattctaacactgtcacaatgataaccaaattttaacttgagctttgatggggacaaacaaatcatatcaaaaccctagcacctgcctagtgcacatattcagaataccacactcctaaaaggcagtagatacattattttaagggacatacataattttaaaaatttactgtatattgggtcataaagaaaatagcaattatttttaaaagttgaaataatttaggctctgtcctg

SEQ ID NO: 723947 - DNA, 1193 bp, Homo sapiens
tcaagaataaccacaaaatgaatagaaacacagtagtagagtgaaataagctagtagagggaaaaatgaagtcataaaaataatctcaatacaaagaaggaaataaaatgagataaaacgtagaatagttagaacatgtaaaaattataaaataagatggtggatttaaccacaaaatatggcagtaatcatattaaatgcaaatgtatcaaaatgtagttaaaaagacagcttttcyaaaagaatttttttttaaatccaagaatacgctgtatacaaaagaatttattaaacatgaggatagagaaaggttacaaatacaaatcagaagaaagctgaagtaattatattaatataagacaaaattgatttttaagataaaaagcattgctagagacccagtgatcactacatgatgataaaacttcacaaagtagatagacaattttaaatttatatgcatttaatactgtttaaaattatataaagcaaaaattgattaaggcaaaatggcatggtcaaatacaaactcatattgcaagatacttaaaacatctctctgaataacagatataggaggaagaaatcagcacagacatagattatttgaacaacacaattaataaacgtgatgtcttaacctattttgtgttactataaaatactacatgaggccaggtagtttataaagaaaagagatttagctcacagttctgtgggctgtacaagaagcatggtggagaaagtcaaaggggaagtgggcacctgcaaggagagggacaaatgaggaacatcctggttttataacaacgcactccaatgggaactaagctgattccacaagagtcaatccagcctccagtttcatgagaaaaagaactcactacttctagaacagcaccaagccactcataaggaatctgccccataacccaaacacctcccagtaggcctcacattctaacactgtcacaatgataaccaaattttaacttgagctttgatggggacaaacaaatcatatcaaaaccctagcacctgcctagtgcacatattcagaataccacactcctaaaaggcagtagatacattattttaagggacatacataattttaaaaatttactgtatattgggtcataaagaaaatagcaattatttttaaaagttgaaataatttaggctctgtcctg

SEQ ID NO: 723948 - DNA, 642 bp, Homo sapiens
aggcgcctgccaccatgcccagctaagtttttgtatttatttatttttttttagtagagacagggtttcaccgtgttagccaggatggtctctatctcctgacttcctggaattacaggtgtgagccaccgtgcccggccttaggttgtgtttttatgatttcattttattccctttgctcacttattaagaactctttactgattcagtcatcagcttcttcacttcatatactttaactgcttggctcatgcagtcctccatttatcagctttctgaccatcggaaaatgacttaaatgcctaaactctagagagccagagcttcttgttaaaaccaaaccscaagattttttttttttttttttttttttgaagacagagtcttgctctgttgcccaggctggagtgcagtggtgcaatctctgctcactgcaacctctgcctcctgggttcaagccattcttcctcagcctcccaaataactgggacaaccagtgtgcaccatgacgcctggctaatttttgtatttttagtagaggtttcaccacgttggctaagctggtcttgaactcctgacctcaggcgatccgcctgcctcagcctcccaaagtgctgggattagaggcgtgagccaccatgc

SEQ ID NO: 723949 - DNA, 662 bp, Homo sapiens
tgtttaacaaagatcattagagcatccacctctatagtaatagctatttccatcacccaattagargccagagtactgaaagggctgcacctttgtatttgaatgaggcattctgtataactaatgacttaacaaatccttatccaagtagctaacaaaatgatcctttgatggtatttaagccaaagtgcatcatcaattatttatttttgttggtggtgtttttattttaaagtcagacttaataaggtataatttgcatgcagtaatccaatcttttaagtgtacagttcaatgagttttgacaaacacacacagtcatgtaatcaccaccacaatcaagatatagaacatttcatttatctcaaaaatttccctatgccctttgtagtcaatcttctcccccatcacatgctcctggcagtcatgatctattttctaaccctatactcttgccttttccagaatgtcatttaaattgaatcataaagtatggattcttttgagtttggctcctttcacataacataatgcgtttgagattcagccaaatagttgtgttgttctttcttattgatgaacagtattccattaataggcataccagtttgtttatccattcactagttgaaggacaattacattttttccagttttagcag

SEQ ID NO: 723950 - DNA, 662 bp, Homo sapiens
tgtttaacaaagatcattagagcatccacctctatagtaatagctatttccatcacccaattagaagccagagtactgaaagggctgcacctttgtatttgaatgaggcattctgtataactaatgacttaacaaatccttatccaagtagctaacaaaatgatcctttgatggtatttaagccaaagtgcatcatcaattatttatttttgttggtggtgtttttattttaaagtcagacttaataaggtataatttgcatgcagtaatccaatcttttaagtgtacagttcaatgagttttgacaaacacacacagtcatgtaatcaccaccacaatcaagatatagaacatttcatttatctcaaaaatttccctatgccctttgtagtcaatcttctcccccatcacatgctcctggcagtcatgatctattttctaaccctatactcttgccttttccagaatgtcatttaaattgaatcataaagtayggattcttttgagtttggctcctttcacataacataatgcgtttgagattcagccaaatagttgtgttgttctttcttattgatgaacagtattccattaataggcataccagtttgtttatccattcactagttgaaggacaattacattttttccagttttagcag

SEQ ID NO: 723951 - DNA, 865 bp, Homo sapiens
atcatttttaatctctctaatgctgattttaatacattaacctatataacatcaacttcacagtaccagtcatattctttccacattctcctataagtttaggtttaaaaaatcagctaagacctttgatcacatcagagcacagagactgatctaattttttttttttttttttttttttttgagacagggtcccactctgtcacttaractggagtgcagaggcgtgatctcggctcaccgcaacctctgcctcccaggctcaagtgattctcctgcctcagcctcccgagtagctgggattactggcacatgtcactaccgctcagctaacttttgtatttttagtagagacagggtttcactatgttggccaggcaggtcttaaactcctgacttcaaatgatccacctgcctcggcctcccaaagtgctgggattacaggcatgagccaccaggcccagccctggtctatttgtgaatcttgatcagggagaaggtgaggctggtgatcagatccactgacctaaccatgaaacatcagccatggcggggatgggtagattacaggaagaaagcacagtaatttctctcttggggtatatgtacagtacaagttccatgcctttatattcagatttttctcatatcaaattcatattacttatctgttcattaaagaaatcactctctctctctccgtgtgtgtgagagagatagactgggactcactgtcgcccagcctggagtacagtggcataatcatagcttactacaccctccaactcctgggctcaagcgatcctcccacctcaacctcccaagtagctaggactacaggcatgtgccaccatgactggctaaa

SEQ ID NO: 723952 - DNA, 2380 bp, Homo sapiens
tgataaaacctcgttgatgaacaacaccaagcccatctagaagctttcgcttctgtgaggatgaggcttatttagctgtttaggacggcccttgtttgaatgctaaacataagaaaattcttagacatgtttatgatctaaatgtcatcactgtgtataatcagcaaggcaatgtaattgttagaaacattgctggtgaaaaatagatctaagttcaattctggctctgctattttctttttctcttttttttttttttttttttttttttttttgtttgaggtggagtctcgctccgtcgcccaggctggagtgcagtggcacaatctcggctcactgcaagctccgcctcccgggttcacgccattctcctgcctcagcctcccgagtagctgggactacaggcgcctgccaccatgaccggctaattttttttttgtatttttagtagagacggggtttcaccgtgttagccatgatggtctcaatctcctgacctcgtgatctgcccgtctcagcctcccaaagtgctgggattgcaggcatgagccaccgcttccggccggctctattctgtaatcacatgagcttgggtaagtttcacaatattataaacctcagtgtattcatctttcagtgaggttgaccacatctatctctcaggatttttacggtgatttaaaatatttttcagtatgtacatctactaatttaatgagaacattctagaagcctaaatatatagaaatttcaaattatttagccccttattgaaaaaaatcagataacatatactcttaaacttacttaaacttaaaacctatatccttctatatagtgcaacttcctggctatacacattgaaagtggtcactgagccaaaactaagtacttgaatagatgttctatattttaaagaattcaggttctaaaacaactttgtgaactatggaagaatatttctggcaaaatcttatcattcttctatgtcatcttcaataactctgtactagtaggaccatattagaaatataaaagtccactcccgtctcccatgctagactcataatcaactcagaaaacagaatcagtgaagacatcagagcctatgtgagaaagagggcatattttaataatgtctcataccaataatatattctcagtgatattataaaaataataaaagttgaaaatacttatttttaatggttcaaattaagtgttataattataaaccaaataaaatgccacaaaatggggggaaagtagcaaaagctgaaaaaagtagagaagactaaaattccacaagaataagaattttttttttagacggagtttcactcttgttgcccaggctggagtgcagtggcaagatctcagctcactgcaacctccgcctcccgggttcaagtgattctcctgcctcagcctcccaagtagctgggactacaggcacccgccaccatgcccggctaatttttgtatttttagtagagagggggtttcaccatgttggccaggctggtctcaaactcctgacctcaggtgatctgcccgccttggtctcccaaagtgctgggattacaggcgtgagccaccacgcccagctgaataagaatatttttaaaactctgcttcaaaaagggaatacagcagggcatactatttytatggtacacaattcaagacagactcagtgctgaatcccattcctgccacttactctctgggaatagcaggcaagttgtttaaccacttggaaccttatttcctcatctgcaaaatgggacttgcttaatgctttcatgatggtgtgacaaagacacataaattactcagcacaaggtacatttgtagtgttcttcattggtagatggaaaaaaaaaaagactacaaaaatcctaaaggatcacggtgacatatgacaataacacaggctgtgccttacaaagagagccagtgcatccaaagccagacatccaccaaaggtcacaggatatgaaataatgggtgcccctgatcttgatgatacattgttgaggagataaaaattaaaggctaaaaaaacaagaaaatgaggtaaacatttaataggggtcaaagagacaagcaggtcaaagtaaatgactaagagggaactggtcaatctgatacaaccacatccaatcagaaatggccttgatgatgttcagggaaaagtaaagccagtaacagctggtttatgagacacatttgctgagctttgacattgactgctctactcccaggaaagaaggcaatgaggtctttagctagaaatttgctatcactttcatgtgacaagagtctaatgtccttgaggcattgggaaggacactcaagggtctgaatcagagttcat

SEQ ID NO: 723953 - DNA, 596 bp, Homo sapiens
acaatccaccagaaatggatcactgcattcacttggagccacttaaggagggccacaatggtttcagtgaaagcccattgagygggctttcatcaaaagtgtccttttggaaagctcagaatggaaatataaaaagggatgaacttcaatttggggcaatatgacaaactaagaagcctcctcagtactaaatacctaaaaatgcagcatcctatgaaaacagattttttttttttttttgagacggagtctcgctctgtcgcccaggctggactgcagtggcgcgatctcggctcactgcaagctccgcctcccgggttcacgccattctcctgcctcagcctccctaatagctgggactacaggcacccaccaccacgcctggctaatttttggtatttttagtagagatggggtttcaccgtgttagccaggatggtctcgatctgctgaccttgtgatccgcccgcctcggcctcccaaagtgctgggattacaggcgtgagccactgcgcccggccaataacttttaattacatagcatagatcgcaagaaagtgaaaggacttctaagagacccgacatgatgggaaagc

SEQ ID NO: 723954 - DNA, 596 bp, Homo sapiens
acaatccaccagaaatggatcactgcattcacttggagccacttaaggagggccacaatggtttcagtgaaagcccattgagtgggctttcatcaaaagtgtccttttggaaagctcagaatggaaatataaaaagggatgaacttcaatttggggcaatatgacaaactaagaagcctcctcagtactaaatacctaaaaatgcagcatcctatgaaaacagattttttttttttttttgagacggagtctcgctctgtcgcccaggctggastgcagtggcgcgatctcggctcactgcaagctccgcctcccgggttcacgccattctcctgcctcagcctccctaatagctgggactacaggcacccaccaccacgcctggctaatttttggtatttttagtagagatggggtttcaccgtgttagccaggatggtctcgatctgctgaccttgtgatccgcccgcctcggcctcccaaagtgctgggattacaggcgtgagccactgcgcccggccaataacttttaattacatagcatagatcgcaagaaagtgaaaggacttctaagagacccgacatgatgggaaagc

SEQ ID NO: 723955 - DNA, 596 bp, Homo sapiens
acaatccaccagaaatggatcactgcattcacttggagccacttaaggagggccacaatggtttcagtgaaagcccattgagtgggctttcatcaaaagtgtccttttggaaagctcagaatggaaatataaaaagggatgaacttcaatttggggcaatatgacaaactaagaagcctcctcagtactaaatacctaaaaatgcagcatcctatgaaaacagattttttttttttttttgagacggagtctcgctctgtcgcccaggctggactgcagtggcgcgatctcggctcactgcaagctccgcctcccgggttcacgccattctcctgcctcagcctccctaatagctgggactacaggcacccaccaccacgcctggctaatttttggtatttttagtagagatggggtttcaycgtgttagccaggatggtctcgatctgctgaccttgtgatccgcccgcctcggcctcccaaagtgctgggattacaggcgtgagccactgcgcccggccaataacttttaattacatagcatagatcgcaagaaagtgaaaggacttctaagagacccgacatgatgggaaagc

SEQ ID NO: 723956 - DNA, 612 bp, Homo sapiens
ggtccacttgcaaggggggccaggccttgccaatccaggtggcggatgggacccagcaggtggggccgccggtccctgatccttggggcgctctctaccgagtttggggacccagcaaatcagcccagwtgtagcctgccgtgggaaggtggggtgcgatagattcctaagtcagggatacatggaactgactttttcccccttgctgacaacatatagggcatcttcttaagctcagttgactgaatctcccatgtaacttcgacgaataattgaggaatcttggctatttcaggtttcaaagtgtcggctgcctagtgtgccctggatagatcattgcattctccagcctcctacatgctcactctggattaacaatttcttatttgccatgaggtttctaaactcttcactttcaaaaaggttgcaataaaaggtgtccaaaacaaacaatttgggaacatgtgaaaggagaccttaggtctgttaaggaagaggatgacactacgtgacaacttccgattccagaaacagtctggacttcagggattatatctggggggataaaaagcgcatgcaagtcttcaccgttttcaggaaaatcaaattggc

SEQ ID NO: 723957 - DNA, 625 bp, Homo sapiens
tgtgtgtagtaggattcaaaacttaaaatcaagcagacatgcattttacaacctgatctattactttccaacattctgaccttggggaagtcagcttatgttcttgagccttagttccctcaacagataaacggaaacaatacttattccccaggattattgtcaggacaaaatgagatatgtgaataaagtcttagaacagtgcgtagtccatatgaataaactcttagaacagtgcatagtccatagtagacaktcagtgttgcatcctttgttttcacattagtcattatattttatgaattatcattgcagccaattttataaaatttcaattcattgttaaatatatagctggtttgttgtttccacaggccaagttgcttttcattaaaatttgatttgcttcatttatttactggaaaatagcaaggaagagcctatagaggtaccttttatgtctgccctaagatggaacttctgagcttacagaggaagagagaagtcagtattcctaccttaggacaccagttgtcttctatacgctgaggtgcatttggggcacacagctagagagtcatttttccaatgcccctactttctcctgaattcagctgtctcttat

SEQ ID NO: 723958 - DNA, 661 bp, Homo sapiens
tgaaaacttcatccattttcatttaaatcataccagaataaaatacagtgacttttgccttcccagtagagctttcacaatcaagtaaattgattttttaagccattttagtgaaaatctaacaaattgttatgctgatttattctgaactataagtcatttaaattttaactttccatatgttggcagatgtcatgtgtctgtttactttttggaggctcttctaacagtaattgttaccaacagctgatgatccagcctgtaccctcttctagcttcacttgaaaaaaactcaatccttttactagtaggaaaggaartaggaaaagattaaggttcctagtgttttattttcacatatctaaatgttgacatttagaatgtgtgctaatacattattgttatggcaaaatatattgcatatgtatatgaggagagagatttaatccttttttatattttttgtattacataatttgatacttagttgtcttttttaattctaagacttttggtgaaaatgtataggcttatcctgcatttatcattaatgaaccttcagacactttaatctataatgaagcaactctcgatttaatttgtcatgtttactgactaaagagttcaaccataattaaattttaaaagcagttaaatgaat

SEQ ID NO: 723959 - DNA, 1770 bp, Homo sapiens
cttggaaccaacccaaatgtccatcaatgatagactggattaagaaaatgtggcacatatacaccatggaatactatgcagccatccaaaaggatgagttcttgtcctttgtagggacatggatgaagctagaaaccatcattctgagcaaactatcgcaaggacagaaaaccaaacaccacatgatctcactcataggtgggaacaatgagaacacttggacacagkgtggggaacatcacacaccagggcctgtcgtggggtgcggggagcggggagggatagcattaggagatatacctaatgtaaataacgagttaacaggtacagcacaccaacatggcacatgtatacatatgtaacaaacctgcacattgtgcacatgtaccctagaactttaagtataataaaaaaaaggggggggggagtaagcaggagtttaccattgaatctcctgagtttgagagtgcatggccatcactgtgttccagggatcagaaaaacaactctaaccaccctctgacacctgtaaatctggagctaggacgtcacaccacagctgcagcaaaactcaacagctgaatcagtaggaagtgcccttcattacactccagtctttgaagtctaaagacagtacatggaattgatgtcaactaatttgtatccagaaacagctgcaaggggttctgggaattatagtgtttagcccccaagctctgtataggaagacacactagaagaaatctggagattgaatgtcaatttaagatttccaccacagagtgcattaccaaataatgtaactgggattcctatagctataagccaatgtagtctatgtcccactggcaaaccaccaactcagtaattggacagcagcctccagtacttcatgaagagatatgtgatgttgtctaacaagttccactggaattgctacagaaacaggaatcaagagagaagaaacttggtttgtggattctttttttaacctgtttaaatcactcttgcaaaaaacaaaatctgtttgtccccaaaggttacatactatcaatagatacatgatagctaccttgacaaaatatgtcttaagaccaaaaaaataacaaaaattggcaatgtccttgtgtgtgtgtgtcaacagagactagaaaataattcattgtagtaacagggaaaaagtgcttatgatacaaccttagtgttaaaacggtgcaaaattatatagagtaaaagcaccatatatcataaaacaacaaaatgttactagtaattaaggaataatgagatactatttaccacccatcagattggcaaaaaaataaaaagactgatactatctagtattggtgatggtgggaggaaatggggagtcttacagaatttcagtttgagtgcaaattgggtcagtggtagttattaaagtagaaaaggtacacaccattcagaacagcaattctacctttaggtatctgagaaaaatgttcccctgtgtacaaagagtcaagtactaagaatgttgtcacactgtttattctagcaaaaaccgaaaacaatctatgatgccatcaatacacagaataaattatatccatacagtagactaggtcatctttaatatggacaaggtagacttctatgtacagacctacacataccacaataatatattattaagttaaaaataaattgcataaaataatggtatattcacatttatgtcatgtatacacacacacatacacacaaacaaaaagtaataattatatt

SEQ ID NO: 723960 - DNA, 598 bp, Homo sapiens
atcaagttacaaaatacaagtgccgataattaaactataggtagtatattaaacaaaaatgagtttttagcaattatgtgaaataaggctttaaccaaagcaagacttaatgccacaaggtgtcttttttccccaagagtaattaattcaatcaagcccatgattccaagctcaagtaacaagttttatattcttgaagcaaacaagaaaaggcaatcaatgcttaagtggtatattttagtatatattacatttctggacaatctctcattgcattcaatttttagaacttgtcttgggtctaataaaacaraagaattagagaagaaagcccatgccactttgaggaatgtaacataattgttttgtctgggtacaaaggtacgttacaacactgggggtctttagtcaagttcccatactaattgactcaccaaagcatacttccttcagctacaactgtaattggaacacacagattttacctgaagaaaatcctgtacttccagttttaaaaagcagacaattctatgaagaagcaaccatttaaatatctaactatacacattcaagtttttacaacttcatgccttatgag

SEQ ID NO: 723961 - DNA, 615 bp, Homo sapiens
agagaagcttctttaaaagctgctattgatwactctcttttatttcactaaccttttcatcatcactttgaacaaactagttagcttcttgacctaataaaatttatgatatgaatataaaggaatattatagccacttaggctaaaaaaaggttttttttgttaaagcatactagtcaaaattggtgataatttctcattttcttgatatagatacttcataaacctcaatataaatactctcaaaatggttgtatggattttatttaggtatggtagcatggttaataaaagtaaaaactgttttactcacattttttgtaaattaggattacatatagaatgccacaatttctctaggtttattcaattttcaaattattcctcattttattttaaagcattaaatagaaaagctaattggttaaattttgttatataaatcagagtcatatattctgggatttgtgttactatgcatacttttctaggatgtcaccaaattagttgtttaaaatgtttttagattactgatttatattaagatgacccacactgcaattagattatgcctagtgggaagtattatataaaaagcagaattaagctgggcac

SEQ ID NO: 723962 - DNA, 1329 bp, Homo sapiens
tggaatattttcttcctactcctcctctaactcctacttactccataggcctcagacaagactgccccactttcatccccaaaatatatcaggtatctatattatctttctgcttggcactctgtagcacctatgctttcccttcatagcatgtatattcatttattaaatgaatacagttattcatttaatatctgcctcatctatgaccccacaaactctgtgaaagcaggatgatggcaattttacttactactatatccacagcacaggacatagtctgtaataggcattgaaatatttgttgaataaagaagcgaatgaccatgtttaatttgcttgaaagaccaatgcctggtgagtgcaggaattgaaaaaaaaaaatcagacagaagagacattatcaaaatggaatctttaatatgtggaaaacaaaggaatgaatgaaagatggatctcacgtctgctgtgactgggaaatggacagggccactaaaataagtggaagagttagaaagacatgctgttttgataaggagatgatgaatttggatttggataagttgagttatagaagccaattccatttaggttaaaaatgcaagcatgtaattggggatataggtctatacctccgaaaagaggctgagatgagagataaagctattttggagtcatcttagtagtgccaaatatttcatcagcagcgactttcaagtaaacatatacagttagtgaatcctggacttccttttataagatttctcacacttaaaatgacttattcaatgcctgtctcctcccactcaactgtaagtttcatgaggacggtattgctctatccttaggaaggaagccactacagtgtaggaagtctgggaacagggtggtatggaaagccaagtcttaggctgttaagtgaagaataactccttttctccactagcagtattagcagccatgccaaagaaattcccattgtatggtgagtcaccattgttcccccagtggaatgaacaaatgattttaaatcactcaattgtctagtagcatagttgtaattaaaatgtgtgtttctcagttcaatatcctctccctggtgtacagctattatacaatgcacacttctactaaatatctacctcaatttaccccactgcgaaaagagattatcccactatctcaggtacttttaagatacaatttgttatttaaaascccagagaagtctagacttggaaagcgtatacccagagacccgctgatatcttctcgctctactcttatacacagagatttgtatcttgccaagttggttaaaattgattc

SEQ ID NO: 723963 - DNA, 1549 bp, Homo sapiens
tgtaattcttacaagaaatttaaaagaaattatgaaaataccatgtaattttccttctgccttcaggaaaaataaaaccaaccccccacccccaacccctgcctcaaaaaaattctggtctctgaaaagtcaccaaagaagaagactttatgtgactaactttgtcacacattccagtgattcacagcacttatatgtaacccaaatttcaaatgcagctaaaacataaacttatcatttcttggttagccctcggtaaggctagtaagatgtcttcctatgtaaggaataaaataattctcaggtcctttgtggccttgtttactgcaagccaaagaattgagagctgcaattgttcttcccatcccagaattcgcttccgaccagccagcaatttaatgttttcattttccacaagctgttcaccaagctctcaaaggctgggttttgccaaaattagtgaggtatgaaggcagccatgccccaccttctgtatttatgtgtttatagttgctgtttatagaatcaactgactactctttcaggttatgtagagatgctgcttgcctgtagattgctggtaagcagattctctaaaatcaaaaccctgaattttagtgttgccagtttccatggtgcaaatgttcccatctttgctgatgtcataataccaacatgaggtcactgaacaggaagttaggaaaagatgcacatcctctgctctcctgaaccaataagagccagttccaagacaccataactgattgctatattttaggatttttttctgattataaaggtaattggcatagaaaattggaaataattaaaagtaaaatgaagtagaaaacaatacctagaattctaaaagctagaaatgccaatgatgtaattgttaatgtgggacacggtactactgcctaccacaaataacccttatgtggaattctaataaatctggatttcagtgtatctttctagaaaccatagaaatttcaatatatgctcaaactgaagccattcctaatgggaatatcagaaaaagaagaacttggaattcagaaggaaaagtaaagaaactggttaagaattaataaaggctttagcagtgaacttttaagatagctaaagctggaagaaaataaactccgaagttcaaactgtgttcctgtatttgttagctctcaagggaattgagggtgaagaaggagctaaaggcrggagctttggcaagatatcatcaagccaaatatcagataatctcatatgtttaactaagctgagttaattaaataatgattgcccaagatttttccacctcgaacatccaaataacgacagatgtctgacaccaaaaacacaaccctagaagttggagtcaacagttcagttccaagtcctatcacaaaagtattaagcacggaaattatctgcaatatagcaaaacaaatttaaaatgattttgtaaaagaatgtagaaggaaggagaccttgaagcatgagaatggtaataaaaatattattgcaaattcaagatatataaagtgat

SEQ ID NO: 723964 - DNA, 2075 bp, Homo sapiens
aaatgtacagagaatatctgtggtttacttccaaggagttgaactgggagtaggaagaaaggataggatgtagcttatacttttcatttaatacacttctgtacttacaatttttataccaagcatgtatttcaattttaaagtgtttaaataaaggaatgaacattcacataaatgtgtgtaagtacatgcacaaggayatttgttgctgtttatgataacaattaattgggagctgctttttaaaaatggactatccatgcaaggaaatacaaagataatggtaaagtagatctacatattcacttggaaaggagtatatgagccaggactcaaaacactggagtacgggccaggcgcggtggctcatgcttgttatccgagcactttgggaggctgaggtgggaggaccacttgattccaggagttacagaccaacctggggaacacagtgagaccttgtctctacaaaaaataaacaaaattagccaggcatggtggcatgcgcctgtggttccaattactcaggaggctgaggtgggaggatcatttgagccctggagttcgaggctgcagttagctgcgatattgccactgcactccagcctgggtgacagagcaggaccctgtctcaaaaacaaaacaaaacagaacactggagtgtgaagtttatataagtaaataaacataaaatataaacataaaatataaatataataacagaacacattggaaactttattattaaggaattagattcataatggagcaaatgctgaactattaagcagtcatttgaaaatactgcatagatctatacttagcataataatgcatgcaatatactttaaatggaataaaagcaggctttagaattgtaggtatggaatgattccatttttgtgaagagaatctagaaagtaagctccctgcgaaaagaggctttttttcagcgctatattccttacacctagtttctagtgcttggaacacacaaaatgaatatctgttgaatgttgaaacagtaaatgaaagtgtgcctccacacacaacattacaaagccaaaaaagtcctatctcaatatgttaacaaaatggttttgattttttcttcataattatctgtatttcctaatttttaaaattaacatattatgtaacagaagtattactttcacttaatatttatttaaaggttataagtttcaaggctaagagtttagaaaatatccattatcaggaataactataactcattacctatctaggactcaaacagaggattgaacctgcactcaacagcagcatctgctattattgtgtggccacagaagcttttgcaaggggttaatatggggagactgaacaaagaaaagttaaaaataaagcagagttgctaagcctcaaaaatttacagagtgctgttgtcctagaagaaacacagggagaagatgaccatatcatttgggaatttgacatgtgccattactcttgatttagccttatttagatgctgtgcttgcaaattgggtagctgtcctttgtggactaaacagaattccccaggtgtggatgtgatttgcatatgatttgctcaattatgaattttctgttgaaaaatgatggctttattaaaatagcaagaactgaatgtggactggttggtctgcctgagcaggaataaggcagtgaccacatttccactggggccagcaaggaagaacagttggagctgggccaaagttggcagttttttccagaacggtaaaaatataaaagcccagagacaaccaacttcagcaagaggctatggggacatcctttcttaggtttcagacttatgtaagaaattttttaaaaaaatgtttgctggccttctctaattaccacaacacgaagggtaatgaactaaagttatatgagtcccaagattttggggaatgtttcttctattttttttttttttttaatgtgtcaaatgtatacatttaattgactttgtgtatcactatatttgatcctttttattcttctaacattttcttttagccaaattattttttattcttcatgta

SEQ ID NO: 723965 - DNA, 2075 bp, Homo sapiens
aaatgtacagagaatatctgtggtttacttccaaggagttgaactgggagtaggaagaaaggataggatgtagcttatacttttcatttaatacacttctgtacttacaatttttataccaagcatgtatttcaattttaaagtgtttaaataaaggaatgaacattcacataaatgtgtgtaagtacatgcacaaggatatttgttgctgtttatrataacaattaattgggagctgctttttaaaaatggactatccatgcaaggaaatacaaagataatggtaaagtagatctacatattcacttggaaaggagtatatgagccaggactcaaaacactggagtacgggccaggcgcggtggctcatgcttgttatccgagcactttgggaggctgaggtgggaggaccacttgattccaggagttacagaccaacctggggaacacagtgagaccttgtctctacaaaaaataaacaaaattagccaggcatggtggcatgcgcctgtggttccaattactcaggaggctgaggtgggaggatcatttgagccctggagttcgaggctgcagttagctgcgatattgccactgcactccagcctgggtgacagagcaggaccctgtctcaaaaacaaaacaaaacagaacactggagtgtgaagtttatataagtaaataaacataaaatataaacataaaatataaatataataacagaacacattggaaactttattattaaggaattagattcataatggagcaaatgctgaactattaagcagtcatttgaaaatactgcatagatctatacttagcataataatgcatgcaatatactttaaatggaataaaagcaggctttagaattgtaggtatggaatgattccatttttgtgaagagaatctagaaagtaagctccctgcgaaaagaggctttttttcagcgctatattccttacacctagtttctagtgcttggaacacacaaaatgaatatctgttgaatgttgaaacagtaaatgaaagtgtgcctccacacacaacattacaaagccaaaaaagtcctatctcaatatgttaacaaaatggttttgattttttcttcataattatctgtatttcctaatttttaaaattaacatattatgtaacagaagtattactttcacttaatatttatttaaaggttataagtttcaaggctaagagtttagaaaatatccattatcaggaataactataactcattacctatctaggactcaaacagaggattgaacctgcactcaacagcagcatctgctattattgtgtggccacagaagcttttgcaaggggttaatatggggagactgaacaaagaaaagttaaaaataaagcagagttgctaagcctcaaaaatttacagagtgctgttgtcctagaagaaacacagggagaagatgaccatatcatttgggaatttgacatgtgccattactcttgatttagccttatttagatgctgtgcttgcaaattgggtagctgtcctttgtggactaaacagaattccccaggtgtggatgtgatttgcatatgatttgctcaattatgaattttctgttgaaaaatgatggctttattaaaatagcaagaactgaatgtggactggttggtctgcctgagcaggaataaggcagtgaccacatttccactggggccagcaaggaagaacagttggagctgggccaaagttggcagttttttccagaacggtaaaaatataaaagcccagagacaaccaacttcagcaagaggctatggggacatcctttcttaggtttcagacttatgtaagaaattttttaaaaaaatgtttgctggccttctctaattaccacaacacgaagggtaatgaactaaagttatatgagtcccaagattttggggaatgtttcttctattttttttttttttttaatgtgtcaaatgtatacatttaattgactttgtgtatcactatatttgatcctttttattcttctaacattttcttttagccaaattattttttattcttcatgta

SEQ ID NO: 723966 - DNA, 2075 bp, Homo sapiens
aaatgtacagagaatatctgtggtttacttccaaggagttgaactgggagtaggaagaaaggataggatgtagcttatacttttcatttaatacacttctgtacttacaatttttataccaagcatgtatttcaattttaaagtgtttaaataaaggaatgaacattcacataaatgtgtgtaagtacatgcacaaggatatttgttgctgtttatgataacaattaattgggagctgctttttaaaaatggactatccatgcaaggaaatacaaagataatggtaaagtagatctacatattcacttggaaaggagtatatgagcyaggactcaaaacactggagtacgggccaggcgcggtggctcatgcttgttatccgagcactttgggaggctgaggtgggaggaccacttgattccaggagttacagaccaacctggggaacacagtgagaccttgtctctacaaaaaataaacaaaattagccaggcatggtggcatgcgcctgtggttccaattactcaggaggctgaggtgggaggatcatttgagccctggagttcgaggctgcagttagctgcgatattgccactgcactccagcctgggtgacagagcaggaccctgtctcaaaaacaaaacaaaacagaacactggagtgtgaagtttatataagtaaataaacataaaatataaacataaaatataaatataataacagaacacattggaaactttattattaaggaattagattcataatggagcaaatgctgaactattaagcagtcatttgaaaatactgcatagatctatacttagcataataatgcatgcaatatactttaaatggaataaaagcaggctttagaattgtaggtatggaatgattccatttttgtgaagagaatctagaaagtaagctccctgcgaaaagaggctttttttcagcgctatattccttacacctagtttctagtgcttggaacacacaaaatgaatatctgttgaatgttgaaacagtaaatgaaagtgtgcctccacacacaacattacaaagccaaaaaagtcctatctcaatatgttaacaaaatggttttgattttttcttcataattatctgtatttcctaatttttaaaattaacatattatgtaacagaagtattactttcacttaatatttatttaaaggttataagtttcaaggctaagagtttagaaaatatccattatcaggaataactataactcattacctatctaggactcaaacagaggattgaacctgcactcaacagcagcatctgctattattgtgtggccacagaagcttttgcaaggggttaatatggggagactgaacaaagaaaagttaaaaataaagcagagttgctaagcctcaaaaatttacagagtgctgttgtcctagaagaaacacagggagaagatgaccatatcatttgggaatttgacatgtgccattactcttgatttagccttatttagatgctgtgcttgcaaattgggtagctgtcctttgtggactaaacagaattccccaggtgtggatgtgatttgcatatgatttgctcaattatgaattttctgttgaaaaatgatggctttattaaaatagcaagaactgaatgtggactggttggtctgcctgagcaggaataaggcagtgaccacatttccactggggccagcaaggaagaacagttggagctgggccaaagttggcagttttttccagaacggtaaaaatataaaagcccagagacaaccaacttcagcaagaggctatggggacatcctttcttaggtttcagacttatgtaagaaattttttaaaaaaatgtttgctggccttctctaattaccacaacacgaagggtaatgaactaaagttatatgagtcccaagattttggggaatgtttcttctattttttttttttttttaatgtgtcaaatgtatacatttaattgactttgtgtatcactatatttgatcctttttattcttctaacattttcttttagccaaattattttttattcttcatgta

SEQ ID NO: 723967 - DNA, 582 bp, Homo sapiens
aaacaattaaactatactgttaaggaatatattttggaagacaaacaaaacaaaggaagcataaactcagtattctggagagtgcttacctcttgggacaggaaaatgaaatacaaagaactaaagaagtatgtataagtagtttcaaaatggttggcagtattccagttcatgaatctggaaatgttttgtttctatttatttcactattatccttcataatttatatatatgttacatatagtttatatgygttaactatatacaaagaaaactttagggccaggcacagtggctcatgcctgtaatcccagcactttgggaggccgaggcggttggatcacctgaggtcaggagtttgaaatcagcctggcaaacatggtgaaaccccatctctactaaaaatacaaaaaaaaaaaaaaattagctgggtggggtggcgggcacctgtaatcccagctactcaggaggctgaggcaggagaatcatttcaacccaggaggtggaggttgcagtgagcagagatcacgccactgcactccagcctgggagacagggcaagactccgtttcaaaaaaaaaa

SEQ ID NO: 723968 - DNA, 947 bp, Homo sapiens
tgccccacacaacccacaaactcatgagcaaaatacattcttctggtttatgctactgagattttgaggttgtttattatgcaacagaagctaactgattcaagggccagcagggctgaatatagtatctcagcatctgtgaatgcaatgccacctatataaaggcagaggttataatgtacaccactttattcccaatgcctagaagattgcctgacacatggtagatccccagtaaacatactccaaaagtactgcttcactacaaagtgctggccactgtgacaggaacagaggtagaaatagacatatgatggggtatactttaaaggagtttggcttgtgtttggagagaccaaatggatatgttaagtttgcagggcagggtgaaaaaagtacsatattggaaataggttatgtaagtagaagtgatatgtgtgtcatcacagttgtatcagaggggtggtctagccccactcatatcctctgtcctgcacccatcaaggcacactggcctgactcctggctcccaccagtcatcacctacatttctttacccgataatctctctggccatcagagcctacttttctttcttgcacaggccagaagtaccagaatatgaatccccccgctactccctccaggagcagccctcagccaatgactaatgggagttggtgtataaataacccactgtcttggttctcatcccagatggatgacactgaggtgtgttctactgtggctctcagaattcccaatgagattaagctcctgttacccttagataacttgcttgaaaatgtatatcctgtgatcactccaaaataaatgactggttggtgaatttttgtcttagcatctgcttccggcagaatccaaacaaagacatgagaattaaatttttggtttcattcttgttttattttcttaacatacatgct

SEQ ID NO: 723969 - DNA, 896 bp, Homo sapiens
tttcaagtggaaattttcatcatggataagaatgatgacatatagattaaaatgttatgaatatatttataacttttatagcaaataaaataataatgcattcagattttgacatggatgctaaacaaacaatgaaaggtttgtgtctgagagaatcagtattaataattatttagtattaagtaagcattgttaagtaattaagtactaagaattgagtacaatattttaaaatgtgactttacagagaragagagtacaaattgtataaaattcaagaacacataaaaccaatctatactgatgggcatcagaatagtggctatcttttgggaggtgctgactaggcacacaagatgccttcttgggggttgtacatggcctgcatcttgacttggtggtgattgattacagggttgtgaacatatgtaaaaacttcatcaaggtgtacatttcagatgtgtgtgcctgactgcacatacatcgtagctctataaaataagtataagtacactcccctaccacctcatgatttatgaatgtctttcacaagatctacaggcttccctattacaactgaccctcaggtagatcctgcaagatggctgaataggaacagctctggtctgcagttccgagtgtgatcgatgcaggagatgggtgatttctgcatttccaactgaggtacctggttcatctcactgggactggttgaacagtggctgcagcccacagagggtgagccaaagcagggtggggcatcacctcacccgggaaaagcaaagggtcagaggatttccctttcctagccaagggaagacgtgacagactgtactgggaaaatcaggacactgccacccaaatactgtgcttttccaaaggtcttagcaaatggc

SEQ ID NO: 723970 - DNA, 846 bp, Homo sapiens
tgtttatgatttacatatttccatgtcccagcctgttgatctacctaaattaaaatatgtatattttaaaagatttattgataagataagaaaatgtttacaaaatagtattacatgcaaaaagatgaaacaaaaattgtatatagaatcatttctcagttatatatgtatatgggtttgagtgtgtaaatgcatttaaaacaataataaaaaaaatagggccaggctgggtggctcacgcctgtaatcccagcattctggaaggccgaggtgggtggattgcttgagctcaggagttcaagaccagccgtggcaacatgatgaaaccactgtctctaccaaaaatacggaaaattagctgggcatagtggcatgtacctgtagtcccagctactcgagaggctgagatgggaggatcacttgagcctgggaggtggaggttgcagtgagccaagatcatgccactgcactccagcctgggcaacagtgtgacagcccatctctcaaaaaaaaaaaaaaaaaaaaaaagaaaagaaaatagatmaaaaaattttaaaaatgaaatggaatttttttggtagaataatatggattcatgcctgtttctgttttctcttttttctttttcctttcaataaacatactgtttgagaatagttctagatttacagaaaagctgtgaagcttgtgcagagttccatatactccatgcccaattcctctgtcattaacatcttacattagtaaggtccatttgttacagctcatgaatcaacagtgatacatgattattaactaaagtccatactttattcagaattacttgttttttccctaatgtctttt

SEQ ID NO: 723971 - DNA, 846 bp, Homo sapiens
tgtttatgatttacatatttccatgtcccagcctgttgatctacctaaattaaaatatgtatattttaaaagatttattgataagataagaaaatgtttacaaaatagtattacatgcaaaaagatgaaacaaaaattgtatatagaatcatttctcagttatatatgtatatgggtttgagtgtgtaaatgcatttaaaacaataataaaaaaaatagggccaggctgggtggctcacgcctgtaatcccagcattctggaaggccgaggtgggtggattgcttgagctcaggagttcaagaccagccgtggcaacatgatgaaaccactgtctctaccaaaaatacggaaaattagctgggcatagtggcatgtacctgtagtcccagctactcgagaggctgagatgggaggatcacttgagcctgggaggtggaggttgcagtgagccaagatcatgccactgcactccagcctgggcaacagtgtgacagcccatctctcaaaaaaaaaaaaaaaaaaaaaaagaaaagaaaatagatcaaaaaattttaaaaatgaaatggaatttttttggtagaataatatggattcatgcctgtttctsttttctcttttttctttttcctttcaataaacatactgtttgagaatagttctagatttacagaaaagctgtgaagcttgtgcagagttccatatactccatgcccaattcctctgtcattaacatcttacattagtaaggtccatttgttacagctcatgaatcaacagtgatacatgattattaactaaagtccatactttattcagaattacttgttttttccctaatgtctttt

SEQ ID NO: 723972 - DNA, 1370 bp, Homo sapiens
tccctctgataagccaaacggcatcgtcatagtcaccatctcttcaatgtggtaaaactatcatcctcaaaacaattacttcaagaattcagaaacgactgctcagaaaacactggaaataaacttttatattttgcaacactgagcatttaatttattttactttactttttaaagagttggcatcttgctttgttgcccaggctggagtgcagtggcccaatcatggctcactacagtctcaaactccggggctcaagtgatcctcctggcttagcctcatgagcaactgggactacagatgcgtgccactatgcccagctaatttttgaaaaaaattcttttagagacagggttttgctatgttatccaggctggtcttgaactgctggcctcaagcaatcctcctgcctcagcctccagagttttggggagtacatgaacgagccaccatgcccagccaacactgaacatttataaaagcaaagaaattaagaagttctcgggaacgaaaactgatttttaaaaattcaatttatgttaatctgcgaataaacacgctactagatttgagttctgagtaatcagaaaaatgtagttatttctgttaagtagaattcaatgaaggatataccttcggaaaagatcagatcactttatatttacaaaactgatttcataatgtcttcaacagagaaaatttactataacatttcagtcagcttgtaaaataaaaacatatgtatatcaaggcacaagcaaaaaaacctgttctaacacaactttttgtgtgtataattagtgtgtaattctacacactacacagcccatcacagggggaatgtgttcataaaactgcaaccatattgtatcagtaacaacttttccccagaaagaaaaatgtgggtatccttgaagctgggaagtgaacaaactacaggttaaaacagaatgtaccaaatttaatatttccacatttctaagcacatttttttccccagctgaaaactgcttcattttctattgactagaagcagctgatgagcggcgattcaagcagaggacacacactgacttccaaatgcttgaatggcggctctcaaaccttttgtctcaagacacttttacaagttgagaacaccaaagagcttttgtttatgtggaatgtattgctattttcaaaattctaagtatgtattaaaaataaacctattaatacattaatagtatctttaaatgaaagttatttctraaacaaacaaaaatgaacaggaagagtggccctgttgtacatttttgcaaatttctggcataaccgaagacagctccatgttcatgtctacttctgccctcaatctgttcccatagag

SEQ ID NO: 723973 - DNA, 1317 bp, Homo sapiens
ctctcttttgataaagaaactccagaaatggaagttctggaataaaaaggacacttttatttgtttattttcttgtctctatttgggtctttttaaaaattcagatagccaaatgagaactcaagctatatccaactcacaatgtgatcactcacataaagcaatctcaaaagaaacttccactgcttcagagaccaagggttccttggaccgatggcatgaacagagatatggtcacttggaatgtcttaagatgacaaaggttataaagccaatctaaacctggatatatctgactttgttttagccttcattggtacttgtttaaaggcaatgacacaatctgcttatgtmataattactatcagcattaatgatgtgtctgtcattccaagaccaaaagaaagaatgtttgaaagagagagaaaaatcaaaggatgtttataatgagaaaattatatgtcgaaggggaaggcagtaattcttgacaatattataagaaaattcttaaaatagcaccaatttttcttgttaacagcattggaaatgagagagcagcagtattttggtgagtatgatatttttatgtaaataacaagttgccaagaagataactaggaaattgtagactttagaaattaggttcatcagccatttgtacctatcctgccccaggaagaaagccttgtctgaactcttcaaaaaattgaatggagccaagataagccattcttattatgtgttcatattttttaactgaactcatgtaaatttctttagaggaagtaaaagtatttgtaggagattgcagatcaaattctggctccgtacctcactagatatgtgaccttagacaaggtctttgagctttctgagcctcagcatcctcataaaatggagaaaataatatttacttcctaggattggtggaaagattagacaaagcacttaatatagtgcctaccatatagttggcattcaaacatacaacatgcttattgcaactatgattcatcacccctcacaaaccctctcctactcccccacacatgccctgtcttaggtttcctgtttcacgcccctttcaacacccttcaaaagatgcatggtatgactgcgaagacatgaaactgaatttttaacatacaccaaaacctctctaccaaccagcatgtgcgttggattatttttttcctccatgcagtcgcatgtgaaggtgcacacttactccaaatgggtggaccatttatcaaaccattcttgaaacttcagtctgggaattgccttcagttcagttcaaccattctctcaggaaaa

SEQ ID NO: 723974 - DNA, 556 bp, Homo sapiens
ttttttttagttgcccataatatgcaaaccatttcagaacccagagatttttggtgagtgaattaacatgtagtttgtatttttacatggaaactatatgtataaatggttttcaaccagggtaaattttggttccccagggacatttgcaatgcctggtgacatttttggttgttacaattggagggtacctagtgatatcaggtgggtagagcccaggaatgctgctaaacatcctgtagtgcatgggacagtcccggcaataaagaattatctgacccaaaatgttaatgcagagattggaaaaaccctcatgacataatatcgagtacgcactaactgccaggttgtgctggaggctgcgggtacatgggtagaaagttatgatcttactggttaggaaagttacatttcattgtgaaacagaaagatctagattttttaaakgataatttaaatgataatgagattttaaaaatgatatgatattaacatataataatgtaatataattgttatgttaatataatcacattttgttataagaatatataat

SEQ ID NO: 723975 - DNA, 597 bp, Homo sapiens
tatgcacccctctggtgaacctaagccttagaaagtcttgggaatagaaacccatgtcccaccagtttatttagctggagcttagaaggagaattgattgatgttttgtcatgttgaggggtgaagccggctgcacttctgggtcaggtggggacttggagaacttttccgtctagctgaaggattgtaaacgcaccaatcaacgctctgtgtctagctaaatgtttgtaaatacaccaatcagcactctgtaaaaacgcaccaatcagcgttctgtaaaatggaccaatcagcactctgtaaaatggaccaatcagcagaacgtgggcagggccaaataagggaataaaagctggccaccagagacagcagcagtaatccactggggtacgcttcygcgctgtggagagtatgttcttttgctcttcacagtaaatcttgctaatgctcactttttgggtccacactacttttatgaactgtaacactcactgcgaaggtctttagcttaactcctgaagccagcaagaccacgaatcctctgggaggcatgaacaactcctgacccgccaccttaaagagctgtaacactcactg

SEQ ID NO: 723976 - DNA, 1678 bp, Homo sapiens
gcctctttttctatacaaaaaattaataattacctagtttatatagccagttaactgtgaactaaaactaatttatctgactccaaataaaatctcatacacttctaaaaaagctaaaggctattgtaaaaatctataaaatacaaaaacaatggaagaaaacaatagaatgaaaaaccacataacccgtgttcctttctcaagtctcaaaatagtgctataatgtgcctcccttgtttctcttcgtgtctctttgcatcttacagagatatttgaaaggtcttatataccttttctcatccagttatctctaatctctcccacaaaggtaactactatcttaaatttagtgtttatcatcagcagacatatttttatacctttacatttggtaattttaaaacatgaatcacataaatatatgtttttaaaatgtatacacatggtatcctaccactctactttatattatgattcatccaagtaagatttttccaatttacacagcataaatttattcattttacatgctgcataatattcctttgagcaaatttatttattgttctattaatgtaaatttagatgttggcaattttcactattataaaatggctacaaatgaatactcttctacctgatctgaagctgtttctttacattatatttgtatatccagttttaaactttctgaatcataaggcacaggctatttcagtttctctagaaatggccaaattgctgtctcatttggcattaccaactagcactagcacccaatgatcatattatgtttttttctttttgagatggagtctcactctgttgcccaggctggagtgcagtggcgcaatctcggctcactgcagactgcatcctctgcctcccaggttcaaacgattcttttgcctcagtctcctgagaagctgtgataacacgcatgcgccaccacacccagctaatttttgtatttttagtagagatggggtttcaccatgttggcgaggctggtcttgaactcctgaccttaggtgatccgcccgccttggtgtcctaaagcgctggagttacaggcatgagccaccatgcccggcctcatattatgttctttataccatcatttaaacataattcaaagaagtacatgattgtgttttaacactctaggacactatatgaacttttaaatattccttacaaatcagttcgttcttcttcttttgcagagcagaaagatatcgagggtaaattaagacaattacaagaacttacaaaatatcagggtttcacatctattgaaaagccacataaatgtagaatattttctgggtatattggaagggaaatgaaaccaaatcttcttctttgttacagttatttttattacttcttgtcatttagtagttttgtgtatttttgcacaatgtaaggtaattcaaaaatagaatatgaaatgaaagtatatactttccatacaagtctatgtaaaatttmtatatattaaagcactgagaaattattaaaacatgtttgcatttaacctgtacttaatattcaactctgtaactgaaagttaagttagtaaaaattttattttcacatataaagcataattgtaaatttttcctcccatgtttctctctttttatgatatgtttttcaaaatgagtacttgagg

SEQ ID NO: 723977 - DNA, 419 bp, Homo sapiens
ggcctttttccctccacttctgctgttttatttctgtaaatgaaagctacagctggaatattgttttactgcaaatctcacaccagcactgtcagttgtgatgtgacaccagagattcttatctgtaggttgggttggaattattaaacattctcacattgtgcaaagtgttggggatgaacagcagtgcagtgaggtgcatccaacacttctgtctttcccacctgatccttgaaatatgactcttttaaagggctaatgttcactttctatagctttatatagaaaagtgacagtactcaagaagtaacatgaactgaaaattatagtaacttcccatccctccatcttaatgcatgckttcaaaagcagtcctaatggtaaacctcatttgaaaagcaaacagttggccatttgta

SEQ ID NO: 723978 - DNA, 639 bp, Homo sapiens
acaccctttcccactttggtccagtctccctggaggatgctgtgagttccagcatggtcctttgagcaagctgagacatcagagaagccactgccacagactgaattatgtcttccatagttcctacctcgaagccttaacgctccatgtggctgtatttggagacaggtccttcaaggaggcaattacggctaaatgaagttataaggatggggctctgagccaataggattagtaagaggcacaagagagagtgagcatgctctgtctctgtctccctccctccccttcctttccctcctccctcttcccccagctctccctgccctctccccatcttctcctccctcaccaccctctccctcacagaagagctcatgtgagcatacagcaagacgacagccactacgagccaagaggagaggtctcagagtgaaagctgcsttgctggcatcctaaacttccagcctccagaactatgagaaatcgatttctggtgttcaagtcatccagtctctggtatcttgttgtggaaacccgagcagtctaacacaccaacctccaacacacccagctctagaggctcctgctgccacagggtgagctggttaacactgggaggggattgggggaagatga

SEQ ID NO: 723979 - DNA, 639 bp, Homo sapiens
acaccctttcccactttggtccagtctccctggaggatgctgtgagttccagcatggtcctttgagcaagctgagacatcagagaagccactgccacagactgaattatgtcttccatagttcctacctcgaagccttaacgctccatgtggctgtatttggagacaggtccttcaaggaggcaattacggctaaatgaagttataaggatggggctctgagccaataggattagtaagaggcacaagagagagtgagcatgctctgtctctgtctccctccctccccttcctttccctcctccctcttcccccagctctccctgccctctccccatcttctcctccctcaccaccctctccctcacagaagagctcatgtgagcatacagcaagacgacagccactacgagccaagaggagaggtctcagagtgaaagctgccttgctggcatcctaaacttccagcctccagaactatgagaaatcgatttctggtgttcaagtcatccagtctctggtatcttgttrtggaaacccgagcagtctaacacaccaacctccaacacacccagctctagaggctcctgctgccacagggtgagctggttaacactgggaggggattgggggaagatga

SEQ ID NO: 723980 - DNA, 1299 bp, Homo sapiens
atattaaatgatgtttgtaaatgaggtcaaggtattttcccatgtggtagaattggggttccagctccaatccttgggttccagaaccacatcctaactgtaatgctttccagcctcctagaatatgccattttccagttttaaaagctgtgaagcctagatgtcaatgtaaaacatttttatgattattaataatgccactagatagagggcctttcaagaggccatgatttgggcctgttaggagctgcttttatctaattaatggtggtacatcaggccagatcaaagcagaggggacagcatcacaggacactggagaggacagctcctttctaccccagctccttttcagcctggggtgaggtgagggatctgcacagggaaaggaaccaaggagaacctctcagaacaggtgacacccacgctgggattggagagacaggtatgattttgacttttcagaaatcatgagagactccacaaatcagtatgctttatctcaaccacatccagacctcggacaaatgaggacaccctgattgactctggttacttaaaggtgtgacgtgcttgattcaggcaaatgtagccagcccacagagacagcaggtgagaaatgattgacagctgaaacccatggatggggagttttaccagctgaattgccaggtcctaaatccaaattcccttctgtcttattaactactacctaggcccgactgttttttgtttttttktttttttgagacagagtcttgatctgtcgcccaggctggagtgcagtggcacgatctcagggctcactgcaacctctgcctcctgggttcaagagattctcctgtctcagcctcccgagtagctgggataacaggcgcatggcaccacacccagctaatttttgtattttttgtagagaaggagttttgccatgttggccaggctggtctcgaactcctgacctcaggtgatccacctgcctcggcctcccaaagtgctgggattacaggcgtgagccaatgcgcctggccaggttcatgctttctgctcctggaaatgcagccaaccctgacagagtccatgcattaggcatcttctgggcagtgcacttgctcttgcactggatgtgcatctatggctgggatgattgcaacagccccccagctggtctccctatgccagacctttgcgcaccctccttctttactctccacataacggccaggggattctgctaaaatgtcagacagagcctgtcattcctttatacaaagtgctccagtggccccagctcactca

SEQ ID NO: 723981 - DNA, 600 bp, Homo sapiens
ttgtttctgatcaagagttgcagcactgggataattcagctgttttccaagatactgtggttgtggtggtttagtccagttcaaagttcaggcggccgggtgcagtggctcacacctgtcatcccagcactttgggaggctgaggcgggaggatcactggaggccaggaattcgagaccaacctggctaacatggtgaaaccctgtctctactaaaaatacaaaaattagtcgggtgtggtggtgggtgcctgttatcccagctacttgggaggctgaggcaggagaatagcttgaactcggaaggtggaggttgcagtgaggygagatcgcaccattgcactccagcctgggtgacaagcgcgagactccgtctcaaaaaaaaaaaaaaaagttcaagaaagttcctgttttacaaggttgcaggttgtgcaggtagtactttttcgagtgacttcccaactgcattatacatctctgaaccagaatgacatcattttgtagatcacatttcacattcccgtttcgattaagatctgatgtgaggcagcatcactgatcaattattgattggtaagctacagatttgttattagtttcc

SEQ ID NO: 723982 - DNA, 565 bp, Homo sapiens
tttttttttttttttgagacggagtcccgctctgtcgcccgggcgaagtgcagtggcgcgatctcggctccctgcaagctccgcctcccgggttcacgccattcccgggcctgggaccacaggcgccgccaccacgcccggctartatctttttttatttttattttcaatagagacggggtttcaccgtgttagccaggacggtctcgatctcccgacctcgtgatccgcccgcctcggcctcccaaagtgccgggatcacaggcgtgagccaccgcgccgggcccagcttctgattttatgcagctggcgggatcttgttcttggtcctttaaggcgaccggagggattgcagttttaaaaactcgccagcagaggtcgccttctgacggatttgaccaaaaaatccattccggtgggaaaggggaacctgcgcctgcgattctctctctctccccctctctccctctctctttctctccccccctctctctctctccctccctccctctctcctcctactcctccctccctccctctctctgtctctccctccctccctccc

SEQ ID NO: 723983 - DNA, 1073 bp, Homo sapiens
caattcataaggcactatcaatgtaattagaacgttggactttgaaattaattgaatatttatacagaaatgagttttgtgtttgtgccagcaatcttcacctacctatccatgtgccaaaaattgttttctttcctctttcctctctcccttcctcactcagtcgttggtttcctcctccttttcttcctgcctgcctccttttgtgcactgtctccactcttcctttccttcattctttcctttctctctgctttttatttcttccttccttttcctctttctatactcccttccttttctgtccccttccttccttctctcttgccttctttctttctttcttgtctctccctcttctcatctttactccctctgtctccccgtcttgctccaccttccccacctcaccttccagcctctcagtagccacttggtgatggtagggaggatgaaaaggtattccttgttttaccacatttactcagataattcacagcatggktccagcatgtctaatttattcttttttatgagctgaatataatctttgagaaatagaaaaatagattgagtgtggccaaggatcattcaacttctaacattctcaaatgtagactgaattatgtcttctgtttgttagaattaaggaaaaaaattcatgtttcgagtaccttttctgttaatctactttcacattttacatatttagcagttttaggctaattaacaacagggttgtgtatatgtaattttgaagttgtaattctgaaacatattaggacttatctttgttaattataaaatttcagctggatgctagacactgtcatttaatcaatttgcgatgtatactttgtattggtatccacttatattaaggcaagtgttttaagtaaatcggtatactagttcaatttgacttcagtttcatcaattttatcagttgattgataatctgatttaatcaatgtcttctttcttctgtataactcacctcaggatttagaactagctttgttattggaagtccaaaattaatctacatttcaataagagaatgagaaagagca

SEQ ID NO: 723984 - DNA, 673 bp, Homo sapiens
ctgtgatgagtttgcattttttaatgattatttcatgaaaatctttctgccctctggactgcaagcttgagaagaccaagtttcatgtcagcttttgattttcattgccttaccagcacccaacctaggacctggtacataaaatatgttcaatatattttcaacaaatgtgtaagtataggtgtgtgtgtattaatatgtgtgcatgcatgtatatttataaagggaaactttgaatttttagagcttaaatagattactatcaatatctaaaaaggttatcatttttaattcaaatttcatattctatttttacttattgctttcttttagtgcttacatagtcgaattataccagaggcatctgtttaaaaaaagtcatayggagaaaaaacagagaactcttgctttacattatcatgatttatctgacagcttatagtattggtggcacttttctgtagaaagttatcgctaggcagttgctttaataaaacagagatttttgagttaaaatgggtaatatcagaccataaaagacaatcctttacaatcctgccttattcagtagaagtcacattcgttagtgttgagcaatttgaggacttaggtacttacaaatatatatatatatccatcccctaaaacaccatgtccaaatttttgtttcatg

SEQ ID NO: 723985 - DNA, 1037 bp, Homo sapiens
aaggattctattttagacttttatatatactattctaattcatccattaaaaatttaggcctatatcgaaacctgtaaatctcttaaataattattcaaccagaaaaaaaagttaaatgcaattaaactttgccatatgtgtatgatatgcctaaactaaatggtaataaaaccatccctggttttcattagttagatatgtgtactctcagggataaaagaaagaaataagatcattttgcagcctttctttgaatccagggcagccatccaagaggccaaaaacgtaacgcctggaaaaaataaattccttttaatcttgtggattaatcaggtagtgcaaattttttttttttttttttttttttttttttttgagatggagtttcactgttgttgcccaggctggagtgcaatggcaggatctcagctcactgcaacctccgcctcccaggttcatgcgattctcctgcctcagcttcctgagtagctgagattacaggaagtagccaccatgcctggctaatttttgtatttttagtagaagcgaggtttcactatgttagccaggttgktctcgaactcctgacctcaggtgatcctcctgagttggcctcccaaagtgctgggattacaggtgtgagccactgcacccggccaggtcctgcaaattctgatgcaaacttataaaccacccaccttgatttacattaggaatataactgtatttaccttcccaacattacataaatactatgatgagaaatcaaaattaaagtgctcaaaattgaaagaaaaaatgtagttttgaaataggaaaaccatataaaaatgaaatttagattgcattttctattagaaaaatgtaaatatgtaaatgattacttaggatgctaaaatatgcttttattcacttatatgcaaacaaacctaaacaacatatctaatatgtaaataataaaaccaaaattatcttctttatttcaattggcaacttttttctccttaagtgcatattttatataaacacttcttat

SEQ ID NO: 723986 - DNA, 1310 bp, Homo sapiens
tcctccaatctgaaatggcacagacactgaagagatagaattaaaatgtctaaaattatgaatgttatccataggttgcctatactagtcaatcaaattctggaagatggaaatgactagataaatccttccccttgctcccatcttgaggattaatttatgggtaagaggtccatagaggcttgttaataggaaatcagacttttacagctatatgctaacttttggcaatgatagacagttaaacagaatacttacctgamtgaatcagtttggcagaaacatgcacaggatttgaaaattttatgattccaaaagcatatctgaacatatgccaattgataacaaatattagatgatccaagaactatttggtgaaataatgaaggtagtttgtatagaaagcacctgtgcttatagagttcataaaagtttttcaaaatgataagaggaaataaaactcttgtaattaactagaaagatataatgtattgatctgtaaattaaagaattttaaataatgagtgttttctctcttcactcttgagcctgtttctttcctcaagaaaattttgattcctaaagactaaagtggaagtgtttattatgtatgcataataaatatctagaaaataataaatatctaaaaaaagacaaatcaacatctgacatgaactttgtctttccaaagaccatagaatgggctatgagtgaatatctttacaaagacaaacttatcattagaacatttttggttgtctaacaggcaggaaattgttaaaaaaaaatcttgttgcagtaatggagaaaaattagatgttcataggagctcccagtgaggataatcacatctgaatgcatccttgaaaataaacacaactcaacattttagtgttctattatttaaccaattggagtatgaatggatatgtaacaaagcttcaataatgtgtttcctcccagtaattgcgtttctttgtaaatgtctgtcctttgagctaactgtgtcttgaaatctcctgacttcataattctcaaaatcaggtgtctgagatggtactacaacaggctacttgagataagagtgaccatatttaatgatattgaccagtcaactaaacaaaataattattttgatcaatctttaccaactaactagcaaaatttaccttactatgacaaattctaatgttttacataggaaacaaaatactaatggctttacctatatcatgcccaaccaggaaatttaatttgattagtgttttgcatatactaaaatatttctatctggatacatgcaaggctcc

SEQ ID NO: 723987 - DNA, 1950 bp, Homo sapiens
agacaggagtatatcattctgacactcttttgaggcacatgtttattcaatgtccaccctctcacaagcagatatttaataattaaaaaaagaaaatctgcagcttgattatatgcttagccaagaaattcttttgcagttctaaggaaaatctccagcaaacccaattactctcccagcaatgcacttcaaaggagagcagaatgcatttcttgtacagaattcctggatatgtttgatcattagttagggcaagtagtttgacttgaggctatttactcagcaggaataaaaagtacagcattgcttcaaccaagaggagtgccccataccttccccaagcagaatttaataatttgatctgtcagaggaggtacagaggttggctatagaaatgagtcacgaccagtcagatttggctgacttgtgggccattaaaaatgttccttcccccaaacggcattttttaggaataataataacagaaacagttggcaccatgtaattgaccaagaacctgagaatttcacagcagtacttatcactgaaacagtttttgtttttttgagtctaagccaaatccacacttgagtatttttttaatttatccaggtgttctatggctaatatttatttcatctagcaagtgccacaaagtatttttgatgtagtcaaaaaaagtatttctgatgtagtttaaaaaagtatttttggtgtagtcaagaatataacatgatattattagactcctaattacaaatatttggtagagactatcagtttaagaaaaaattgcattaaaatgtcaacttttttctttttttgagacggagtctcgcactgcacactgtcacctgggctggagtgcagtgacgatctcggctcactgcaacctccacctcctgcattcaagtgattctcatgcctcagcctcctgagtagctggagttacaggcgcacgccaccatgcctggctaattttttgtatttttagtaaagatggggtttcaccatgttggtcaggctggaagttttttcgaaaactaaatatatatttcattatataaggtasactttacactttttgggaggaaaatgcacatcaccttttaattttttttttgagacggagtctccctctctcacccaggctggagtacagtggcacgatctcagctcaatgcaagctctgcctcccgggttcacgccactctcctgcctcagcctcctgagtagctgggaccacaggcgcccgccaccacgcctggctaattttttatatttttagtagagacagggttttgccgtgttagccaggatggtcttgatctcctgaccttgtgatccgcctgtctcggcctcccaaagtgctgggattacaggcgtgagccaccgcatccggccttaatatgtaatttttaagcactttaggttttaattaaattttatttcagttataaaaatgttcattaccatttggcatattcctcagctaaaataattaacaataattaaaattacccatgcttgattttcttatttcaatttttataaaagttatgccttcagtttatagaaaataaagaaacttatgtacacatcgatgctttagacaatatctatttttcaccatgaatatcactgaaagaaacaagtatcttttcatctttagacaaaagaaaaaaaagtactagtgtatcttttattattggttactttaaaaaaagagtaaaactacttctgtaacattaatttttaaaagttaattctcatattctaatgggagtgtaatgagtttttctcacagtgaactctaatgagtttaggaacgtgctgccatatttatggtagagactatgcaaattggactgatgtttatttatgcatttatttcatttgggaatctagttttcgaccttaagtttgctggagaatttgttacaggaaaga

SEQ ID NO: 723988 - DNA, 1802 bp, Homo sapiens
atcctagaaagagacaataaatgtttttacactttaatctttagactgttaaaaattttcacactaatttcctttcacaggcctaaaaatgtacttttccccctctaccattttttcccttatttatatcattttatgttggcctctttcttttcactttcttccattcttttatctctttcatttttctccttctaataactttttatccatactaataatatagatgaagatagtatatgtgtattagttcattttcacacagctgataaagacatacccgagactgggaagtttatataagaaagaggtttaactggacttacagtttcatggggccagggaagcctcacaatcatggtggaaggcaagaaggaccaagtcacatgttatgtggatggcagcaggcaaagagagagcttgtgcagggaaactcccgtttttaaaaccatcagatctcctgagactcactcactatcatgagaaaagcatgggaaagacctgcccccgtgattcagtcatcttccactgagtccctcccataacacgtgggaattatgggagctacaagatgagatttcggtggggacacagagccaaaccatagcagtacacaaaaggtgttgctaaagatttttaaacataaattgacaatacttttaatgacagtgagtcagtgctatttttcaagaataaaaagagaagcaatgccagatttcccccagtgacataaaagagaaaagtagttattccagaaaagattgtattccagtttctggtaaaagaaaaactgactaaaaagtggcttaaacaattttttctctttcttcatataacaagtccaaaggtaggcaatttctggtattactttagcaactccaagacatcagggtcgaggtcagtatgattctcctgacttttccatctagtggtgaagtggttgtttcagcttcagccatcacacccacattcaaggtaggatgaaagaaatcacatttatcaggacagaaaaatggcrctagaaatcccctgcaaatttctatatgagctcactgcctcacccatgctgcagggccaattctagctgcacaaaagactgagcagtatatttttgccactaaaattgccaactgaataataaatcaggtttcccttaaaagaaaatgaaaactgaatatctgatagatgtattactagatatttctatgcaataaattctcccaaaatctagtggtaagaagcaacaaacatttactatcaagcagtttctttttctttttgaaccctttgaccaacatctcatttcccctatttcccagcccctggtaaccaccttttcactctctgcttacttgagtttgagtttttagacttcacatataaatgaaatcatatatttgtctttctctgtctaatttctttcacttagcataatgtcctgcaggttctttcatgttgtcatgttatcacaaatgggaggattttctttattatggccaaataatattctattatgtatacatatataaatggatatagaaaataggatgtgtatatatgtcacatttgcctctttcatcacaatatgcctcaagtgatagagtgactcaccaaagggcttaactcacatctaatatatagttgacttcattgtacagtaagtctgacatcaagtatggtgcctgttttaatttgctagggctgccataataaagtaccacaaactgaatggcttaaagaacagaaaatcattctcacccatattaatgtgcacacagattgaagtgtccttatgtgatgta

SEQ ID NO: 723989 - DNA, 1802 bp, Homo sapiens
atcctagaaagagacaataaatgtttttacactttaatctttagactgttaaaaattttcacactaatttcctttcacaggcctaaaaatgtacttttccccctctaccattttttcccttatttatatcattttatgttggcctctttcttttcactttcttccattcttttatctctttcatttttctccttctaataactttttatccatactaataatatagatgaagatagtatatgtgtattagttcattttcacacagctgataaagacatacccgagactgggaagtttatataagaaagaggtttaactggacttacagtttcatggggccagggaagcctcacaatcatggtggaaggcaagaaggaccaagtcacatgttatgtggatggcagcaggcaaagagagagcttgtgcagggaaactcccgtttttaaaaccatcagatctcctgagactcactcactatcatgagaaaagcatgggaaagacctgcccccgtgattcagtcatcttccactgagtccctcccataacacgtgggaattatgggagctacaagatgagatttcggtggggacacagagccaaaccatagcagtacacaaaaggtgttgctaaagatttttaaacataaattgacaatacttttaatgacagtgagtcagtgctatttttcaagaataaaaagagaagcaatgccagatttcccccagtgacataaaagagaaaagtagttattccagaaaagattgtattccagtttctggtaaaagaaaaactgactaaaaagtggcttaaacaattttttctctttcttcatataacaagtccaaaggtaggcaatttctggtattactttagcaactccaagacatcagggtcgaggtcagtatgattctcctgacttttccatctagtggtgaagtggttgtttcagcttcagccatcacacccacattcaaggtaggatgaaagaaatcacatttatcaggacagaaaaatggcgctagaaatcccctgcaaatttctatatgagytcactgcctcacccatgctgcagggccaattctagctgcacaaaagactgagcagtatatttttgccactaaaattgccaactgaataataaatcaggtttcccttaaaagaaaatgaaaactgaatatctgatagatgtattactagatatttctatgcaataaattctcccaaaatctagtggtaagaagcaacaaacatttactatcaagcagtttctttttctttttgaaccctttgaccaacatctcatttcccctatttcccagcccctggtaaccaccttttcactctctgcttacttgagtttgagtttttagacttcacatataaatgaaatcatatatttgtctttctctgtctaatttctttcacttagcataatgtcctgcaggttctttcatgttgtcatgttatcacaaatgggaggattttctttattatggccaaataatattctattatgtatacatatataaatggatatagaaaataggatgtgtatatatgtcacatttgcctctttcatcacaatatgcctcaagtgatagagtgactcaccaaagggcttaactcacatctaatatatagttgacttcattgtacagtaagtctgacatcaagtatggtgcctgttttaatttgctagggctgccataataaagtaccacaaactgaatggcttaaagaacagaaaatcattctcacccatattaatgtgcacacagattgaagtgtccttatgtgatgta

SEQ ID NO: 723990 - DNA, 1655 bp, Homo sapiens
ttgctctgttgcccaggctggagtgcagtggcacgatctcggcttactgcaacctccgcctcctaggttcaagtgattctcctgcctcagcctcccgagtagctgggactacaggcatgtgccaccacgcccagctaattttttgtatttttttagtagggacagggtttcactgtgttagccaggatggtctcaatctcctgacctcatgatctgcccgyctcagcctcccaaagtgctaggattacaggcgtgagccaccgcacccagcttcttcatttgaattcttataaaactctttccctatttatcataccccctgactattcagaatccatgatttttcacagattcatattcttaatcaactctttgcacatattacctcttctcaatataagactgtcagtctcttaaagccagaaataatcctttatctttttatttgcattatctatttccatgcagtaaagaggaacaaactctctcaccttgaattaaactttgaaggagagttaatatttaatcaggaatgaatttctaccctttttggcattcatattataatatattttagcagttaattacattgtggcatttatttatttgccttttaatttaggtattcttctgatcttttaaaaagtaattttcagtactttacagcaggggtcccaatccctgagccatggactgggaccagcctgtggcctattaggaaccaggctgcacagaacataacacaaccaacaaaacattggtgtttttataaaaagtaaccaatgattctgcttttctagaatagtagatgacgcagatgcatcttggacatctgaagcaaatgaattacctggaagaatacgaatatttcggttagattctaaaggagtgccatccttaaaccaggtgatggtagctggaggatatgaataagcttcacagaccaaagatgtagggctgttaaggatgacagtgacatcttcagggttgccatcactacctacaccagcaattgtaggagatactgaaaaagatgaaaatttgttgaagaaatatatgtagaaatttgtatatttgtgcatttctaaatttccattatatgtatttgtataatttcattccctagcagttacagaaaacaaattattattattattattattttacacaaaagagtgatcccttaaaaaactcatagggtaatggaggagatgacacataaaaaggaaccataacacataaaaaaaccacaatgtagtaagggcaataatgggaatgctggtgcaaggtaaatggaggttttttggaaatgagttagcatccagtccagtttgaggtgtttagtgtgaagggtctcattagagaaggcctcttaaaggaagaggatttaaagtgagccttaaacgatcagtggtagttagcaggtgaaagcagagactagtaagagggaacatgttgggagcatggtagtattaaattgtaagcaatgaggggcaagcagggtatatcgggaggatgaactcaagtggatcaatattggaagcaaggatagctgagacaggtacatttgttttataaaatataacgaggaactgaactagagcattaaaggaaggtataaagtggaaggagcaagtaaagaaagatttagggca

SEQ ID NO: 723991 - DNA, 1655 bp, Homo sapiens
ttgctctgttgcccaggctggagtgcagtggcacgatctcggcttactgcaacctccgcctcctaggttcaagtgattctcctgcctcagcctcccgagtagctgggactacaggcatgtgccaccacgcccagctaattttttgtatttttttagtagggacagggtttcactgtgttagccaggatggtctcaatctcctgacctcatgatctgcccgcctcagcctcccaaagtgctaggattacaggcgtgagccaccgcacccagcttcttcatttgaattcttataaaactcwttccctatttatcataccccctgactattcagaatccatgatttttcacagattcatattcttaatcaactctttgcacatattacctcttctcaatataagactgtcagtctcttaaagccagaaataatcctttatctttttatttgcattatctatttccatgcagtaaagaggaacaaactctctcaccttgaattaaactttgaaggagagttaatatttaatcaggaatgaatttctaccctttttggcattcatattataatatattttagcagttaattacattgtggcatttatttatttgccttttaatttaggtattcttctgatcttttaaaaagtaattttcagtactttacagcaggggtcccaatccctgagccatggactgggaccagcctgtggcctattaggaaccaggctgcacagaacataacacaaccaacaaaacattggtgtttttataaaaagtaaccaatgattctgcttttctagaatagtagatgacgcagatgcatcttggacatctgaagcaaatgaattacctggaagaatacgaatatttcggttagattctaaaggagtgccatccttaaaccaggtgatggtagctggaggatatgaataagcttcacagaccaaagatgtagggctgttaaggatgacagtgacatcttcagggttgccatcactacctacaccagcaattgtaggagatactgaaaaagatgaaaatttgttgaagaaatatatgtagaaatttgtatatttgtgcatttctaaatttccattatatgtatttgtataatttcattccctagcagttacagaaaacaaattattattattattattattttacacaaaagagtgatcccttaaaaaactcatagggtaatggaggagatgacacataaaaaggaaccataacacataaaaaaaccacaatgtagtaagggcaataatgggaatgctggtgcaaggtaaatggaggttttttggaaatgagttagcatccagtccagtttgaggtgtttagtgtgaagggtctcattagagaaggcctcttaaaggaagaggatttaaagtgagccttaaacgatcagtggtagttagcaggtgaaagcagagactagtaagagggaacatgttgggagcatggtagtattaaattgtaagcaatgaggggcaagcagggtatatcgggaggatgaactcaagtggatcaatattggaagcaaggatagctgagacaggtacatttgttttataaaatataacgaggaactgaactagagcattaaaggaaggtataaagtggaaggagcaagtaaagaaagatttagggca

SEQ ID NO: 723992 - DNA, 600 bp, Homo sapiens
aaaattagaaaccatctcagatcaaattagattcctgagaaaattgtgcccattcatttgattaatcattgttcattcagtttagaagtaatgatacatggtaattttagtccagatattctgagataccagcaatcgcatgaacacgctacactcgtgatgtatttaacacgggagtctgtcatgccttaccgcattccttggggcctctaagagggaaagtttcacccagaactaggggccatgagtgcatagggggagcccccactaaagatggtgggtggttagaataaccaagtttcacctgcaaatccctgcagtatctaaaccatagaaaccatctttctgycttctgtgagctgggaaatacgagctgtgtgctctgggtgaaagccatttgggctgttagcaatgtctgggaaactttttctgcattagttgtatcaggaagtcagtagctttttcctttccaatgactcaccgagcatattttatcagacgtatgacttacctacagggggacttaaaattttcaccatgctttagggaattgtctgagtcttagaacattggagcaaatgatccactttctatgagagg

SEQ ID NO: 723993 - DNA, 551 bp, Homo sapiens
cattgctataacaaactacctgagactgggtaatttataaagaatagaggtttaattgactcacagttcctcaggctgtacaggaagcatggctggggaggcctcaggaaacttacaatagtggaaggcagagaggaagcaggcatgtgctacatcacttgagcaggaggaagagagagtgaagggggaggtgctacacatttttgaacaaccagatcttgtgtgatctcactcaccatcatgggaacagcaaaggggaaatcctccccatgatccagtgacctcccaccaggccgctcctccaacactggggattccaattccacctgagatctgggcagggacacacattcaaaccatatcaccyggtaagtaggaaatatgctagtgtttgacagtatgactatagtgtgcagagggactttcagtcattaaaatcatgaaggagtctataccagaaagtgtaacttaaattttttataatttgcattttaagaaattaaatgcctggagaagaaaaaaagcagttttcttcaatatattagagtgat

SEQ ID NO: 723994 - DNA, 604 bp, Homo sapiens
cctcaaagtctaaactctttatttttcttttttttcttccttccttccttccttccttccttccttccttccttccttccttccctctctgtctctttctttttctttttgagacagagtctcactgtgtcgctcaggctggaggtcaatggtgcaataacagctcactgcagccttgacctccggggttcagcagatcctcccacctcagcgtcccagtatagggactacagatctgcaccaccctgtccagctaacagcccatttttaaaattttttgcagagatgggggaggggggtcttactatattgcccaggctggtcttgaatttccggcctccagctatcctcctgcctcagcctcccaaagtgctgggatgctaagtgtgagctactaggccagctggatgttctttacataggtctagtttatgtaggtctagttactttaggtaggtctagtttttgaaattgtagcacrcttactcctccccaagcacagcaacatagtgggaaaaaataagaatatttacggcctggagctctgttgtgatgatttatcacacttctgagaatggccagaagaattaagggccaggcctag

SEQ ID NO: 723995 - DNA, 1732 bp, Homo sapiens
ttttgtctgaattgtttaatgtcttgtctcagacagatgatgactcaaagtcaaatgttcacctttaggggacccaaaaggatacaaaagagaatgcatagtaatgattggcctataggcggttgagtggcaaagctagtttaaagaagaaaaatccttcctatctttttttgtagttctgtaagcattatttgaagaaacttggatttccctgtgtgctttaaagtgaagtgcatgttgtgcagtaaagaagcagatctaacctcattgtggaacttgcttgctgtggtgaatcacagaaggaatgatgtgaaggcaacatttatattttcgtgcgtgaaaaattcatatgaatcacagacagaaactcagaagtggccatgtcactctggtttctctgttaaggagctgtggtcctaagcttgctgctgacaggtagcgaattagaaatacatcttcaaattaccaatttttctgctgcatctgctgcattttagactagtaaagggaaggagcagaccaatgattatgccctttcctctctgtggcacccctatttaaggaaaggggatttgaggttgttgtatgggtccttaatgtgggtttaaaaatttttcattccacattagtggtacttgtccaattttttttgatcagctaatgaaatataataactgtttgcatattttactgcctattcgccatagttacctaaactagtggcattgctagaaaatgttgagaattgtcacaataagaaccagtactcagtctttgataaagttcccaaagtatgctttgtaggagggactaattgtccattgtgacatgaacctgaatattagagatagtgtactatagtgaaaaagtactttgggtgaaagactggattcttgccttggctttcttacttgagtatatgatttaatatttttgaccgagagttgctattataccaggggacaataacttcctccttttttctttttgtttcacatttaaacagggtggttgttaagaccagtgagagataaataagctaatgtaaatgttgacacctgctacttgaaagttaagaatgatgttaattgttaaatttttcttagatgtctttactagattgaaatttcctttaattcttaatttgatgagttttttccttcataaatgtgtattgacatgtgtcaaatgcttttactgcatcttttgaaatgatgatatggtttttcttctttattctgttaatggggcattccctgccctgtaggagtgatagttgaatagaaagaaaaacaaagaaatggtaatatctgttgtgattgagggttacaaaagatgcagtgggagtgtagagagaggagtaatgaaatcaacctgataaagttaggaaaactttcagagaaactggaacaagatggagctttggcatttgtgatagagggagggaggggagtggtatatcttgggcagaggacatggccattgtagtgggaatatggggtacatagtggagggtactacctagagatgtgactgtagcgcggggctggggttgtgaaaggagcattacatgctgtgttaaggtttctgtcttgtatgtggttataggaagccaaaaaccaagccaaagagttttgagaaagtgaggaatgtgatgagatttttgtgaaagatctctcctgcagtattatggtgtgggtgttgatgagktgttttaacaaccttacattcc

SEQ ID NO: 723996 - DNA, 803 bp, Homo sapiens
ggagaatggcttgaacccgggaggcggagcttgcagagaaccgagatcgtgccactgcactccagcctgggtgacagagtgagactccgtctcaaaaaaaaaaaaaaatgtgttcctgtctttgcttgttatacagttttgtaaaatcctatctgtttctgtttctctgaagctgaaatcagatctgagagctaataggagaattttgttttgagaactatgcggtccacattattcctgtttagagaccagtgtttgcttaatggcttgggcctgtttttgcaattacycagcattttcctcactaaaaaacctttaatatactcaacaatcattggtaaatgagacctctttttcttttctagctgagacattgcatattcttttaacatttccaacactgatagttttctgtccttgtgtatccttgtagtttctaaaaaaaaaaaaagctaatttgaacatattctcaaagttaataaatactaacaaatgctgaatacaataagattattttttttctattgttttctttttttggggggacagagtctcactttgttgcccaggctggagtgcaatggtgtgatcttggctcactgtcacctccaccccttgggctcaattgatcctcccacctcagcttcctgagcagctgggaccacaagaccaccacgcctggctttttttctttttttcttttcttttttttgtgaagacagggttttgccagttgcccaggctggtcttgaactcttgggctccagtgatctgcccgcctcgacctcctaaagtgttgggat

SEQ ID NO: 723997 - DNA, 964 bp, Homo sapiens
aaaagaaaaaggaatggaccgcaaacacaggcaaaaacatggtagatctcaaaagcagcatgataagacaagaaagactacatgtatgattccactgatacgacattctggaaagacaaaagcatagcaaaagaaagcagatcagcagttcctggggttgggggcaagaattacctctaaaggggcaggatggaatttttcaaactcattgacccgcacagttaaaattagtgagttttagtgaacaagaattacacttcgtaaatctttaaaaaaaaaaaaaaaagacaaatacagacacccagtagagaacagaatgcttgggtaatggacttgtcccttaactgacaagcataatttggtcacgtgttgtatcaggtgaaatttcttggaggcgttactaaatcagattcacacagacatgtaacaaataccatatttaatggcyaattagttcagaacaccgaactgaatcacagttttacatgacactctctacttttcaagcctaattcaaggccttttagggagcacacccagtccttaggaatttggggttacctgcaatttttccttactaaaaagaataactaaaaagctttatttccgaagcttccaaagtgttaggctcagtgctaagtacatattcacatattcttatttatttatgataataccactatgaggcaggttcaatggatactttgtgtgtctgtgtgtgtgtgtatctccagatgaaaatacaccagtgctttctaaattttctgagaatacatatatataccgatatatatgtatttaattattatcaaaatgaagcatgcttactatagaaaggtaaaaagcacataagcagagagagacagagagacagagacagagacagtggcattccctattaagcccaaaccagaagattatcactgttacattttggtgtctagtttaactggatggattcaag

SEQ ID NO: 723998 - DNA, 967 bp, Homo sapiens
tcacttataaagaataaaatacaacttaaaagacctgattaatagaacggcagggatggtcttctgaatatgcaagtgatgctaagcttcaaatatacacattactgtaatgcaggtrgaataaactgcacatgcattgctgttaggcagctaagaaatatttctcttttgtcaactgcaaaaaacgaagtaatcagagtttcttttttttttttttttttttttgagacagagtttcgctcttgttgcccaggatggagtgcagtggtgcaacctctgcctctcaggttcaagggattctcccgcctcagcctcccaagtagctgggattacaggcacccgccactacgcccggctaattttttgtatttttagtagagacagggtttccacatgttgggcaggctggtctcgagctcctgacttcaggtgatccgcctgcctcggcctctcaaagtgctgggattacaggagtgagccaccgcacccagccagtagttggagtttctaaaggtaattttgtaaacccatgaacaatagaaacatgaatgtatcacaaatattcaaacacaaactgagtattaggtgagagactgcatactctgttgccaacactgaattagagtcagctttgcaagggaagtgggaaaagcacccagtttcttgggattagcctaaataaagtttagctactattccatgcattttttgaatacacatacgcactcttatatactcttaacatagttaatcgatttctgcttgaacatgtaatatgtattttttatagtatacatgcaaatactctatatacaaacatatatttgtattatgaatgtgtgtatgtatatgcacatgtgcatgtgtgtgtgtgtatcttctttagctctctctggaagagggaaggtggttaaacataagggtgtcaaagtacttctttgcataagtaagcttagagattaaggca

SEQ ID NO: 723999 - DNA, 967 bp, Homo sapiens
tcacttataaagaataaaatacaacttaaaagacctgattaatagaacggcagggatggtcttctgaatatgcaagtgatgctaagcttcaaatatacacattactgtaatgcaggtggaataaactgcacatgcattgctgttaggcagctaagaaatatttctcttttgtcaactgcaaaaaacgaagtaatcagagtttcttttttttttttttttttttttgagacagagtttcgctcttgttgcccaggatggagtgcagtggtgcaacctctgcctctcaggttcaagggattctcccgcctcagcctcccragtagctgggattacaggcacccgccactacgcccggctaattttttgtatttttagtagagacagggtttccacatgttgggcaggctggtctcgagctcctgacttcaggtgatccgcctgcctcggcctctcaaagtgctgggattacaggagtgagccaccgcacccagccagtagttggagtttctaaaggtaattttgtaaacccatgaacaatagaaacatgaatgtatcacaaatattcaaacacaaactgagtattaggtgagagactgcatactctgttgccaacactgaattagagtcagctttgcaagggaagtgggaaaagcacccagtttcttgggattagcctaaataaagtttagctactattccatgcattttttgaatacacatacgcactcttatatactcttaacatagttaatcgatttctgcttgaacatgtaatatgtattttttatagtatacatgcaaatactctatatacaaacatatatttgtattatgaatgtgtgtatgtatatgcacatgtgcatgtgtgtgtgtgtatcttctttagctctctctggaagagggaaggtggttaaacataagggtgtcaaagtacttctttgcataagtaagcttagagattaaggca

SEQ ID NO: 724000 - DNA, 967 bp, Homo sapiens
tcacttataaagaataaaatacaacttaaaagacctgattaatagaacggcagggatggtcttctgaatatgcaagtgatgctaagcttcaaatatacacattactgtaatgcaggtggaataaactgcacatgcattgctgttaggcagctaagaaatatttctcttttgtcaactgcaaaaaacgaagtaatcagagtttcttttttttttttttttttttttgagacagagtttcgctcttgttgcccaggatggagtgcagtggtgcaacctctgcctctcaggttcaagggattctcccgcctcagcctcccaagtagctgggattacaggcacccgccactacgcccggctaattttttgtatttttagtagagacagggtttccacatgttgggcaggctggtctcgagctcctgacttcaggtgatccgcctgcctcggcctctcaaagtgctgggattacaggagtgagccaccgcacccagccagtagttggagtttctaaaggtaattttgtaaacccatgaacaatagaaacatgaatgtatcacaaatattcaaacacaaactgagtattaggtgagagactgcatactctgytgccaacactgaattagagtcagctttgcaagggaagtgggaaaagcacccagtttcttgggattagcctaaataaagtttagctactattccatgcattttttgaatacacatacgcactcttatatactcttaacatagttaatcgatttctgcttgaacatgtaatatgtattttttatagtatacatgcaaatactctatatacaaacatatatttgtattatgaatgtgtgtatgtatatgcacatgtgcatgtgtgtgtgtgtatcttctttagctctctctggaagagggaaggtggttaaacataagggtgtcaaagtacttctttgcataagtaagcttagagattaaggca

SEQ ID NO: 724001 - DNA, 967 bp, Homo sapiens
tcacttataaagaataaaatacaacttaaaagacctgattaatagaacggcagggatggtcttctgaatatgcaagtgatgctaagcttcaaatatacacattactgtaatgcaggtggaataaactgcacatgcattgctgttaggcagctaagaaatatttctcttttgtcaactgcaaaaaacgaagtaatcagagtttcttttttttttttttttttttttgagacagagtttcgctcttgttgcccaggatggagtgcagtggtgcaacctctgcctctcaggttcaagggattctcccgcctcagcctcccaagtagctgggattacaggcacccgccactacgcccggctaattttttgtatttttagtagagacagggtttccacatgttgggcaggctggtctcgagctcctgacttcaggtgatccgcctgcctcggcctctcaaagtgctgggattacaggagtgagccaccgcacccagccagtagttggagtttctaaaggtaattttgtaaacccatgaacaatagaaacatgaatgtatcacaaatattcaaacacaaactgagtattaggtgagagactgcatactctgttgccaacactgaattagagtcagctttgcaagggaagtgggaaaagcacccagtttcttgggattagcctaaataaagtttagctactattccatgcattttttgaatacacatacgcactcttatatactcttaacatagttaatcgatttctgcttgaacatgtaatatgtattttttatagtatacatgcaaatactctatatacaaacatatatttgtattatgaatgtgtgtatgtatatgcacatgtgcatgtgtgtgtgtgtatcttctttagctctctctggaagagggaaggtggttaaacataagggtgtcaaagtacttctttgcataagyaagcttagagattaaggca

SEQ ID NO: 724002 - DNA, 953 bp, Homo sapiens
tcttttctaaagtatgctccctgaagggggaaaacagccatttttatcacatacctagagcctcatacagtgttttgwccatagtcgagaaaacctaggatacaggcgttttatttgaagacaaatttcaggaaacaccagtgaggaagtggagaaaatgaaacaaggaagaaagagaagttgattaaaacatatgttaatgggcaggttaccactgtgggcaactggagcatgattccactagggaagcagtgaggaactctgtggaatataccttaggattgtcactttgagggacagggaagatggggaaattatccaccaatttctcaaactcatcagttaaaagttgccccaggggtattaaattccaagtaatcccagagtttcctacacataagctgagccagctaacacaatatcagataaattccttaattagaggaatttattccttgtatcaagagacacaagcacttgaggtgggaagctgaaagtatatcaggaacttcccatcctggctgcaagtcagctccaaggaggccaaaaagatttgaagcaaggcattcaatagtgtctattacaggaggtattttcttttcaagatggaaggaaggacctaaataagattagaaaggagagtgagggcattttactaatgtcccactgggaagaaataataagtcagttcactatataaatccagatttaagcatatagaagcctgggaaggaaaatcaaatagacacatcacacttgtgtacacgctgacattttctgtctgctgtcttattgatgatttgattgttttttctcatgcagctacctgctccctgatgatagcaaagccaccaagcacaaaactctggtaataaaaaagagtgttaaccctcagtggaatcatacattcatgttcagtggcatccatccccaggatataaagaatgtttgcc

SEQ ID NO: 724003 - DNA, 953 bp, Homo sapiens
tcttttctaaagtatgctccctgaagggggaaaacagccatttttatcacatacctagagcctcatacagtgttttgaccatagtcgagaaaacctaggatacaggcgttttatttgaagacaaatttcaggaaacaccagtgaggaagtggagaaaatgaaacaaggaagaaagagaagttgattaaaacatatgttaatgggcaggttaccactgtgggcaactggagcatgattccactagggaagcagtgaggaactctgtggaatataccttaggattgtcactttgagggacagggaagatggggaaattatccaccaatttctcaaactcatcagttaaaagttgccccaggggtattaaattccaagtaatcccagagtttcctacacataagctgarccagctaacacaatatcagataaattccttaattagaggaatttattccttgtatcaagagacacaagcacttgaggtgggaagctgaaagtatatcaggaacttcccatcctggctgcaagtcagctccaaggaggccaaaaagatttgaagcaaggcattcaatagtgtctattacaggaggtattttcttttcaagatggaaggaaggacctaaataagattagaaaggagagtgagggcattttactaatgtcccactgggaagaaataataagtcagttcactatataaatccagatttaagcatatagaagcctgggaaggaaaatcaaatagacacatcacacttgtgtacacgctgacattttctgtctgctgtcttattgatgatttgattgttttttctcatgcagctacctgctccctgatgatagcaaagccaccaagcacaaaactctggtaataaaaaagagtgttaaccctcagtggaatcatacattcatgttcagtggcatccatccccaggatataaagaatgtttgcc

SEQ ID NO: 724004 - DNA, 953 bp, Homo sapiens
tcttttctaaagtatgctccctgaagggggaaaacagccatttttatcacatacctagagcctcatacagtgttttgaccatagtcgagaaaacctaggatacaggcgttttatttgaagacaaatttcaggaaacaccagtgaggaagtggagaaaatgaaacaaggaagaaagagaagttgattaaaacatatgttaatgggcaggttaccactgtgggcaactggagcatgattccactagggaagcagtgaggaactctgtggaatataccttaggattgtcactttgagggacagggaagatggggaaattatccaccaatttctcaaactcatcagttaaaagttgccccaggggtattaaattccaagtaatcccagagtttcctacacataagctgagccagctaacacaatatcagataaattccttaattagaggaatttattccttgtatcaagagacacaagcacttgaggtgggaagctgaaagtatatcaggaacttcccatcctggctgcaagtcagctccaaggaggccaaaaagatttgaagcaaggcattcaatagtgtctattacaggaggtrttttcttttcaagatggaaggaaggacctaaataagattagaaaggagagtgagggcattttactaatgtcccactgggaagaaataataagtcagttcactatataaatccagatttaagcatatagaagcctgggaaggaaaatcaaatagacacatcacacttgtgtacacgctgacattttctgtctgctgtcttattgatgatttgattgttttttctcatgcagctacctgctccctgatgatagcaaagccaccaagcacaaaactctggtaataaaaaagagtgttaaccctcagtggaatcatacattcatgttcagtggcatccatccccaggatataaagaatgtttgcc

SEQ ID NO: 724005 - DNA, 1544 bp, Homo sapiens
ttgtttgtactccattttctcttttctgtcctcatgagacttcaaatatatgaatgatcacttcatattatatcatgggtttctcaggctctgttcactatttttataatctttatcattgttattcttcaagttagataatttctgttgatttgccttcaaattcgcacttccttctgcaatatactatctctctctcttaatcccttctattaagttttttaaaaaagtgattttcagttatagaatttcctggttacttttacaggatctgtttctctgccgagatcactgttcactcatcatgaccatttctcacattaaatccctgcgcctattgaaaatagccacgccggagcctatgtagacggttgctgtcttcatatctaaattcctcagcattagttcctcttgatggctttttctttgccgaagggtaattcttgtcatgactaagactatttttattgtactgtggacactgcggtgacatattttaggaggaggagattgtgccctttcaagaagtttccgtgttttgtttttgtttttctagaaggcagatcagttgtaggtattaagctttctttgattttgttacagtaattaaacttcggcatggtccttcatcccagcgtgtggttctcacgctaaggtgtggtccttactgtttgagctaaagtctctctgggttctcagctgaatgcccgagatgttcaagtgaggtttctacactggctgcggcaggccctgagctttccagcagtcgggccctgaaatctcaggttccctcccagccccagcagcagctgtctctgagtcctgcacatctcactccaggcgtgtgccgcccagccttgctctctgctgtcttccgcatttaggctctgctctgcctgggcacctctccccagacctcgggcagaaagctgggtccacagccgactccaggctcccactggcttttctccagaatcatggttctgctgtgccttcagtcccgggtctggaacctggttcgtagttacagggtgaaagggcaactccttcaccagttactctaggatggccaggagcaaaagtgtgtgtattgattcctaacttcctcgctggtaccttttgaaggaaagaagctgagcttttagaaatgtagttgggttaatcttttttcgtttatgtagaagccctcgtttgccatccccaacatctaaatgcytcagcgtcagtttctcctgatagctttttctattgctcaagggtcatattttcctgtttcttagcatagttaattatactttttttttttttttgctagtaatattttcattctactctggacattgtgatgatacgttctaggaagagttatcatatttttgtcccatttaaacaatatgcttgtctgaaattcagaaagacatggtcttatgtttttttctagaagcctttttaaaaattttaaacttcagaagtctgtgatgcatctgaaaatatttgttggacaggagaggggtcaggttcattgctgtttcccactgcccccc

SEQ ID NO: 724006 - DNA, 1916 bp, Homo sapiens
cagctgatcaatatctcctgggcttccttccaacagaagaacacttagaacttttgctgcagccgggggccatgccctggggctgtccttccaaattctcatacctgccaaggacccctggctgctgctaattgaagagcaccaaaggttaatggyggaaggttaacagcagggcctagtgctttggggctgaaagccaagtctcagatgatgaaggctggggagaccttctagacgcttccttttatcagcgtgggtatttatcagttcacctacaagtggggggcaggggtgacttacttcaaccctgtgaactggctttccccgacagccactgctgtaacgacgatgaagttgccctggaacgcgcgtgcgtccacattcattgcaccccttcccagtaaagtggatgaacaggtgtgactgctgcaggacagatgaggatgctggctgagagaggtgcagcggcgagcccagggctggacctgaagccatattctgtgcttatccgtgcctgtcttcccaatgctcgggctaagtctctggattctgaatgatcgccatttgcctgtacttggctttcttgtgatttggggattctgggagttcccacgcctttgcttctctgtgtgcacctgcagcccaatgccagcagccacagcagcaccatagagcagaaagcagagtgccagcaccatggaccagcacccatgcacccgccccctgcccacctggaacactccaggctccctgagcctactccaagcctctgctcagccagtctgtccctttctctgcgtcttcgcctgtgctgagggtccctctgcctgaagtactctgactgcggccctgaccacccccaggctcctctccatctgtctgcacatgccagggccttgtcctccttcagccccggtcacctccagaagcctcagctagcacagccctcccctgcacacggctatcacagccccgtgtgcctgcctcacaacatctccccaaaccccagaggccttttcctggttgtcctggcttccttgaatgtcagttctgctggagctgccagaggcggctggagccctgacttgtctccctgtctcgccactgtgcccgggccctggaagagtccctggtgattccaggcaggcagtctttatctccccaggaacaaggatgaagggatgagcgtggatgtggtagcgtgcacctgctttctgctttattccgggacaatgggaagtggatggcaacctcctcataatggatgcctgtgagcccattgggggccggatggaatctcttccttagatgtgtgccttgggaatgtttgccccaactctgcatgtgtgagacagagagaaggaggggtgggtttaaaatgaaaaattatatatcctacctattaggtcacgagaatatgacaaagaaaagtaaagcagactcaggcatagtgacaggagtactgttttgaatttactgggaaggtgatattttatcaagggttcagttgaggacaggagtgtgacatgaaggtatcttggagatgaagagtccaggtcaggggagtgactcatgcaaaggccctggggtgggagtgtagcagagagatgggagcagagagaggagggctgagtggctgcaagtggctaaaggggcgacagcaaggggatggatgggagaggggctgtggccatggcaagaatggggactctattctgggtgaggggcagccatgaggggccaagccagtgaggcagggtgggacacactttgcaggggttcccctggctgccggctgcatggagagcagtccatgaggcaccatgttgctggcctggccatgggttgctctaacagaggcatgcctgagtgactgcccagatattttacctcttttgattcgatgtgttaattta

SEQ ID NO: 724007 - DNA, 1916 bp, Homo sapiens
cagctgatcaatatctcctgggcttccttccaacagaagaacacttagaacttttgctgcagccgggggccatgccctggggctgtccttccaaattctcatacctgccaaggacccctggctgctgctaattgaagagcaccaaaggttaatggtggaaggttaacagcagggcctagtgctttggggctgaaagccaagtctcagatgatgaaggctggggagaccttctagacgcttccttttatcagcgtgggtatttatcagttcacctacaagtggggggcaggggtgacttacttcaaccctgtgaactggctttccccgacagccactgctgtaacgacgatgaagttgccctggaacgcgcgtgcrtccacattcattgcaccccttcccagtaaagtggatgaacaggtgtgactgctgcaggacagatgaggatgctggctgagagaggtgcagcggcgagcccagggctggacctgaagccatattctgtgcttatccgtgcctgtcttcccaatgctcgggctaagtctctggattctgaatgatcgccatttgcctgtacttggctttcttgtgatttggggattctgggagttcccacgcctttgcttctctgtgtgcacctgcagcccaatgccagcagccacagcagcaccatagagcagaaagcagagtgccagcaccatggaccagcacccatgcacccgccccctgcccacctggaacactccaggctccctgagcctactccaagcctctgctcagccagtctgtccctttctctgcgtcttcgcctgtgctgagggtccctctgcctgaagtactctgactgcggccctgaccacccccaggctcctctccatctgtctgcacatgccagggccttgtcctccttcagccccggtcacctccagaagcctcagctagcacagccctcccctgcacacggctatcacagccccgtgtgcctgcctcacaacatctccccaaaccccagaggccttttcctggttgtcctggcttccttgaatgtcagttctgctggagctgccagaggcggctggagccctgacttgtctccctgtctcgccactgtgcccgggccctggaagagtccctggtgattccaggcaggcagtctttatctccccaggaacaaggatgaagggatgagcgtggatgtggtagcgtgcacctgctttctgctttattccgggacaatgggaagtggatggcaacctcctcataatggatgcctgtgagcccattgggggccggatggaatctcttccttagatgtgtgccttgggaatgtttgccccaactctgcatgtgtgagacagagagaaggaggggtgggtttaaaatgaaaaattatatatcctacctattaggtcacgagaatatgacaaagaaaagtaaagcagactcaggcatagtgacaggagtactgttttgaatttactgggaaggtgatattttatcaagggttcagttgaggacaggagtgtgacatgaaggtatcttggagatgaagagtccaggtcaggggagtgactcatgcaaaggccctggggtgggagtgtagcagagagatgggagcagagagaggagggctgagtggctgcaagtggctaaaggggcgacagcaaggggatggatgggagaggggctgtggccatggcaagaatggggactctattctgggtgaggggcagccatgaggggccaagccagtgaggcagggtgggacacactttgcaggggttcccctggctgccggctgcatggagagcagtccatgaggcaccatgttgctggcctggccatgggttgctctaacagaggcatgcctgagtgactgcccagatattttacctcttttgattcgatgtgttaattta

SEQ ID NO: 724008 - DNA, 1916 bp, Homo sapiens
cagctgatcaatatctcctgggcttccttccaacagaagaacacttagaacttttgctgcagccgggggccatgccctggggctgtccttccaaattctcatacctgccaaggacccctggctgctgctaattgaagagcaccaaaggttaatggtggaaggttaacagcagggcctagtgctttggggctgaaagccaagtctcagatgatgaaggctggggagaccttctagacgcttccttttatcagcgtgggtatttatcagttcacctacaagtggggggcaggggtgacttacttcaaccctgtgaactggctttccccgacagccactgctgtaacgacgatgaagttgccctggaacgcgcgtgcgtccacattcattgcaycccttcccagtaaagtggatgaacaggtgtgactgctgcaggacagatgaggatgctggctgagagaggtgcagcggcgagcccagggctggacctgaagccatattctgtgcttatccgtgcctgtcttcccaatgctcgggctaagtctctggattctgaatgatcgccatttgcctgtacttggctttcttgtgatttggggattctgggagttcccacgcctttgcttctctgtgtgcacctgcagcccaatgccagcagccacagcagcaccatagagcagaaagcagagtgccagcaccatggaccagcacccatgcacccgccccctgcccacctggaacactccaggctccctgagcctactccaagcctctgctcagccagtctgtccctttctctgcgtcttcgcctgtgctgagggtccctctgcctgaagtactctgactgcggccctgaccacccccaggctcctctccatctgtctgcacatgccagggccttgtcctccttcagccccggtcacctccagaagcctcagctagcacagccctcccctgcacacggctatcacagccccgtgtgcctgcctcacaacatctccccaaaccccagaggccttttcctggttgtcctggcttccttgaatgtcagttctgctggagctgccagaggcggctggagccctgacttgtctccctgtctcgccactgtgcccgggccctggaagagtccctggtgattccaggcaggcagtctttatctccccaggaacaaggatgaagggatgagcgtggatgtggtagcgtgcacctgctttctgctttattccgggacaatgggaagtggatggcaacctcctcataatggatgcctgtgagcccattgggggccggatggaatctcttccttagatgtgtgccttgggaatgtttgccccaactctgcatgtgtgagacagagagaaggaggggtgggtttaaaatgaaaaattatatatcctacctattaggtcacgagaatatgacaaagaaaagtaaagcagactcaggcatagtgacaggagtactgttttgaatttactgggaaggtgatattttatcaagggttcagttgaggacaggagtgtgacatgaaggtatcttggagatgaagagtccaggtcaggggagtgactcatgcaaaggccctggggtgggagtgtagcagagagatgggagcagagagaggagggctgagtggctgcaagtggctaaaggggcgacagcaaggggatggatgggagaggggctgtggccatggcaagaatggggactctattctgggtgaggggcagccatgaggggccaagccagtgaggcagggtgggacacactttgcaggggttcccctggctgccggctgcatggagagcagtccatgaggcaccatgttgctggcctggccatgggttgctctaacagaggcatgcctgagtgactgcccagatattttacctcttttgattcgatgtgttaattta

SEQ ID NO: 724009 - DNA, 596 bp, Homo sapiens
aatggcccaaatggccaagttwatgttatttatatatatatacatatttaccacaataaaaaatgtagacaatagaaactatgactgagtgtctccagatgttggatttagcaaaaatttcagagaattatattatattgccattttaaatatagttaagaaactaaaggatacatatatttaaagaattaaaggaaagtgccacaacaatgaatcaatagattctccactccccactatgttgatggccataaggatggtggcccatgtccgtgatacagtttgctgatgctgcagggaacaacatggaccttgtttttctatgattgagtgcgctggcctgtttgttgtctccctgagaaatcagctcaggggcttgcctttgttttacttaactcagaaatttctgagggctggagtggcctcctgaaagtatttaaaggcaaatatactagctacagcctcctgagataagggatgtgaaatcatgcaaacattagacatacagaaaagcctgggaaagaagaggcatggagggagagaagtgatttgaaaggctttcacatgtgccaggaaatctacaaagccacagataa

SEQ ID NO: 724010 - DNA, 1047 bp, Homo sapiens
tctttccacttacggttgctgcaatctcctgcagcatttgtactggttggtatcatttctcaactattgatttcaattaccttatctaggtccttaggacaagaagtgagaaatatgatacccaactctaaagaaagaggttttgaagggaaatgtgctggaatgtggatagagcttttttctgttctaacatgagaatcaggactacctacattcattgatattggtgctgatagtgttattgcattcctatggacattaagaccaccaaggcctgcatatgacttgtactttcaggcctgagaatgcttgtagtttgtcagcggtttgggaatatggttcccctctgatgtgtgtccctacttagccctgtggatttaggctcctcttcttgaaatggtgccatctatctttgatcactgctgtcatttcctaataacccacagcttcagactgtttggctgtgttgctttggagtgctttttttcctgcttaccttgcatgtggttgttccagttcatctcatctgactatataagcagttacttaggaattctgttgtaatctgtctttgcattcctaacctcgtgaaactgaggcatatgcagcatgcttcagtgatgggaagttgatcaaatgctttaagtacgtgggattcattgatgtgtcgaatgttggacatragcaaccttcattctgccccttcatcttattttatattactttaaatagtagaatgtactgtattcctcgttataaatggaaatcttagaacttgataaaaatttaaaagaaattacctatagatccactacctaaagaatgccactcttaacagttttttccatttaattacctgtgtccagttcattaaaaatacatttatagcctatatataattttatattttgcttcttatatttaacaggacatgattggcatttctgaatgtatataattcataagtataattttaatatttatatactatttagaaagagttttcataccttaatttatttaaccaaacccctattacattatgtt

SEQ ID NO: 724011 - DNA, 620 bp, Homo sapiens
ggaggctgaggcgggtagccactgctcccagccctgaaatctttcctcttttctaagatagacatttaatgcacacacacattttgatatgctatgttttaattttcattcagcttaaaatatctaatttttcttttgatttattctttaacttactgattatttagaagtgtgatattatattttgggaataaaaatccagagatcttactgttactgatttttgatttaattccattgtggtaagagaacataccttatatgatttgaatccttttaaattgattgagacttgttttatggatcagaataaggtgtcttgataaaggttccacgggcacttgaaaagaatgtgtattctactgttgttaggtagagcattctattaatgttgattggcttgttgattgataatgttcaagtcttctgtattcttaccgatttcctattctatcagttatagwcagagggtgttaaaatctcaattctgttttgcttgttgattgataatgtttaagtcttctgtattcttaccgattttctgttctatcaattatagagagaggtgttaaaatctcaattctgtttgtttttggtttgaaatttacttataaggtaca

SEQ ID NO: 724012 - DNA, 620 bp, Homo sapiens
ggaggctgaggcgggtagccactgctcccagccctgaaatctttcctcttttctaagatagacatttaatgcacacacacattttgatatgctatgttttaattttcattcagcttaaaatatctaatttttcttttgatttattctttaacttactgattatttagaagtgtgatattatattttgggaataaaaatccagagatcttactgttactgatttttgatttaattccattgtggtaagagaacataccttatatgatttgaatccttttaaattgattgagacttgttttatggatcagaataaggtgtcttgataaaggttccacgggcacttgaaaagaatgtgtattctactgttgttaggtagagcattctattaatgttgattggcttgttgattgataatgttcaagtcttctgtattcttaccgatttcctattctatcagttatagayagagggtgttaaaatctcaattctgttttgcttgttgattgataatgtttaagtcttctgtattcttaccgattttctgttctatcaattatagagagaggtgttaaaatctcaattctgtttgtttttggtttgaaatttacttataaggtaca

SEQ ID NO: 724013 - DNA, 819 bp, Homo sapiens
acttctaccaaaagcatctgctgctcgttccctcattataagcttytgtggattcccatcactctcaagataaagttcagtctttagcactcattgcaagagccctccacaatttggcccctgcctaatctctctccactgttctttgccccttctcctttagatttcagcagtaccaaacttcttgtagttcctcagttcatgccttctttacgtcttggtgtatttgcccatgctagactctctctcaaatactgaatactctctcatcccttctctgcctaggtaaactcccagttttctttcagtctcaatctcagaccaggcacgttggctcacacctgcaatgccagcactttgggaggctgaggcaggaagattatttgagccaggagttcaagaccagcctaggcaatataatgagacccccatctctacaaaaaatatattatagaaaaattaaccagatgtggtggcacacatctgtgctctcagctactggggaggctgaggtgggagtatcacttgagcccaggaggttaagactgcagtgagctgtgttcgtgccactgcactccagcctgggcgacagagccagacctgtctcaagaaaaaaaaaagagaaaatatacaatagtggaatgaagaaggcactagataacagcaagacttccctcaccttctcctcaataaggtaaaaaatgaaaagaaacttatattgtactacaccaaactagagagggacacaaagaaagtttgaaaaacatgtaagcttgaccagaattaatatattaataatatgtgaaatacaatacaata

SEQ ID NO: 724014 - DNA, 819 bp, Homo sapiens
acttctaccaaaagcatctgctgctcgttccctcattataagcttttgtggattcccatcactctcaagataaagttcagtctttagcactcattgcaagagccctccacaatttggcccctgcctaatctctctccactgttctttgccccttctcctttagatttcagcagtaccaaacttcttgtagttcctcagttcatgccttctttacgtcttggtgtatttgcccatgctagactctctctcaaatactgaatactctctcatcccttctctgcctaggtaaactcccagttttctttcagtctcaatctcagaccaggcacgttggctcacacctgcaatgccagcactttgggaggctgaggcaggaagattatttgagccaggagttcaagaccagcctaggcaatataatgagacccccatctctacaaaaaatatattatagaaaaattaaccagatgtggtggcacacatctgtgctctcagctactggggaggctgaggtgggagtatcacttgagcccaggaggttaagactgcagtgagctgtgttcgtgccactgcactccagcctgggcgacagagccagacctgtctcaagaaaaaaaaaagagaaaatatacaatagtggaatgaagaaggcactagataacagcaagacttccctcaccttctcctcaataaggtaaaaaatgaaaagaaacttatattgtactacaccaaactagagagggacacaaagaaagtttgaaaaacatrtaagcttgaccagaattaatatattaataatatgtgaaatacaatacaata

SEQ ID NO: 724015 - DNA, 662 bp, Homo sapiens
aatgacaaaagactaggaaggataggtaggcataggccatatcatgtgggctgaaataagaagcttacgtacaattaaaaaatcattaatgattttaactagtacagtcatattaaccaatttacatttttcaaaattctaaaacatacacttgtaaatattatttaatacacaatgtaaggctaaatttgtcatcattcaatttggaaacctggtgtcagacaaataacattataatctagtcatattagtcattcaatcattcatgaagcatttggccagctcctgccctgtgccagatagctctgggtgttgaaaatacaaagattatagtggtgatgtcaccttccactttgagcaataaatacaaaaatgataatgatgatatcatcctctattctgagcaatctagttttcttcctaaggcctcaaagctgtagttttctaactgctatatattaaaaccaccttagtgtatggtaaaaaaagcagatagggtcccagctagcagtaattctaattcagkaggtttccaatcatccttcaccatactttgaggtgaaggacgaaaaataaaatcacctgtaatttataaattacttcatgattcttgagaatcatgccaaaatgagccactgtaattaatggaaggagtatgcgca

SEQ ID NO: 724016 - DNA, 1297 bp, Homo sapiens
cccagctactcgggaagctgaggtgggaggatactttgagcccaggagttcaggagttcaactccagcctggacaacatagcaagacccctaatcttaaaaacaaatttttttagaccaggtgtgctggctcacacctgtaatcccagcactttgggaggcagaggagggcggatcacttaargccaggagttagagaccagcctggctcacatggtgaaaccccacctctactaaaaatagtgatgtgcacctgtaatcccagctactaaggaggctgaggcacgagaatcatttgaacctgggaggtggaggttgcgctgagccgagatcatgccactgcactccagcgtaggcaacagagcaagactctgcctcaaaaaaaaaaaagttaaatcattgaactcttacatgagtgaattttagtgtataaatcatacctcaataaagctgttgcagaagaaaaaaaagaaaatccatccctgccactcacaagctgctacctacagcagattactatcctaagcctcaattttgccatctgaaaaaaacagaaaaaacagttaataatacctcaccaggttcttgctaattctttagtaacacagaggaatcttttagcccttctttttttgtcttatagcttaaaccatgctgcaggaaatgtatcaatccaagataaaagagctgaaatccaagaacctccccctcacattttgtttgtttgtttgttttgtttttttttgtttagacacaggatcttgctctgtcacccaggctggagtgcattggtgccatcacagctcactgcagcctcaaactcctggagcccctcactttaaaacaaaaacagaaacactgtattaccaatgctcttactaaaacagactatgaaaattctaaattctaattctaacataaaaagatgaattctaataaaaaaatacacgcgataagaaaacattataatttaattgaaagtggtttattaatttgtggtatataaataattaaaatcttaaaattttaaatttgtttaaatattaacaaatttatgaaatatacaaattaaatatttacatatttatgaaatatacaaatacttatttgcttaatcttcccctgccattaatttgaacatttctcctctgtataacattgacgaatatgcaaattttccttcctatacaaattcttccagtttcctaatgagtctagaagcagtcccagtatcttaagatgtgaggagaattaaaccaactgtaacaacaactacagttagccagtcagaagggaca

SEQ ID NO: 724017 - DNA, 1297 bp, Homo sapiens
cccagctactcgggaagctgaggtgggaggatactttgagcccaggagttcaggagttcaactccagcctggacaacatagcaagacccctaatcttaaaaacaaatttttttagaccaggtgtgctggctcacacctgtaatcccagcactttgggaggcagaggagggcggatcacttaaggccaggagttagagaccagcctggctcacatggtgaaaccccacctctactaaaaatagtgatgtgcacctgtaatcccagctactaaggaggctgaggcacgagaatcatttgaacctgggaggtggaggttgcgytgagccgagatcatgccactgcactccagcgtaggcaacagagcaagactctgcctcaaaaaaaaaaaagttaaatcattgaactcttacatgagtgaattttagtgtataaatcatacctcaataaagctgttgcagaagaaaaaaaagaaaatccatccctgccactcacaagctgctacctacagcagattactatcctaagcctcaattttgccatctgaaaaaaacagaaaaaacagttaataatacctcaccaggttcttgctaattctttagtaacacagaggaatcttttagcccttctttttttgtcttatagcttaaaccatgctgcaggaaatgtatcaatccaagataaaagagctgaaatccaagaacctccccctcacattttgtttgtttgtttgttttgtttttttttgtttagacacaggatcttgctctgtcacccaggctggagtgcattggtgccatcacagctcactgcagcctcaaactcctggagcccctcactttaaaacaaaaacagaaacactgtattaccaatgctcttactaaaacagactatgaaaattctaaattctaattctaacataaaaagatgaattctaataaaaaaatacacgcgataagaaaacattataatttaattgaaagtggtttattaatttgtggtatataaataattaaaatcttaaaattttaaatttgtttaaatattaacaaatttatgaaatatacaaattaaatatttacatatttatgaaatatacaaatacttatttgcttaatcttcccctgccattaatttgaacatttctcctctgtataacattgacgaatatgcaaattttccttcctatacaaattcttccagtttcctaatgagtctagaagcagtcccagtatcttaagatgtgaggagaattaaaccaactgtaacaacaactacagttagccagtcagaagggaca

SEQ ID NO: 724018 - DNA, 607 bp, Homo sapiens
attcagccctaggtttccatcaatgcttgtttgaattccatgggtatagcactggtggaactgctttttcagatttttagatttgtcagagaatattaatccttaacctaagttttttttccctgatttctctctttacatttatttgttttcttagtttcattatgatatatgaaactaacatatcctttgtatgaggattcagtggttacatctgaaagcaaacaggaagttattattttgcttgttagaaaaattcacttcccttaatgtagcttttcccattattttactctcaaacatttggtgtacttctgttttacatgtgtttcttgtaagaagaatatggttggatttttaaaaattaactatctttyagctgacaagcgtaattcttttttatttaattatgatcattgatatatttggatttattttcaccatctttttacactttctatttgatgaaattcctactccatttttttctcctccaatattttggaatgtatagattctaattttttaatagttaaagttattaattagattcagcctccttctaaaacctagagtattttaactctttctcagcttataagctagt

SEQ ID NO: 724019 - DNA, 880 bp, Homo sapiens
ggcaagcaggttggcatcagtataaaccatggcctacacattcctaataactagaacttaaggcacgcagcttgctgttcaaatataaataacctcaaagccaaagcagatgtgtgtatacgtaatcccttcaaaatctgcatgagattgatatttcatcayagtaagcgtgttcatttcccacatgaaattgtaaaggcagtggctaggatagtggtgccagcagagacatttaagcagccctgagccaggctctgagcagagctcttgtcatttttcctttttttttttgctttgggaagaaaaagatatcttcccctggcaccctaggcccacctccttcaggcagaattgccagttcctctggcccctgcctcacccccttccagagttctctctacttaactccaccctcaggctccacccttgaagggcacagcccagctgtactgagttgaggtttttctgaccctcagaaataagcagttagcaacatccccagcgcctgtcttctttctgctcttcccagggggcccttgactcaccaccaacccacaggggaaaccacagagcacagcagcccagcgccgactgcacctccccggaaaagttcctggaggttcaagaatggctcctctatgttgactccctgtctcatctcaggtgccatgctggacttttatatacggggtcttaaccccccaccacagcacaagccagcaaggtggggcttcatgcaaatgaggcggctgagggccaaagcagtgtggtggccacccctcaccaaactgagcctgttcccagtaactactccctttaccgtcccatgctggaggccagcgcccagccagctcctctctgtgccttttttttttttttt

SEQ ID NO: 724020 - DNA, 571 bp, Homo sapiens
aacttagagtttaccaatcacagccaataatttttcatgtgcctaactaaaaacattaatgactaccaacaaactgtttattctgaatcaataaaggtagattggtaaaaaaatattcagataatcaagtactttagttacctatatttttatgaaataagtccctgaaggattatggggcttcttccatataataaaatacgtacaaatttaacaaaatatgaaaatttgaaaaaagagaaaaacctattttaccactacattcaattttgacgtatttgtaaataatgtcattctccagtacaaagagatcaaaattgggaattagaaatgggcatcttggccgggcgcggtggctcacgcctgtaatcccagcactttgggaggccgaggcgggtggatcatgaggtcaggagatcgagaccatcctggctaacaaggtgaaaccccgtctctactaaaaatacaaaaaattagccgggcgcggtggsgggcgcctgtagtcccagctactcgggaggctgaggcaggagaatggcgtgaacccgggaagcggagcttgcagtgagcc

SEQ ID NO: 724021 - DNA, 971 bp, Homo sapiens
tggcttctccatgtgacttgggcttccttacaacatggcagtctctgggcagtcagacttgttaaaagtggctcagaggtccttgagcaattgttccactgaacaaggtggaagctgtttggcttcttccttatttcctttttctttaatttcctctaaaatattttatcttcttgtttggcctcttctgacctcgcttcagaagtcatgcagcatcaaccttgtctgcagctgccctgagccagcagttctctacacacccagcatcagcatcaagtgagatgcacccagcacggttggagcaggcatgggcagagcaatggtagccaggctccagcaggggctgcaacttctggcactgctcctacggatgcagatttatacagctcaaacaactgctctaacttttaagtaacttcttccagaataacggctgcccccaagtctagcgaatgccaccaataaggcattgacagtgtcctgcagtcaacagccagtctcccccctcactcctcagggtctcactctcttcctcttctctgctgttaaaagactcaggccaggccaggcatggtggctcacgcctgtaatcccagcactctgggaggccgcggcaggtggatcccctgaggtcaggagttcaagaccagcctcaacaacatggagaaaccctgtctctactaaaaatacaaaactagccaggcatggtggcgcatgcctgtattcccagctactggggaggctgaggcaggagaatcacttgaaccagggagtcggaggttgcagtgagccgagattgtgccactgcactccagcctggcaacagagctagactccatctcaaamcaaaaaaaaaaaaaaaaaaaagtgaaactatctcaaaaaaaagactcaggccaagacaggtctacactttcccatcttctaaattcaattcaaaggtcatctagaaggccagtatggcaaggaaa

SEQ ID NO: 724022 - DNA, 355 bp, Homo sapiens
tcgtgtccctgacgccggacatcccttcccccaactatcccagacgccccagccccgggggacgcggtgcagagaaagaccgcagcacccgccagccagccagcagygtcctccagccgcgaatccccgcaccccagccttccaacggggatggatggcactcactcccacaccccaaccccagcctggggaagggaaaagaaggaaggtcttcccccaccccaagctgtctccggcctgcggtcagggggaggggctctagctgtggaaagttggcagaggcggccggcagcagccgggagagtggaaaaaatgatatcaaacccggaaaaatgcaggccggatggagggccgg

SEQ ID NO: 724023 - DNA, 2069 bp, Homo sapiens
ttaattaattaaatttttaaaaccgtttatttcttgctcacacaaaatccaaagtggatgtttctggttgggaggtgctttccatgtgatcattcaggactctagtttccttgcatcttatggctgcaccattccctgggcctcagactcctcgttgggccctctgcagtcagctgccagatcagggcagagcatgcggaggatcgtggaggaggctttcacagccacttctgcacatagtccattggtcagaactgtcatgtggccacatctaactgcaaagacaatgaggaaatatattctagctagatgctcaagaggaagaaaaaaatgggccttagccatcacatagctgtctctgcctcactgtgaaaacctggggaagttacttatctttgagcctcaatttccttgtctgtaaacaggcatagaaatgatacctgcttcaggtattattcagggggctatcgtgatggttaaatgagacagtccatatgaagcaattagcaggaggctggaacatagtaaacatttaagaaacgttgcctattacaattattacaacatttgcatttaattaatttctccccacccatgaagtgtttctaacatgtgggcctaaaccaggggtgctttaacttttggacattatgttgttttttagtcaagaagtagtaaaacatgaattattatatatgcattggccctctatataataggattttcatacccaacaagatctttttacttaaaaagatttgagaactacagccctaaaggacctggaatgctcttttgtacacagtgggtgattaatatgttgaataaatggggtttcttgccacctctcttttttttcttcccttacttctgcttcctggtctcacttttgcctattcatcccatattccatacctccaccactatcagcaccgccacacacacacgcacaacacacacacacgcacgcacacgtgttgacagccacttaacctcctgatcttcgcttggggtgtagacagccctccacccacccagcccagtcccgctgtgtcctgcagcctcaatacacaacctccaggccctgcagccacttcagggtctaacaaaaccccaacccccttgctaggttcctcagaggctctagaaaaacaagccagctacgctcactcatacttgatagggaacggccttgctgaagcatttatctgttctcagatggatatctgttcactaaaatcaatttttaattagttgtattttaagccatgcaaagaaggaatgtgtgaacagtggtgaaagtctctccataagtcacaataccaggctttctttgaaatttaaaattggtgtgaataggaagggaccatcacacacacacccccacgacctccttgacaaactctttctcccaccaagtggataagttggtccctcattagctttcagcctcaactgccctgtctgctcctcatcccttggctagcagggtcatctttcagcacaaatggttgtcactgaccatgcagtctgaagctcaatatccactctgtggattcagcattctgcatacctagaggtggtgaacttttgagcctgagctccagaaacacctggtcactggtgctcctggaagaacgaatgaagctgaggccccctcagattatgatccaagcaccctgagacacaagaggctgatgcatcactcacttctctctactcctttttttgatccatacrtagccacctctaaagtcactcagaaagaaaacagaatgtcacttccctgacttatccaggggcttaatttacccccagccccaagatgatgatccatttcatcaaatgtgtcaggttaactttcctgcgcattacacttgatcaagacatgagcattccagtcttcgtgctgctcttcatttttccagggcaagatcagctgccattgatgctgctaaaatctggggccaatgcaggtgattcctgccatcctggctccatgaggatgtttgaggacaaaatggagctgtgcataagaaagtccacagtgtcgttaattagacataaga

SEQ ID NO: 724024 - DNA, 585 bp, Homo sapiens
cttgctttcaattccgttttctgattgactaccttgttgattcactcagctatcattacccagcaccgactgtgtgccaggcattgaactaacctccactcactcactgtctaatacaggagcagatacataatattttagttcagcgtgatgagggcaatgatctaacaagaatattctccctgaatcagcagtcccagtaccctagttgagagacccacatggggctcatagaagtacagagaactggaccctccccgagcccaccactgcctaccacgcttaatcaaggccaattgctcttgagtgaagccatgtgcaaattagtagtcaaggtcattcttgggktgactacaaccttttttgcacatacttgtctccatcacagctttcaaaagaattatttttcatataaaaaaatctcttcccttgtagcctgggtttccaagggtaaagaaaatgaagcattctgtaaaccacttctttcatacaaatacgaggagctttcaagcggtagatttatggtctgtgtgtacactgttgcttagatcccaacagaaaaacaaaatgtaagctaatacatac

SEQ ID NO: 724025 - DNA, 557 bp, Homo sapiens
aaagacgcagtttcgctgtgttggccaggctggtctcgaactcctgacctcgtaacctgcctgcctcagcctcccaaagtgctgggattacaggaatacaaaaaatatttttaaattagccagatacggtgatgcacacctgtastgccagctactgctgtgagctatggccatgccactgcactccaaagtgataccctgtctccaaaacaaaacaaaacaaaagtagacaaacataaaaatagtaaaagacagagtccataaatagattcataaatgtaaaaacaactgattttcagtaaaagtacaaataagcaaggtttgtctccaaaaaaaacaaaagtagacaaacataaaaatagtaaaagacagagtccataaatagattcatacatgtaaaaacaactgattttcagtaaaaatacaaaggtaattcaggagagaaaagagtatttttaacaatgctgcgggaatgattggatattcctatgcaaaaggaaaaaaagaacctcaatccatacctgttacctacacaaaaattaactcaaaatgggcca

SEQ ID NO: 724026 - DNA, 837 bp, Homo sapiens
gataactagaagagagggcttgaaatgctcccaacacatagcaatgataagtgctcaaggtgatggatatcataaataccctgacttgatccttatacattctatgtgtgtaacaaaatatcacaggtaccccataaatatgtacaaataccaatttagaaaaccccaaaatctatattcataaacaatatggtattacgtagctgattagaatgagacctgttattttctctgaggtctttttttrtagtgttgcttataaacatttaaaaatttgggctattttctataaaccaattatttaatgtggttagaaatacaggttgtacaaaagtaattgcggtttttgctttaaaagtaatggcaaaaacacaaccacttttgcaccaacctatagtaaataatatttactacagctaagataaattataagtaataatatgattgattttcatacatggccttggggtcatatctcattactttttgctaaacctttttcaatttatcacacacacgcctataaggcttaactgatttttgttatttatattataattttacagtattatctctccaacctagatcctgattatgggataagccaaacaggcagccatctgaaatacaaactagaagaggattataatgtaataacaaatagaaagcattgtgataattaactgaggtcaagtctctctaaagtaggatcacccttgaatggatagtaaaaaacaacagttcttacaaaaatgaaacatttttgttgagtacttttgtcatccaaaattctaaaactgaatagctaaggtatgataaactgctgcttaccgggaa

SEQ ID NO: 724027 - DNA, 629 bp, Homo sapiens
agtggatcacttgaagtctggagtttgagaccaacctgggcaacatgatgaaatcccatctatacaaaaaatacaaaaattaccctggcatggtggtgcatgcctgcagtcccagctacttaggaggctgaggtgagaggatcgcttgagcccaggagtcagaggttgcagtgagctgagatcacaccactgcactctggcctgggcaagagagggagatgctgtctcaaaaagaaaaaagaatatgtctgatcaggtacttcattacctattagaacaccatatgtcactcactatccaaccctgcttcaactttgagtgttacatataactgcatttggatcatttgagaacaaatggcctatctatatcagaaatggttaaaatgtgagttagaatgaagaactttcattgtataactccagatagaagccatgtaagaggttaatacggtttggatctgtttccccgcccaaatctcatgtggaattgcaatccccaatgctggaggtggggtctggtgagaggtgattggatcatggggggtggtttctcatgaatggttcagcaccattaccyccttggtactgtcatgacggtagtgagtgagtgctcatgagatccagtgg

SEQ ID NO: 724028 - DNA, 629 bp, Homo sapiens
agtggatcacttgaagtctggagtttgagaccaacctgggcaacatgatgaaatcccatctatacaaaaaatacaaaaattaccctggcatggtggtgcatgcctgcagtcccagctacttaggaggctgaggtgagaggatcgcttgagcccaggagtcagaggttgcagtgagctgagatcacaccactgcactctggcctgggcaagagagggagatgctgtctcaaaaagaaaaaagaatatgtctgatcaggtacttcattacctattagaacaccatatgtcactcactatccaaccctgcttcaactttgagtgttacatataactgcatttggatcatttgagaacaaatggcctatctatatcagaaatggttaaaatgtgagttagaatgaagaactttcattgtataactccagatagaagccatgtaagaggttaatacggtttggatctgtttccccgcccaaatctcatgtggaattgcaatccccaatgctggaggtggggtctggtgagaggtgattggatcatggggggtggtttctcatgaatggttcagcaccattacccccttggtactgtcatgackgtagtgagtgagtgctcatgagatccagtgg

SEQ ID NO: 724029 - DNA, 2336 bp, Homo sapiens
aaccccatctctactaaaaatacaaaaattagctgggtgtggcggcgtgtgcttgtaatcccagctactcgggaggctgaggcaggagaattgcttgaacccgggaggcggaggttgcggtgagaagagatcgcaccactgcactccagcctggcgatagagctagactccatctcaaaaaaaaaaaaaaaaaaaaggaattaccattaattttgtaggtgtgataatggtatggtgttttgctaaaaaaaagaagcaaaaactcctaatctgttaaagatacttagagaactatgtactaatgaaataatataatgtctggtatttacgttaaacatttcttcacacagaaaaaaagtagagtagatgaaataagaatggcaaaatcttgtaattggagttcatcagatttttgttgttgtttttccataactgaagttcttcaaaataaaaagttaagtggggctggccacggtggctcatgcctgtaatcccagcactttgggaggccaaggcaggtggatcacctgaggtcgggagtttgagaccagcctggccaatatggtggaaccctgtctctactaaaaatacaaaaaaaaaaaaatttagctggtcgtggtggcgggtgcctgtaatcccagctacttggtagactgaggtgggagaatagcttgaacccgggaggcggaggttgcagtgagcygagaccacaccactgcactccaggctgggcatgacagagcaagactctgtctaaaaaaaaaaaaaaaaaaaaaaaaattaagtacaaaacttctaggcacaggtgtagtggcttacgcctgtaatcccagcactttgggaggctgaggcaagaggatcccttgaggccaggagttcgagaccagcctgggcaatgcagtgagagtttgtttcccccccaaaaaaagtctatgcacaacactgtataacacaattttaaatatccaattgttacgaaactataaaaactataaaacaaaagaagcaaagagaagtaggagttattttaaatgcctataaataattcttcagtcttttttttgttaagataattgtcatgtactttctactaacagaaagccaaaactaaaggttaccatcatttaaaaatatgctgttataaaaaatatgtttttgtgactttttgccaatttaacatattctccaaaggaacactgtctttagcatagatttactgggccaggtgtccatgtttggtgtcattctttggaatactcaccctgctgcttcaatgacaaaccaagcctgttaaattattacctagcaaacttttggcaatttaccaattagtcacatcttccagtcattttgctcttatgtttacagacctggttgttcattcttagccaatgtccaggagggacttggctccaggcaatcctttctttttcttttcaattttgacatctctatgagttagctattaaacaatattatcacagcctattttttttcttactcatacccaggagacaattacagaataaacttggactacaattttatacagcatgctgagtttcctaaaggtttggtatctattttctgtaatctgtgaagatccttttccttttcctcacagaatattatccaaagggttcaagtgccctgcctgtgtttctacaattttcttagccaaagtcaatcactataatgagaagtagatcttatttggcaggttgaagcatggtgcaggtcagagctgcctcctttctgttacacatgcattaaacattttgctcctttggtttctgaacacatgtcagctcttcttaaagatcttcctctggagtctaatactttgcttgctctctctgtttataaatgtaaacactgtggcgggcggagtggctcacgcctgtaatcccagcactttgggaggctgaggcgggtggatcacaaggtcaggagttcaaggccagcctggccagaatggtaaaaccctgtctctactaaatatacaaaaattagctgggcatggtggcgcatgactgtagtcccaactactcaggaagttgaggcaggagaattgtttgaacacgggaggcagaggttgcagtgagccgagatcacgccactgcactccagcctgggtgacagagcgagactccatctcaaaaaaaaaaattaaacactatgtcatttccctgagtgactggatcaccccaaaactatctaaaaataatttcaaacatgtaaatgatttgagaaccagagacagtaataatgaacccattgataggatgacagcaggcagaactgtgcggggagactttctagtttccaaatacaca

SEQ ID NO: 724030 - DNA, 2336 bp, Homo sapiens
aaccccatctctactaaaaatacaaaaattagctgggtgtggcggcgtgtgcttgtaatcccagctactcgggaggctgaggcaggagaattgcttgaacccgggaggcggaggttgcggtgagaagagatcgcaccactgcactccagcctggcgatagagctagactccatctcaaaaaaaaaaaaaaaaaaaaggaattaccattaattttgtaggtgtgataatggtatggtgttttgctaaaaaaaagaagcaaaaactcctaatctgttaaagatacttagagaactatgtactaatgaaataatataatgtctggtatttacgttaaacatttcttcacacagaaaaaaagtagagtagatgaaataagaatggcaaaatcttgtaattggagttcatcagatttttgttgttgtttttccataactgaagttcttcaaaataaaaagttaagtggggctggccacggtggctcatgcctgtaatcccagcactttgggaggccaaggcaggtggatcacctgaggtcgggagtttgagaccagcctggccaatatggtggaaccctgtctctactaaaaatacaaaaaaaaaaaaatttagctggtcgtggtggcgggtgcctgtaatcccagctacttggtagactgaggtgggagaatagcttgaacccgggaggcggaggttgcagtgagccgagaccacaccactgcactccaggctgggcatgacagagcaagactctgtctaaaaaaaaaaaaaaaaaaaaaaaaattaagtacaaaacttctaggcacaggtgtagtggcttacgcctgtaatcccagcactttgggaggctgaggcaagaggatcccttgaggccaggagttcgagaccagcctgggcaatgcagtgagagtttgtttcccccccaaaaaaagtctatgcacaacactgtataacacaattttaaatatccaattgttacgaaactataaaaactataaaacaaaagaagcaaagagaagtaggagttattttaaatgcctataaataattcttcagtcttttttttgttaagataattgtcatgtactttctactaacagaaagccaaaactaaaggttaccatcatttaaaaatatgctgttataaaaaatatgtttttgtgactttttgccaatttaacatattctccaaaggaacactgtctttagcatagatttactgggccaggtgtccatgtttggtgtcattctttggaatactcaccctgctgcttcaatgacaaaccaagcctgttaaattattacctagcaaacttttggcaatttaccaattagtcacatcttccagtcattttgctcttatgtttacagacctggttgttcattcttagccaatgtccaggagggacttggctccaggcaatcctttctttttcttttcaattttgacatctctatgagttagctattaaacaatattatcacagcctattttttttcttactcatacccaggagacaattacagaataaacttggactacaattttatacagcatgctgagtttcctaaaggtttggtatctattttctgtaatctgtgaagatccttttccttttcctcacagaatattatccaaagggttcaagtgccctgcctgtgtttctacaattttcttagccaaagtcaatcactataatgagaagtagatcttatttggcaggttgaagcatggtgcaggtcagagctgcctcctttctgttacacatgcattaaacattttgctcctttggtttctgaacacatgtcagctcttcttaaagatcttcctctggagtctaatactttgcttgctctctctgtttataaatgtaaacactgtggcgggcggagtggctcacgcctgtaatcccagcactttgggaggctgaggygggtggatcacaaggtcaggagttcaaggccagcctggccagaatggtaaaaccctgtctctactaaatatacaaaaattagctgggcatggtggcgcatgactgtagtcccaactactcaggaagttgaggcaggagaattgtttgaacacgggaggcagaggttgcagtgagccgagatcacgccactgcactccagcctgggtgacagagcgagactccatctcaaaaaaaaaaattaaacactatgtcatttccctgagtgactggatcaccccaaaactatctaaaaataatttcaaacatgtaaatgatttgagaaccagagacagtaataatgaacccattgataggatgacagcaggcagaactgtgcggggagactttctagtttccaaatacaca

SEQ ID NO: 724031 - DNA, 612 bp, Homo sapiens
tatttagatcgccatgacttgcaataatttgtgcaaggggggaagaaaggaaaatgtgaagttggcgtcgtgttgggagggaatgaattataagaaaggaacagccctatagaggtgagctgtgcctgaggcctcaacccttggtctctaggaaagagccattgagcagtgcaggccatcaggagtgagtgatggtgtttactgagcctaatccaactcatgcccccattcccagatgcgccctgtgctycccaccaagaatgtggggcgctgggcgtgccaggtggcctgtctaccacagcaccaagacggttccgggatgattcagggtccttgctggagaagtgagggcccaggcagaagctctggagtggggttcagggcttacgtgagcagcactctgcaaattctaggaatttgtatacattgccgaggcctctctccagctggattataaatagaggattagttcaaaggcaggcagccttttaaagagacggtgccaagcgaagcctacaaccaaatacagtcaaaccttcttcagcccgtttgcttcgtccaaatagcatataagtcacagcaacggcatttccctggctgacaagcttccct

SEQ ID NO: 724032 - DNA, 612 bp, Homo sapiens
tatttagatcgccatgacttgcaataatttgtgcaaggggggaagaaaggaaaatgtgaagttggcgtcgtgttgggagggaatgaattataagaaaggaacagccctatagaggtgagctgtgcctgaggcctcaacccttggtctctaggaaagagccattgagcagtgcaggccatcaggagtgagtgatggtgtttactgagcctaatccaactcatgcccccattcccagatgcgccctgtgcttcccaccaagaatgtggggcgctgggcgtgccaggtggcctgtctaccacagcaccaagacggttcygggatgattcagggtccttgctggagaagtgagggcccaggcagaagctctggagtggggttcagggcttacgtgagcagcactctgcaaattctaggaatttgtatacattgccgaggcctctctccagctggattataaatagaggattagttcaaaggcaggcagccttttaaagagacggtgccaagcgaagcctacaaccaaatacagtcaaaccttcttcagcccgtttgcttcgtccaaatagcatataagtcacagcaacggcatttccctggctgacaagcttccct

SEQ ID NO: 724033 - DNA, 2364 bp, Homo sapiens
tgagatcaactacagggtccaaggcttcagagagtggccgcaagataatcccagagggatcttggggccaggtgtggggcttggggatcaggtcttttgtctgctctgtcttggactacatgggaacttaagcagcttacttctgcttacttatttactaccagcaaatgctgagaccaaacaataacaaaatttccaaactcaagaaagcatgcactcagtttgtgtttcacgggtacccacacacaagaattctctagagctgtaaagtaaggaaatacctcaattcttatgcttcaggctgtgcaaaacccaaccatgtgctcagaagcaaaatgctctttaaacacaaagaatatccaggacagcccactaagaagatgatttggccacctctggtgatgatgatgacacctgccaccagcttttccctaaaggaggctgggagagtgaattaattgacatttttgagcacttggagttctctggacaaaggcctttataaatataaggcatgattaaagggtatcagtttgctaactctcagagcttgggttttatcaggccatgaaaggaaggaaatgccaggggtcccaatggcagaggtgatccacaaagccctctactgtggccccagcgggtgctgatgtagggaccgttaacctaaaggcatgcagtcctccccaggactgcacctgccaatgccgagccctgtgggctgccaatacccagcctgttggataatgagggctggctcctgtgggatcagttaagcagtacacactcccagtctagagtttaataccctagacatgggtggacatgggaaactcaaggggccaccagcatgctggcccaatgccagagtttaattaggccctaaatctccagtgattacatgacgggcccagtcccctgaggccagccaaagggagaaacatcccaaacagcattgtatcggcctcttttgagtctttcccctcaactcattgtttgtggaggcactgcttgttagtgcaaagaatcccttccaagtcactgagtagctgtacagaaaatcagagggccgctgcttaatgatctcggccatcaggtaggctttcccacacctgcctgctgcatcccgtgggacagggagtcctgtagggggacagggtatagatgaccacaatcacacttccactcttgggtttcgatgggggtttggtcagaagtcagcaaaactatgacttgttcagaaaacagaatgattaggctctctgagagaccccaaaggcccaaccactctgcaggaccagggcctgggacctgcaagtgaagcctaatctttcgggagcccctggggaggaagaggattatgtgaagtggttccgaaaggaggaaggacctgagactttcacagaatttctgtcttttccttcttgtctccatccttctttcatagccttggaggggaacattccagcttcttatagttatggtgaagaaggccaacaccagcatgtcactcatggtccagaccgatttcctgatctgggtggccaagggtgagaataacatttccactgagctgattgatgaaggacacgggtacaagtttaatgtagatggggckgatctgatgggaggtcgtgagaagaaaaactttcttgtcttcctctgactttctgttttcatttgaagagagtaggattaagttcttaggtcttagagtcagatggcctgagtctgcaacctggaagagaccacctagcaatctggtcctacccatttgggagcctactcaccccacggttcctctacttgcaatgagtttcctaaacagggcagggccagatttccaccttgcgcaacttctgctgtggctggagaaggaggatgctagcctccttggtgtttacgaaatgagttatgatatgtaatgttagaataacgtccagcacgtagtatgtttcgtatggcaacatcctttccctcctcctcagcctggggttggttggctatggagatatgcccacactaccaccactcctggcagccccctgtgttcaaagagtgtgggaatagggtactggccgatgtccgacggtcagcaccgcagtgggccataaagcagcggcaaagggagcggccagctcagatacggcgcaggagatgaaagtcggccgtgttttcctttccaaagtgctgctgtgttcctgaaggcctgcagcttcctctgccctgctggggattttttttcttcccagttcctctcagtgatatcttaagaggcaaacttccagcactaacaggaggtcttttgttctccttttctcaaagcggactttaacccagttactacagactgagtcactgtaaaaa

SEQ ID NO: 724034 - DNA, 1625 bp, Homo sapiens
aacagctctttatatgcagtttctgtttaggaagttatgatttagggttaaggccttaagatataccatctcacgccagttagaatggcaaaaattaaaaagtcagtaaacaacagatgctggagaggatgtggagaaataggaacgcttttatactgttggtgggagtgtaaattagttcaacctttgttgaagacartgtggcaactcctcaaggatctagaactagaaataccatttgacccagcaatcccattactgggtatatacccaaaggattaaaaatctttctactataaagacacacgcacatgtatgtatattgtagcactgttcacaatagcaaagtcttggaaccatcccaaatgcccgtcagtgatagactggataaagaaaatgtggcacatatacaccatggaatactatgcagccatataaaaggatgagttcatgtcctttgcagagacatgaataaaactggaaaccatcattctcagcaaagtaacacaagaagagaaagccaaataccacatgttctcactcataagtgggaattgaacaatgagatcatggacacaggaaggagaacatcacacactggggcctgttgaggggtgggaggctgggggagggatagcactaggagaaacaccttatgtaggtgacgagttgataggtgcagcaaaccaacatggcatatatatacctatgtaacaaaccttacacgttgtgcacatgtaccccagaacttaaagtataataataaaaaattaaaaataaaagatataccatctcctacaatttattcagaacttttagtctgagtacacattgcttcctacatattttatttatgtttttatttctctttcttatgtgtacttttctgttttttaaatataactggttaaaattgttacgtattgatatttgatcagagaatctagaagtagagatgaaaaagacctattgagtctttctcattccactgtggagatgcactgaccacccaactaactgtgtttcatctacataaagctataggtgggtctattagtccctgcagaaataatgccagaggggcttttcttattcagaaaaaaattttttttcacgtgtattactatttcatcctatcatgattttgcatttgagaggtaaattgaaaagaaagataaattccttagcaaatgtttcttttcaggataatttctttaaatatttttcaccataaagaagtcattaagactatcacagaaagtttcaacttctctattacatgaattgattattacttaggggtttagaaaaatctcaaacagaacgatctctgcaggcaggtttgtaagaaactaatgactagaaatgaaagaagcaaataaatggaagtaagggtaggtcagagatgtttgtgagagaaatgacatctagaatgagctgaagtagacagaaccttttagttatctcaaggtgaattgatctttatgaaatgtttgctatgtgaagctttatttgaaaatacagttctccaattcacaggaaggtatcactttaggattaggctgagtaagtggctgagttataagaccaagtgtaccaacggcaagtaaactaatctgtagtta

SEQ ID NO: 724035 - DNA, 601 bp, Homo sapiens
gcagtgccttacagaccatggtggggagacctgattttactctaagggcagtggaggccagtggaaggttctagaacaatttggtttttgagactctttcctctggctactggtagcaaacagatggaggtaggataggcattggagcagtagtccccgtaggaagccaggttgtcagccaggccttggtgaacctggccccagcggaggctgtggggatgatgagatggtgggaatgtcctgtcaggttgccagggttggctgtgggggataaaagaaagggaaagatcaagaatgactcccaggattttgacaggaacgacttgtgagctcatgttgtcccagccctcatcctaatatcatctcatttaattctcccagcaactctgtgagctcggtgctgctgtatacacattttcacagatgaagaaactgaggtgtagagagtttaattaactgagtcwttcaactcataagccacagagcagggaccggagcccagcaccatctaatgagaaacccctctgcctcccatagacactgtgcctcggccctttaagagaggccagagggtgccagaaataatgttagatactttttc

SEQ ID NO: 724036 - DNA, 760 bp, Homo sapiens
aggaggaaacagctatggggtggggattatgtgtggccctggcttaaaaacagtggtggagaaacctgaccrggcgtgggcacatgtacctagtgggctagtgaaggtgggcgccaccccgggggctctaccagccagtgtctgtactggggaagcggggctcaaaaacccctccttccatgaaagcactcctgacgtgcgccttcctggtcacaccagtgccgcctttctttcccgaggggctgtgctgacattgttcccgagagcacctcgggccagcggacaggtgggctgggctgccagagcctgagttcagcgcagaccacagccccttgcctctcccatgtttgcagtgacctgagggtggacagccagaagcagaggcacccgtccggcggcgtctctgtgtcttccgagatggtctttgagctagaaggtgtggagctaggagcagacgggaaggtaagagcctcttcgctggtggacacccagcgccgtcagggccaggcaggcgggtgggagcagtcccacgtcagtgcccacgaggcacacgtgaagctgtgcttcactccacgtaaaacgcaagggtggagtggatgcgggcccgtgcagccctgagaacgtggccctggagcccgtcggactcccccgcctggccgtgcctgaggtctgcgccactgccccacagccaggtgctcctggacacccccctgctgcagggtggggctcgccaaccctctggcctctgtgctggtggtca

SEQ ID NO: 724037 - DNA, 760 bp, Homo sapiens
aggaggaaacagctatggggtggggattatgtgtggccctggcttaaaaacagtggtggagaaacctgaccaggcgtgggcacatgtacctagtgggctagtgaaggtgggcgccaccccgggggctctaccagccagtgtctgtactggggaagcggggctcaaaaacccctccttccatgaaagcactcctgacgtgcgccttcctggtcacaccrgtgccgcctttctttcccgaggggctgtgctgacattgttcccgagagcacctcgggccagcggacaggtgggctgggctgccagagcctgagttcagcgcagaccacagccccttgcctctcccatgtttgcagtgacctgagggtggacagccagaagcagaggcacccgtccggcggcgtctctgtgtcttccgagatggtctttgagctagaaggtgtggagctaggagcagacgggaaggtaagagcctcttcgctggtggacacccagcgccgtcagggccaggcaggcgggtgggagcagtcccacgtcagtgcccacgaggcacacgtgaagctgtgcttcactccacgtaaaacgcaagggtggagtggatgcgggcccgtgcagccctgagaacgtggccctggagcccgtcggactcccccgcctggccgtgcctgaggtctgcgccactgccccacagccaggtgctcctggacacccccctgctgcagggtggggctcgccaaccctctggcctctgtgctggtggtca

SEQ ID NO: 724038 - DNA, 678 bp, Homo sapiens
gatggatcaaagacttaaatctaagacctgtaaccataaaaattctagaagataacatgagaaaaactcttacagacattggcctagacaaagaattcatgactaagacctgaaaatgattttatttttattttgcaggtggtagtttagctataggaaaggatgaaatcttcagggacatattaagaggtcaaagttcaagcacagaatcttggagaatcttcactcttaaaggatggatggagcagccagaacaaaagcayagaaatgtcaacctaaaataatgaaaagtctcaggatccagttagagttcattcaagtgcaaagtatgagggtggccatcagggaagcagagctacacccaagaatggtgatcagttgcaccaagtgtgggaaaaaatgaggattgtttatacaaatcaaaacaaaacaaaacaaaatggtggtgttgaacagaattacgtttcctctacaaaggctcatgtgtaagatttgattggctgctattgattacactctaagagggttgcttaacattctgttgcatagaggtaacaatcacaagagtctccatttccaatgtcatttagcctaggtttgaatgaagaatgaggtgtctggttagcgtataacatttcaacacaaaggtcaggaagtaatggtcatgtaccagagagg

SEQ ID NO: 724039 - DNA, 602 bp, Homo sapiens
aatactctatgattctatatgaatttctatatgactttctctgatatctttgagtttgtggttattgcctacttaaaagaaagtttaggccatgtcactgccttcaaaaagtttaaagtcttctacattaacaatgcaccacagagcaaagacaggccagcctacgttcagaatttaaatttaaactctcatgggcctaagacaggttactaaagagaatcatgattcatattctttgttctctaaggtggaacaagtgtctagactcttgagagctggatgtcagcaggctttaacacagtgattctcagtgtagaaaaagtggtagaaagctgcctcaacgactgaaaaactgagggggaaaaagctgtctcctaaaacacaggagacccagagaagacgaggtatggcagagaccttgtggtttccatytgttcaagaaaaacttgagtaaacattttagttggtttccattccctgccccatcttggtgtttgtataccattctctgcatctgcattctatattcctattaactgacagaaatcttcttttctgtgatttgaatgtgattctacagcccacttgtcatatatgataat

SEQ ID NO: 724040 - DNA, 1742 bp, Homo sapiens
tttccaaacagagagaaatctagtcactgtttttctggtgatggacaaacaccattgagtagaaagcactattagaagtgctaaggggcagatggctgattgcacaatcatctagaaccaggacctgctaatgtttaccatcctgagctgtgaatgaggacaaggtgctggggacgtaactccaggtttatctgatggcttgtcagcaaatgctgtaacattttcatcacccaggctgacaagttgtgccgaatcaggaaataacttgttttgaggcatgcagatgtctctgcgtgtcttgtaaacaatctggggggtggggggaattgaacaacaaagggcagctttgcagatcacagcccaggatgattgcttgacaggtctgtgccaactctgctggcgatcaaataaaaacgagccgttccccttctctgaggactccgtatttttaaaggggaataataaatgcaaagctgtgcaaagcctggctgggggaaatgtgaaatccatctcctatcatttgcataacataatcagcagtgctctgctaatcaggctgggggaggcagttggaacacgtgtttcatagagaggtcctggagcacgccccaaagtgcatgctgcgccttcctgagctctaacccctgggtgactgacacactcttgacacactctcccctcccccaggactgaagaccactaaagctggcatcccattctcactggtttttccacgagaagggagaaccatatcacagcaacatctgcctgcattacctgcgtctgtcttttaaaagaaactggcatttgcccagcttatagctgtgtgcatgggaacatgactgagtaggagcagtccataccatttcttcctttgtgcttgaatgacccatatttcagggatgcagccctggccatttcggaaggtgtctggagaccgaggtaattcatatcattgtaattctacagcacaaagtgccactgggtccactttgtattaatgtttccatggcaatccgatacttgacattttatttaaactattaatctagcatggctcaccagccagtgtgaggaaagttgaaccccaagatttcacttctggaatcaatattaaaccaataggtaagatgcataattaactttcacggttttaaaaatccagccacaatgggtgctaaacacattacaaaatataggctcactccaattgctccctttggggcctccttttgttacttacattcaaaagagattgcaagggctgggcttctgaagctccccagcccctgtccaggccctccaaccagccctgccacrtacactgcaattctagagtcaattcaaactgtatatgattaaaagatggaaatattccccatggactttgggcaatttatttgtgaaaaagatttaatgaagaatctcaaagcagacagtgccctacaaagaaagctcatttgtgaatctctatgttctctttgctgccctgagctcatctgagggaaggaggaggaatcagtgccctgaagctattgccaagtgtatcgcatgtgagtttctcaagacagaaatattctcaggcagctaaaggcattagaacaagctgtttttagacggtcatcctccagtcagggcctctgcaggccaaattgggagagaggctctttgccttcagtgtccctatcactctagtttctggtcctcagtggtgtcctctgaccctgggtatccaaaggtaa

SEQ ID NO: 724041 - DNA, 1596 bp, Homo sapiens
aactgtaagacacaatctagggggaatgagaaggctcatggtgtgacaaatacaataatgtgagttgatttcggttgttttcctaagccttgaggagagctttggaaaatgggatagatgtgatttgtcaggtggacaatgagagattcaaggggtaaagagaaaccattcaccctcgccacctttttatttcttttctcttattcctgtcaaaggatggctctactttatgctcagaacagctttctaatccttgtctacaaagccacatgtmttcccttatcaaaaccttgcctctatgccagcctctctaaggagccctatcctgatgataagttggataaatgtatcctctgttgcttctctgacaacagcattccccaaacacctttcttttaggattttaaacattttcctcaaaaacaaaaagaagaaaattatatctgatttgtcgtcttgttttgtgtgattgtaaattcagactctttggtttgctttgtactacatgaaggtcaaggaatgttcagtgtattaaatggtcaatttgtctggtggaatacaggcttgaacatttaaacgtggcttgtacaagaaatagagtgtacagttctgaaaaatcaggtatttcctcatcaataattatgatggaatatcttaattacagtgtgtcaatgatattgggatctcacagagaggaatacatagtttcattgaggaaagcctccacgggaagatcaagtgaatctctactcatcaaaaaggcgtggaggagagcaagcagcttctatgatggagaaggtgacagcaatttaaagagaggggcccaccattcctttttcacaaaatatttcagatatccaccttttggtctgttcatgtatgaagactccaaagagaatgaaacatctatgaagactctacagaggttttcagactgcctgaggctctcagagtgacgcaaagtggagttagtagggatttaggcgggagcgctaagtgacatgcacatgagtattagggaacaggctgtgctatggtctgaatgcttgctcctcccctctattttcatatattgcaatctaatacctgatgcaatggtattaagaactggggtctctaggaggtgattagaccatgagggcctcataaatgtgaatagtgcccttataaaagaggcccaaaggggttgttctccccttctgccatgtgaagactcagcaagcagtctccatctatggggaacaggcccccacccaacactaaatttgctggttcctgcatcttggacttcttggtctccagactaggagaaatcaatttctgctgtttagaaattacccagttaggtattttttatggcagcccaaaaagactaagacaggctgaaaagttgaccatccagagggaaagaaattatttaaagattgaaaatttagcactacttcatttaccagacaatgaattagcattgctagatattactgtccggcagttaaacttcgtaacataacttactgccattaaagtaagtacatatgcaatatacagagtttggaagggaaaaataaaactatcagtgctttctgaatcataata

SEQ ID NO: 724042 - DNA, 1596 bp, Homo sapiens
aactgtaagacacaatctagggggaatgagaaggctcatggtgtgacaaatacaataatgtgagttgatttcggttgttttcctaagccttgaggagagctttggaaaatgggatagatgtgatttgtcaggtggacaatgagagattcaaggggtaaagagaaaccattcaccctcgccacctttttatttcttttctcttattcctgtcaaaggatggctctactttatgctcagaacagctttctaatccttgtctacaaagccacatgtcttcccttatcaaaaccttgcctctatgccagcctctctaaggagccctatcctgatgataagttggataaatgtatcctctgttgcttctctgacaacagcattccccaaacacctttcttttaggattttaaacattttcctcaaaaacaaaaagaagaaaattatatctgatttgtcgtcttgttttgtgtgattgtaaattcagactctttggyttgctttgtactacatgaaggtcaaggaatgttcagtgtattaaatggtcaatttgtctggtggaatacaggcttgaacatttaaacgtggcttgtacaagaaatagagtgtacagttctgaaaaatcaggtatttcctcatcaataattatgatggaatatcttaattacagtgtgtcaatgatattgggatctcacagagaggaatacatagtttcattgaggaaagcctccacgggaagatcaagtgaatctctactcatcaaaaaggcgtggaggagagcaagcagcttctatgatggagaaggtgacagcaatttaaagagaggggcccaccattcctttttcacaaaatatttcagatatccaccttttggtctgttcatgtatgaagactccaaagagaatgaaacatctatgaagactctacagaggttttcagactgcctgaggctctcagagtgacgcaaagtggagttagtagggatttaggcgggagcgctaagtgacatgcacatgagtattagggaacaggctgtgctatggtctgaatgcttgctcctcccctctattttcatatattgcaatctaatacctgatgcaatggtattaagaactggggtctctaggaggtgattagaccatgagggcctcataaatgtgaatagtgcccttataaaagaggcccaaaggggttgttctccccttctgccatgtgaagactcagcaagcagtctccatctatggggaacaggcccccacccaacactaaatttgctggttcctgcatcttggacttcttggtctccagactaggagaaatcaatttctgctgtttagaaattacccagttaggtattttttatggcagcccaaaaagactaagacaggctgaaaagttgaccatccagagggaaagaaattatttaaagattgaaaatttagcactacttcatttaccagacaatgaattagcattgctagatattactgtccggcagttaaacttcgtaacataacttactgccattaaagtaagtacatatgcaatatacagagtttggaagggaaaaataaaactatcagtgctttctgaatcataata

SEQ ID NO: 724043 - DNA, 925 bp, Homo sapiens
tttctttctttctctctttttctttctgcttatttctttatttcttcctgtctcttccttctttacttccatcctcccttcctctactrttctttttctttcttttcttttcttctttctctctttcctttctatttcctctctctttccttcgtcttttctcttttctttctttctttctttgtttctttctttctctcattctctctctctctcaaaccctgactaatatagatttgaatttaaaaaaaatgaaacatcttaaccaagatctgccaaataaggtcaggcctaatatgatactgtttcatccaatattactgttctgagaagtgtattatttcagtatgtagatggtttagctagaattctatttgtctccagtttaattagtggttaatttcttaggctcttccatcatactaatctacactcaattctcagttactccacttgaaagctgtgttaccacggtgcaatatttaccctttgatcttttttctcgtttataaaataaggctagtgtttggtatactgtgaagaatagtggaaatacgtgatctatgaacattggagaggggaggaactatatggtgaagaagaaagtgagaaaatctttcctgtggagagaagcctatacataattcacctcactagactactgccttttcccattaaactagagtgtgaaatgaagaaaatgaactagtcaatcctacttggagagattgcttcggacctgagacatctgaaatctaaccacctgacaagctgtgggtgctggtcacctattttagtccatttaggatgctgtaataaaataacttagactgggtaatttgtaaatagcagaaacttactgctagcagttccggagactgggaattctaagagcaaggcaccagcagattctgtgtctgataag

SEQ ID NO: 724044 - DNA, 925 bp, Homo sapiens
tttctttctttctctctttttctttctgcttatttctttatttcttcctgtctcttccttctttacttccatcctcccttcctctactattctttttctttcttttcttttcttctttctctctttcctttctatttcctctctctttccttcrtcttttctcttttctttctttctttctttgtttctttctttctctcattctctctctctctcaaaccctgactaatatagatttgaatttaaaaaaaatgaaacatcttaaccaagatctgccaaataaggtcaggcctaatatgatactgtttcatccaatattactgttctgagaagtgtattatttcagtatgtagatggtttagctagaattctatttgtctccagtttaattagtggttaatttcttaggctcttccatcatactaatctacactcaattctcagttactccacttgaaagctgtgttaccacggtgcaatatttaccctttgatcttttttctcgtttataaaataaggctagtgtttggtatactgtgaagaatagtggaaatacgtgatctatgaacattggagaggggaggaactatatggtgaagaagaaagtgagaaaatctttcctgtggagagaagcctatacataattcacctcactagactactgccttttcccattaaactagagtgtgaaatgaagaaaatgaactagtcaatcctacttggagagattgcttcggacctgagacatctgaaatctaaccacctgacaagctgtgggtgctggtcacctattttagtccatttaggatgctgtaataaaataacttagactgggtaatttgtaaatagcagaaacttactgctagcagttccggagactgggaattctaagagcaaggcaccagcagattctgtgtctgataag

SEQ ID NO: 724045 - DNA, 925 bp, Homo sapiens
tttctttctttctctctttttctttctgcttatttctttatttcttcctgtctcttccttctttacttccatcctcccttcctctactattctttttctttcttttcttttcttctttctctctttcctttctatttcctctctctttccttcgtcttttctctttyctttctttctttctttgtttctttctttctctcattctctctctctctcaaaccctgactaatatagatttgaatttaaaaaaaatgaaacatcttaaccaagatctgccaaataaggtcaggcctaatatgatactgtttcatccaatattactgttctgagaagtgtattatttcagtatgtagatggtttagctagaattctatttgtctccagtttaattagtggttaatttcttaggctcttccatcatactaatctacactcaattctcagttactccacttgaaagctgtgttaccacggtgcaatatttaccctttgatcttttttctcgtttataaaataaggctagtgtttggtatactgtgaagaatagtggaaatacgtgatctatgaacattggagaggggaggaactatatggtgaagaagaaagtgagaaaatctttcctgtggagagaagcctatacataattcacctcactagactactgccttttcccattaaactagagtgtgaaatgaagaaaatgaactagtcaatcctacttggagagattgcttcggacctgagacatctgaaatctaaccacctgacaagctgtgggtgctggtcacctattttagtccatttaggatgctgtaataaaataacttagactgggtaatttgtaaatagcagaaacttactgctagcagttccggagactgggaattctaagagcaaggcaccagcagattctgtgtctgataag

SEQ ID NO: 724046 - DNA, 925 bp, Homo sapiens
tttctttctttctctctttttctttctgcttatttctttatttcttcctgtctcttccttctttacttccatcctcccttcctctactattctttttctttcttttcttttcttctttctctctttcctttctatttcctctctctttccttcgtcttttctcttttctttctttctttctttgtttctttctttctctcattctctctctctctcaaaccctgactaatatagatttgaatttwaaaaaaatgaaacatcttaaccaagatctgccaaataaggtcaggcctaatatgatactgtttcatccaatattactgttctgagaagtgtattatttcagtatgtagatggtttagctagaattctatttgtctccagtttaattagtggttaatttcttaggctcttccatcatactaatctacactcaattctcagttactccacttgaaagctgtgttaccacggtgcaatatttaccctttgatcttttttctcgtttataaaataaggctagtgtttggtatactgtgaagaatagtggaaatacgtgatctatgaacattggagaggggaggaactatatggtgaagaagaaagtgagaaaatctttcctgtggagagaagcctatacataattcacctcactagactactgccttttcccattaaactagagtgtgaaatgaagaaaatgaactagtcaatcctacttggagagattgcttcggacctgagacatctgaaatctaaccacctgacaagctgtgggtgctggtcacctattttagtccatttaggatgctgtaataaaataacttagactgggtaatttgtaaatagcagaaacttactgctagcagttccggagactgggaattctaagagcaaggcaccagcagattctgtgtctgataag

SEQ ID NO: 724047 - DNA, 925 bp, Homo sapiens
tttctttctttctctctttttctttctgcttatttctttatttcttcctgtctcttccttctttacttccatcctcccttcctctactattctttttctttcttttcttttcttctttctctctttcctttctatttcctctctctttccttcgtcttttctcttttctttctttctttctttgtttctttctttctctcattctctctctctctcaaaccctgactaatatagatttgaatttawaaaaaatgaaacatcttaaccaagatctgccaaataaggtcaggcctaatatgatactgtttcatccaatattactgttctgagaagtgtattatttcagtatgtagatggtttagctagaattctatttgtctccagtttaattagtggttaatttcttaggctcttccatcatactaatctacactcaattctcagttactccacttgaaagctgtgttaccacggtgcaatatttaccctttgatcttttttctcgtttataaaataaggctagtgtttggtatactgtgaagaatagtggaaatacgtgatctatgaacattggagaggggaggaactatatggtgaagaagaaagtgagaaaatctttcctgtggagagaagcctatacataattcacctcactagactactgccttttcccattaaactagagtgtgaaatgaagaaaatgaactagtcaatcctacttggagagattgcttcggacctgagacatctgaaatctaaccacctgacaagctgtgggtgctggtcacctattttagtccatttaggatgctgtaataaaataacttagactgggtaatttgtaaatagcagaaacttactgctagcagttccggagactgggaattctaagagcaaggcaccagcagattctgtgtctgataag

SEQ ID NO: 724048 - DNA, 607 bp, Homo sapiens
actcgagggactggagataacacttccatttacctctcttagaccagaacttaatcacctgccacatatagctgaaaggacactcagaactatagtatttgttttgtgtggccacgtgcccagctacaacttgggggttccattaccactgaaggaggggacagtgaatattaagagacagctagtaatctcagccacatcacctccaaaaaggattgcatcaattcacatttcsaccagtagtctgagagaaagcccacactttatgactatttttaatttttttggtctgccctgtcaatagacttgagggcaggaaacactgtgtcttgcttgttttcatatctgcggcgttgagtacaaaatggatctcaggaaatgcctgtgaaataaagatctggatggatgcctgtggccatgtcagcaccaatatagcaagcaaaggtataaattaagcacaggttataaaaatagagactctaaggaaccttaaaaaacattgtctagcctaggctcaaaagcagttatcaaaacaatgagaaagtgggagaagtaagtaaacctaccacttaggattatgaggtggatttagtctttaagccaacga

SEQ ID NO: 724049 - DNA, 530 bp, Homo sapiens
tcatcaggtccggacgagtgtctcctggcctcttggctcttctttttccctctcaggaccattcttagagagtatctcctgtcatggctgaggacagattcagcccggcagaaaagagcctctgctgctctcagaagccacaataaaaggcctgttgcatctcattggccccaagtgtgtcacatgcacccaggcactggaacattcatggcagctttgtttgtctgtgatcatgaaaaacacagagccagcccggatgtccaccagctggagctcatggcgtggagtactctacagaggttaaaataaactggaaaagtggtcatacatgaaaatgcagtgaaagtgaaatacacgagcatagtaaacctaaagttcaggtgtgattctcagagggagggaggcaaacatgatggtggagagttacactagaagcttccrctgtgcttgtaaagtttgatatcctttgtgaaatggtttgttgcagaatagttttctatgcacctaaaatgcttttgaaaattcaagcc

SEQ ID NO: 724050 - DNA, 685 bp, Homo sapiens
tcgcgccactgcatttcagcccaggccactgagtgagactctgtctcaaaaaaaaccataaaataaaataaaaaataagctagagatggaatcttgctgtgttgcccaggctggcctccagctcccagcctcaagtaatcctctgccttggtctcctgaagtgctgggattacagggatgagccactgcacctggccagtctgtatgttttataacctgtattagtcagggtaggtaatgctagttaaaatctgtggcctgacaaagaaaacatttatttcttgctcacacttttttagatggttcttttctaagtggtgacttggggatctgggctccttccatttttgtcacaactgrcaagaagatgtgaccttaagtttgccgtgtaattttgtgcatggaagtttttttcatgggccaagcttggaagtagtagtatttcttctgcggtctgttggctgtattttaggtgcaagggggctgggaagtggagtcctttggtgtgtccgtgaggaaaatgtaatagcaccgtgtctgctatgctacttaaccaaactctgttgttcttatttttcagtagattctcttgagtttcttagataggtaatcataatacacattgagcatttctaatccccaaatctaaaatgggaaacttttgagcactgacaggatgccacga

SEQ ID NO: 724051 - DNA, 648 bp, Homo sapiens
tgagggtagggggagtttatgcaagacaagtagaaatgtgaaagagggagctaaaagaaaaatattaagttcaccaattctgaaatggctcttaaagcaaaaggaatcagcaactaaggacaaacaaccacatctaaacaagaataagaattttaattttagagcacgtgaaaagatgtgttggaggaaaaatcctgaaatataagtgaagctttgagagccttttttttttttgacagggtctcactctgtcagccaggtgggagtgcactgacacaatcacagctctctgcagtcttgaccttctaaactacggtgatcctcccacctcagcctcctaagtagctggactacaggtgtgcatcaccatgcccagctaattttttgtatttttagtagagatggggttttgccatgttgctggtctggaactcctgggttcaagagatcacccaaagtgctgggactacagacctgagtcaccacacttggcctttttttccttttttttttttttttgagttagggtcttgctctgtcatccaggctaaagyacagtggtgtcatctcagctcactgcagcctcaacctcccaggctcaacagatcctcccacccagcctcctgagtagctaggactgcgggggca

SEQ ID NO: 724052 - DNA, 904 bp, Homo sapiens
cccataatactcccttttccagcttttatatgcttacccattaagtcagacaaatttccttttcagagtttggcattgtttctttattggaaaggaaacagattgttttaggccaggaaagcttgcaaaagaaaatagaagaccatgaactatgttttttattttcttgtttttaatcatcacatctcaygttaggatttagtgttagatctcggtgtgttttctgttcagagggaatgtgaggttcttctggcacctggtttgtctttgatgtggggtaggcacagctttacacatggtctttccccaaaccatgacataaatcctgctttttattttatggcgagggtcaggtttccagtagtggcatctggcggggtcagtaaatcaaattcctgggctgtgaggatgattttacttgtgggtgactttccctgcttgttgtgagagctcagctttagtgtcacatggcccctttttggctctttcaaattttagtcaaattgcgtggtataatccataaagtgcccatcttttgtctgtttcacagtgacagatcactgagctaggataagcaggtagcagatctgataatttatatctgtggccccaaatctttgccatgaataaaggatttttaaaaaaagttgtttcctcttggatgttggcattagaaagaatttgttcatgaaacatcacattgatactaatgatatgttattcatttccccaattacatgaatcaaaggtgtatttaactacctacaatttctgacaagaatgagataaccagtgttcctatgttgatgttacttaattgaaagcaggatacctaaaatcaaaaaagaaacagaagatttattgcaactaaatatatatttgttatttggctttggaatattga

SEQ ID NO: 724053 - DNA, 904 bp, Homo sapiens
cccataatactcccttttccagcttttatatgcttacccattaagtcagacaaatttccttttcagagtttggcattgtttctttattggaaaggaaacagattgttttaggccaggaaagcttgcaaaagaaaatagaagaccatgaactatgttttttattttcttgtttttaatcatcacatctcacgttaggatttagtgttagatctcggtgtgttttctgttcagagggaatgtgaggttcttctkgcacctggtttgtctttgatgtggggtaggcacagctttacacatggtctttccccaaaccatgacataaatcctgctttttattttatggcgagggtcaggtttccagtagtggcatctggcggggtcagtaaatcaaattcctgggctgtgaggatgattttacttgtgggtgactttccctgcttgttgtgagagctcagctttagtgtcacatggcccctttttggctctttcaaattttagtcaaattgcgtggtataatccataaagtgcccatcttttgtctgtttcacagtgacagatcactgagctaggataagcaggtagcagatctgataatttatatctgtggccccaaatctttgccatgaataaaggatttttaaaaaaagttgtttcctcttggatgttggcattagaaagaatttgttcatgaaacatcacattgatactaatgatatgttattcatttccccaattacatgaatcaaaggtgtatttaactacctacaatttctgacaagaatgagataaccagtgttcctatgttgatgttacttaattgaaagcaggatacctaaaatcaaaaaagaaacagaagatttattgcaactaaatatatatttgttatttggctttggaatattga

SEQ ID NO: 724054 - DNA, 904 bp, Homo sapiens
cccataatactcccttttccagcttttatatgcttacccattaagtcagacaaatttccttttcagagtttggcattgtttctttattggaaaggaaacagattgttttaggccaggaaagcttgcaaaagaaaatagaagaccatgaactatgttttttattttcttgtttttaatcatcacatctcacgttaggatttagtgttagatctcggtgtgttttctgttcagagggaatgtgaggttcttctggcacctggtttgtctttgatgtggggtaggcacagctttacacatggtctttccccaaaccatgacataaatcctgctttttattttatggcgagggtcaggtttccagtagtggcatctggcggggtcagtaaatcaaattcctgggctgtgaggatgattttacttgtgggtgactttccctgcttgttgtgagagctcagctttagtgtcacatggcccctttttggctctttcaaattttagtcaaattgcgtggtataatccataaagtgcccatcttttgtctgtttcrcagtgacagatcactgagctaggataagcaggtagcagatctgataatttatatctgtggccccaaatctttgccatgaataaaggatttttaaaaaaagttgtttcctcttggatgttggcattagaaagaatttgttcatgaaacatcacattgatactaatgatatgttattcatttccccaattacatgaatcaaaggtgtatttaactacctacaatttctgacaagaatgagataaccagtgttcctatgttgatgttacttaattgaaagcaggatacctaaaatcaaaaaagaaacagaagatttattgcaactaaatatatatttgttatttggctttggaatattga

SEQ ID NO: 724055 - DNA, 617 bp, Homo sapiens
gttttgtgtgtgtgtgtatttttagcagagatggggtttttgccatgttggccaggttgatctcaaactcctggcctcaagtgatctgcccaccttggcttcccaaactgctgggattacaggtattatccactgcatccggcctactacatatttcttaaaactcattgaattctgcacttgaaattggtgaattttatcattttatcatttgtaatttatagtgcaaatcaatttgtatctcagtagagagaatgagagaataggaacaccccttctctctctcgccataaattgttttcctattatttgaaatgtagctatggagccaaaacaggttctgacttgcttttttttaatgtagattttattgaagtataacatacatacagaaaagtgcacaatcattagyatatggcgcaataaatttccgcaaagtgaacatattgggtaactgtcaactagatttaaaaaatccaagatccctaatgtccctccttgtgtccccttccagtcattaattcatctccccaagtgtaattgtaataggttcattgcccaatgcacacagcaagtcaatctacatggagagacactgggttgcagcagagaaagag

SEQ ID NO: 724056 - DNA, 617 bp, Homo sapiens
gttttgtgtgtgtgtgtatttttagcagagatggggtttttgccatgttggccaggttgatctcaaactcctggcctcaagtgatctgcccaccttggcttcccaaactgctgggattacaggtattatccactgcatccggcctactacatatttcttaaaactcattgaattctgcacttgaaattggtgaattttatcattttatcatttgtaatttatagtgcaaatcaatttgtatctcagtagagagaatgagagaataggaacaccccttctctctctcgccataaattgttttcctattatttgaaatgtagctatggagccaaaacaggttctgacttgcttttttttaatgtagattttattgaagtataacatacatacagaaaagtgcacaatcattagcawatggcgcaataaatttccgcaaagtgaacatattgggtaactgtcaactagatttaaaaaatccaagatccctaatgtccctccttgtgtccccttccagtcattaattcatctccccaagtgtaattgtaataggttcattgcccaatgcacacagcaagtcaatctacatggagagacactgggttgcagcagagaaagag

SEQ ID NO: 724057 - DNA, 1017 bp, Homo sapiens
agaaaaaaaaatagaaaacaaacattgtattttaaaagatgctaatgtgtcctaaaaagccaaacaaagcagaataaatgcaaagatctagaaggatattattatgaaataattaataacaacaagaataaatggagataataaaaatacatgtgatttgtatattgatgcacaaaagcaacttagggtggtggaatggacattggacttaacacatttatgccggaggtcacaaatttttttgtgtgaaaaatcagaccttggcgatgaccttgagcagtaggatacaaataactcccacaagcttagcgttccaatagtagaacactaggcatcaataacttaagacctctgagactcagtttcttcacctcccaaatggggataaaacctcctttttcccagtggtaggtaggacttacaccaataaggatttagcygaccaggcgtggtggctcactcctgtaatctcagcactttaggaggccgaggcaggtggatcacctgaggtcaggagttcgagaccagcctggccaacatgatgaaaccccatctctagtaaaaatacaaaaaattagccaggcgtggtggcgggcgcctgtaatcccagctacttgggaagctgaggcaggagaatcgctcgaaactggaggtggaggttgcagtgagctgagatcacaccattgcactccagcctgggcaacaggagcaaaactctgtcaaaaaaaaagaaaaggatttagccatggtagagcccttccctctctgtgccccagcatagaaggtaattacagtggggattatggtgtgccagtagagaagtttctctttaaggtttaagacatgtgttcccttacctgagtttctttcttctctactacttcttgaatctttcctttcttccttcactgttgatctacactagagaggttctgcagaagaacaacctgaggtcactgagctctaggtcaggccagtcagagttcacacaccggattcggaaacaccttgaaataa

SEQ ID NO: 724058 - DNA, 1017 bp, Homo sapiens
agaaaaaaaaatagaaaacaaacattgtattttaaaagatgctaatgtgtcctaaaaagccaaacaaagcagaataaatgcaaagatctagaaggatattattatgaaataattaataacaacaagaataaatggagataataaaaatacatgtgatttgtatattgatgcacaaaagcaacttagggtggtggaatggacattggacttaacacatttatgccggaggtcacaaatttttttgtgtgaaaaatcagaccttggcgatgaccttgagcagtaggatacaaataactcccacaagcttagcgttccaatagtagaacactaggcatcaataacttaagacctctgagactcagtttcttcacctcccaaatggggataaaacctcctttttcccagtggtaggtaggacttacaccaataaggatttagccgaccaggcgtggtggctcactcctgtaatctcagcactttaggaggccgaggcaggtggatcacctgaggtcaggagttcgagaccagcctggccaacatgatgaaaccccatctctagtaaaaatacaaaaaattagccaggcgtggtggcgggcgcctgtaatcccagctacttgggaagctgaggcaggagaatcgctcgaaactggaggtggaggttgcagtgagctgagatcacaccattgcactccagcctgggcaacaggagcaaaactctgtcaaaaaaaaagaaaaggatttagccatggtagagcccttccctctctgtgccccagcatagaaggtaattacagtggggattatggtgtgccagtagagaagtttctctttaaggtttaagacatgtgttcccttacctgagtttctttcttctctactacttcttgaatctttcctttcttccttcactgttgatctacrctagagaggttctgcagaagaacaacctgaggtcactgagctctaggtcaggccagtcagagttcacacaccggattcggaaacaccttgaaataa

SEQ ID NO: 724059 - DNA, 3146 bp, Homo sapiens
ccagtctatcattgatggacacttgggttggttccaagtctttgctattgtgaatagtgccgcagtaaacatacgtgttcatgtgtctttatagcagcatgattctccttctgttattatttgtattattccacagttgaggccactgagactcagagatgttaagtgacttactcaagctcacacagctggaaagggcagggctgagattcaaggttatttattccagttatctattgctgcataacaaacccataacataatgactaacacaggaacacatactgtgtgcataaatgtacagtttgggtagggcttggcagagagctcatctctgctcctcttggcrttagctgggcatggagttttctgaaggctcattcaccatgtgttggatgagtggtctcgctgtcccctgcaaccttagctgagtgcctctccatagggtctggattccttcctcacaacatgctacctgtctccagagccagcattctccctcccatcaaggattgaatgagtcaagaataaagcattaagccaggggcagtgtttcacacctgtactttgggaggctaagacaggaggatcgcttgagcccgggagttcgagaccagcccaggcaacataatgagaccctgtctctaacaacagcaacagcaaaatagccacagtgagctatgattgcaaggcaagcaggcaggcaggcaatcaggcagacaggcaggcaggaaagaaggaaggaagggagggagggagggaggaagggcaggcaaagagctgtctggaactgaaaagtccccgtataggatccaagcagaatgttctgttcctgagccctgcagggccctggtaagcctggaggttaggatggaaccagctgtttccagaacctccctccaaaaaagaggaggatggagaagggactggccctggaagtcctgaactggtcaggtcagggagccaaaccgtagaggtttcaggcagaaatgagcctttcaaatgccagactgcccctgatacagctgttcctcttagaagtcttggttcaggccaagaaccaggagctgccctgcttccgcctctcgcccccactgtcaacagtgccacctcccaaatgtgctgcgtccacacacttcctcagcccccatggtcacaccgcaactctggcctggactggtgcagtagcctcctcactgtcactggcccaattctaacacattcccactcagcagccagagatcttttgaaagtgtaaatcaaacatcacatcgcatcacttggctgttcaaacatctgaggacttcttgtccttagaattaaattcgaagacaagaaacaaaaacagcctgggcacggtggctcacacctgtaatcccagcacgttgggaggccgaggcaggtggatcactggagatcaggagtttgagaccagcgtggccaacatgatgaaaccccgtctctactaaaaatacaaaaaattagccgggcgtgatggtgtgctcctgtaatcccagctactcgggaggcagaggcaggagaatcgcttgaacctgggagatggaggttgcagcaagccgagattgcaccactgcactccagcctgggtgacagagtgagagtctgaaagagagagagagagagaagagaaagaaggaaggaaggaaggagagagagagagaaagagaaaagaaagaaaggaaggaagaaagaaagaaagagaaaaagaaagaaagaaagaaagaaaaagaaaaagaaagaaaggagaaaggagaaaggaaagaaagaaattaaaaagaaagaaaagagaattaaattcgaactcttcaaactcaaactcctacaagacagcactgcatctcaccttgccctccctgctccctctgcctggaaccatctcccacatttatctgtgcttggctggtttcctcttgtccttctggtctcagtatggaggttgcctccttggagaggtgctctgaccacgtggttcaaatcagtcccgacccccaccttagatctttattatctggtgacatcactttatttatttatttatttatttatttatttatttatttatttatttacttgcttttttctttgctcccctctactgagctctggtctcttgagctggtcccaagtatcagagtcagggcttggcacagagtagacacacaataagccgagtgagagtctaatgaacacacacacacctcccttggagcgctctcactcgtgtccactcaatcatatgctgagaccctctgccacacttgcaaacacagacacacacttctccacccctggacacgtcctgcgcgggagctccgagatgcgtgagcgcctgtaaccagggatgctgccgccccctcctggaaagattgggaaagtacagccagagtctttctgggaaaccactccaatgctaacctcaggctaatcctaactccccttccttgcagacagctgtccctgcccaggcagggtcttcagatcatttctgatatttggcctagggcctgggctgtatgttcttaccaggtgcggaggaaggaaggaaggaagggagggaggggaggggaggggaggggaggaaactgacgcaggtaagagcattcacctctttccctctccaaggctcagtttcaggatcattgtcacaggtctgacacgaatcatgtgcaataattttttgtacattcataggtttggaacacggtataaagggccttgaatgccagaatgaagccttgggttttatcctgcagtcgttgggagccactaagagtttctgagcaagagagggacaggatccgaactgtgctttggaaagatgaaccagccggtgtgcattcatgcattcactcattcgttcattcattcattcatctgaccaaaatgtgctttaaacatcttttgcatgccgggccctgggaatgcagcagtgaccagaggtgctgttggacttcatggagctcatggcctcgagtgacatgtgtgggagtggacatttggacacagaggaggcatcaccccagtcctaggcaaggtgagccctggggcaacataaggctcacataggcgccttagcttctgccctgtatgtagacagagcagggtgggagtcaactaagccactg

SEQ ID NO: 724060 - DNA, 2016 bp, Homo sapiens
atctgttgctctagttacacccttttgtagacagttattaactttatttttttttttgacagggtctcactctgtcacccaggctggagtgcagtggtacgagatctccgctcactgcaacctccacctcctgggctcaggtgatcctcctacctcagcctctcaagttgctgggaccacaggcatgtgccaccacactcggctaattttttttgtatttttttttttagtagaaatggtgtttcactatgttgccaagtctggtcttgaactcctgggctcaagcaatctacctgacatggctgcccaaagtgctgggattacaggcgtgagccaccaagcccatcctaattgttaactctttagtgtttcctatgctctaactttctctctctggattaagcaaacccagattttttttttattaggcctactttcaaccttaataaaatttttgaaatttttttgaagctctgtagcagagcccacattgaggattgtcagctcatttgatgtgctcatgtttagatgggtgatattcctactcctccttggcatttccttttaattctctttctacttgtaaaaaatgtccatttgctgtaagaatacatggattctagatgaacagaacattcccaccttaattcaaatcccactcttacttgggttctgatagagcagaatagatttgcctctcctggaaatatccaaatttagaactccatttacaagtctggtcatggatgtctccagtggtttttcctaccctatgtccactgggatcctccaaagtggtttgctgcaaacatgtttcttcacagaatgagtaattaagtcaaatcctctgagtaattatttttcttttctgagacaaagattagatgctgccagcattgttcttctctgcttgcaggtgtttgtggaatcattccatttctgagtaatctcagatgagttttagaatgctctaaagtcccttgaaacatagatgaaagtaaggaatatcagaaaagcataagtgaaggcattttaaatgggtgaacatttatagttgttaaggaatgcttgaatgaaaggaaaactgctttcagtctgcgtttttaaagaggatagtttattattattgggtgtttgtattcctaaaaacaccttttatttatttctttttgacagagagggtcttgctatgttacttaggctgggcttgaactcctgggctcaagtgatcctttctcctcagcctcccaagctgggactacagacggtgtgccaccacacctggcatacttcttgaaataatgtatattttatctaggtaattatatgaagtgcctggggcaatcataaataattttataatggatcagaatttaagctcatggtgtataatacatctgatcattttgatgaaaaattgacataaattatacacagttttttaaaaggattttaatattacaatttaatgcattttggaaaagcaaatgtaaaatgacttgggcttaaaaaaccagaatttatggctgggtatggtggctcttgcctgtaatctcagcactttgggaggccaagacgggtggattgcttgagcccaggagtttamgaccagcctgggcaatatgacaaaatctcgtctctacaaaaaatgcaaaaaaattagccacacacggggttgtgtgcctctagtcccagttattcaggaggctgaggtgggaggatcgctttcacacaggagattgaggctgcagtgagctgagatggtgctgctgcactccagcctgggtgacagagcgagaccctgtctcaaaacaaaacaaaaaacaccagaatgtacaattctgtgaatagtcagagacaaatcatagaactattttgattacaagtgcaaagtaattttaatgttggttatagatttactttcttattcccctaataagagtaaaaaatcatggttagatgctacgaagtaggtggcaatgccttaaccttatgcatgttatcaggcccaagggc

SEQ ID NO: 724061 - DNA, 1609 bp, Homo sapiens
ctcagattatttagggaccacctctcacctctctcccaaatacccctgttgtctcagcagtatcactgcctggagtttcaggtaggagcagctgcttctctcctaaggaatgttctgggattcgcctctgagattttcttcacatctgaaactagctcaatggtgccccatcactcacttgagtctcccaagcaaatgtgcccacagctgtccccttaaaagagggagtatgtgccatggcttcagagccaggcaggctctgcttctgcttgactgtgcaaccctgggcaaatccctttacctttctaagcctcggtttcttcctctatcaggtgaggatgattagcattccccatataaagctaattcatcacttgcaagacgtgcattttccttacattgtaaatatcttaaattggaatgcattgtatattcaatggcatttcataatttaattggcaatttaaaaatttcttagtggcacattaaataatgcatatcttaatcaatkgtattctagtgtgtgtggaatataatatgatgattagatgagaacatgcttggttatttacctagcacagcctaggagctcaaacactagtggtttattcctctttacctttattattattattttttgtatttatttatttttgagactgagtctcgctctgtcacccaggctggagtgatgcaatcatggctcactgcaacctccacctcccaggttcaagtgattctcctgcctgagcctcccgagtagctgggattacaggcacgcgccaccacacccggctaatttttgtatttttagtagagacagtgtttcaccatgttggccaggctggtctcgaactcctgacgtcaggtgatctgcctgcctcggcctcccaaagtgctgggattacaggcgtaagccaccatgcccaacctgcccttagtttaaaatattaaattaagtgagttacttggcatcacaatattcgggggttttaagtccatgatgggcctgcatccctttcctctcagcttctcccaagccttagcataatcctgccggcccctctaactcacagaaattcttgaattacagagaatgtgttttgttccacaaagtagaaccttcagggatcttggggcagagccatctctgagtctcctttccttgtccataattcttatattgcaaggttgttgtgaggattaaatgagaggcacatagtctagcatacaataggtgctcaactaatgtgggctatctggttttttccccaggacaaatacttcccaggctctttcattaactggctgcttgaaagtaagttttgttttctcatatccaccccactgtctcccagtcctgcctccctcttcagggcaggacagtccttcctcaaacattggtgtaaaaccgtaggacctcagagcacctacctgacacagaatttgtgccctgatcaatagcaccaaagcagggtttctgaatagtcaatttcatggtgaccagtgttgcagtgtggttcctgagatagcccactccactatgattactgttacaatgcattctagggccatcctattccgtagtgattcttgttattgagggatc

SEQ ID NO: 724062 - DNA, 1006 bp, Homo sapiens
acttcttggtgacttcgagcagtccttcagcttttttttctatgactatctttttgaaattttgggattttttttcatctcccttatcacaaaattgtctcactattgtttttgggggaaaaggcacatctcatttgctggactcttgtctcagagtcaggtttactgcccatataaaaaacaacagatggatgactttcagagagaataacccataatataaacggatttctttaaatgtaaatcactttttccgtaagtgaccagttatccaaaccttattttatattttagatcctatagcaatggaactcagcgatgcaaatctgcaaacactaacagaatatttaaagaaaacacttgatcctgatcctgccatccgacgtccaggtaaagaaaataaacgttttttggttgattaattccttcaggacaggtgagagaaacctatgtattatctgcctccttataaatatatttwaaaaaattcatacttgggttctcaagcgtagtttataagtgttacagctgctataccatggtgtgttgtttcttttttgagtaaaatagcttttatttggcatcttctgggattaaaaagtactagttttcggataaaaagtactgacatgtttagaatgctttgtctttgaccttttccaaaatacccacttaaaacatgcctgctttaggccggatgcggtggctcacacctgtaatcccagcactttgggaggctgaggcaggcggatcacgaggtcaggagatggagaccatcctggctaacacggtgaaaccccgtctctactaaaagtacaaaaaattagccgggcgtggtggcgggtgcctgtggtcccagctactcaggaggctgagtcaggagaatggcgtgaaccccggaggcagagcttgcagtgagccgagattgcgccactgcactccagcctgggcgacagagcaagactccgtctcaaaaaaaaaaaaaagcctgctttagagataaaat

SEQ ID NO: 724063 - DNA, 643 bp, Homo sapiens
ctcccaggttcaagcgagtctcctgcctcagccttctgagtagctgggattacaggcatgcgccaccacgcccaactaattttgtatttttagtagagacggggtttctccttgttggtcaggctggtctcaaaccccggacctcaggtgatccccccaccttggcctcccaaagtgycaggattacaggcatgagccactgtgtccggtcttgagcaggtttttaaaatctccagtggccataaaactagccagggtagctcatgcttttactggttggaataaggagccaaaaccaacaaaataatatttattagggctcgatgcccatttctgtggctaaggcttaggtttggtgtgcagagcctggcctgctcttgtgggctgtggttgctgtgacagtttcgttttctgaatctttgtaatgctcttccaccctgctcgtgctgcccagaggctgatctgcaaacctgggcagtattccacactgaagctcagtttgcaaaccttctgctgtgttaattctggtcagtttcacacagaagtcacgagggcctctgcccaggaccttctattcacatttcaagaatccctttctgaaattctccaactctctggtcaggaggaggagcaccattggggc

SEQ ID NO: 724064 - DNA, 2329 bp, Homo sapiens
catctcctatttggtggtggtggaggaagccatgttttagaaagcataagtggtggactttacaagttgcttttattttctgagatagaaataaacccaggagtagtgactcacctccctctagcctggctacaattttccacatccaattcaaatattgtctttaatttttaatttggatctgactgatgcaaactaagtgcatcatctctgccaccagctgggcaaagcatcctgttccctgtggtacaaccatcctgttccctgcagaatgtactgcaggaaaagcctcaaagatggatgtagggaacagtgagggcgggcattgcatctgcttttgacaaatgagtattaaatagaagaataaatggcactattgatgcatcctcttttatttatggagagctttctcaacttggcctcctgcttaccagtcttgcagccccgcatgggccctggatctgagagtctgtctgggagatagaggtttgcttgacaaaggcctttcacacacctgtggccacacttctccctacagcctggagaatagagatccacagagaccctagaatctgcctccctggcattctcacttacactgtgatcattaaaaagtgtattggaatctactccaggagggcaggaacatgtctgtatctccagccctggaaccatggctgccacgaagtacatctccaggaaacagctggtgagcaaatgaataaaggaataaacatgtctcagaatgttgtgaactacggatttttcattcaaagttgctggaactgaaaccagagaaaggtttccatctttctgattggccgtcttaacacatgacttacctcatagtctaagatggctgctggagcaccagccatcatatcctgttttcagactggaagaaagaggaaaggaagaaggacagcatcctagaagctgccttcctggctgtcatgcacatttcattaggcagaacttagtcacttggtacatttcacttcatgggagtttgaggagggtgttcttttatgacaggggacaatttgttacaccaaagaaagaacagaattttttggctgggtaagttggctcatgtctgtaatcccagcacactgggaggctgaggctggtggattacatgagatcaggagttcaagaccagcctggccaacattgtaaatccccatttctactaaaattacaaaaaaaaaaaaaaaatcagccaggtgtagtgtggcacatgcctgtagtctcagctactcaggaggccgaggcaggagaattgcttgaacccgagaggtggaggctgcagtgaggtgcgatcataccactacactccagcctgggcgacagagcaaaactccatctcagaaaaaaaaaaaaaaaaatcagaactttaatattagagaggaagggagcatggactttgggctgagcaggcagcaatgtactacaacatgcaaaacacccagaatctgccttccaaaatatcagctagttttctagccctggtaaatttagctttctttcatgattatatgatcaatcaccttcttactgggaggactggcatctccatgaggaaataacctgagaggcctttactgagtactaagtcccagctcccagcatcatgcttgtcccggggcagagggaactcaataacggttctgcctcatgcagaaccctggatttcaccatgggtgtgtggacatgcccaggacagcttcgctggtgaggcagggaacacaggcagtgccgctgtgcagaagacgagttggtctttaccgtgtggtggcatcaggaggcctgtggagcactgaggcctgtggaacactgaagttgcaactgtctgggatagtctccaagaaactgcaattcagcagctggaggtggggctcggtgcctgcattcatcttgatatcccctgcattaccacagctgcaatcagtgaagtctcagctggaaaatgaagctgctcgaggggtctgagggtctacatgttgcccgaaggggcccccccagccctgtgctgctctccgccacctgtctgggtggacgctgatggaatgatcatgaaaactgtggatgatacaagtatgagagggacagcaacccaccaaccgcagcagcaaggagaggcttcaccccgcaggctgacgttgaacagaaatagacgtgaggttctgagttgaagcctgaaaagcacagccaatatgtgcataaaagaaacgtgtaggatcagttgtttgagtascatcttcaaggctttcttcaagtcaccctcataatgcagctgtcaggaaagtatttaatggatactgggatg

SEQ ID NO: 724065 - DNA, 605 bp, Homo sapiens
tgcacagccccttttgccagggamggtggcacattcacaggctccagggatcaggatgcggacatctttgggagccattgttctgccgacacacctattacatgaatgtcttagaaaatggcagaaacacaatgtgcctaactgacagcggtgttcctggggaaggatggtaatattttatcaaaaggttcattccagacaaataatcctacagccctgggagaaaacgatgcgtttccctggatccagccagacccacagcccatgaggctgcagtctcttcacaggactcccaggatcccgcgccctcaaggcctcctggggcaatcgcaggattgtgctgagccgggccctgacaatagtctccactgcatctcggaaccctaggccttccctgaaatatcactgccaactctccatcatcacacaggaaaatcctgtcccgaggtgaccatggacagcctcctaagtctttcctgctcagctcagagcttgggagtctggctgggccgggaatcatttatctgcccgtgaaaagatcacctaacaccagctggctgaagtttttaaaaagtgtgcaggtggggactgtgggctgtcactgg

SEQ ID NO: 724066 - DNA, 618 bp, Homo sapiens
tcgagtcacattgtcttggtgggttgaaattggccatggtagaagaatttatcctgtggaatttgaagtggcaaacacttcaaatcagagttttatttcctcttgaacaagttgaaaatatttaccagaatagcattgttaatatccataaaaattgtttggaaaatamagacacataaaattatgtttattaccagaggacctcaaaacactgtgaagtactcacagtgaccataaaaaagatgactccattatagtattaattttccctgaaatttacaggctaggtataacattaaacatttaatatatttatccttaaaatggcaaagttatatatgtcctagaactctatgaaatacgctacacaaacatgtttttcttcacctataattgacccactgcaagaggcattccatttaccatgcttgaacaaagatttgtctttatagtaacagctatgatcctaaagttggactaagttctttatgcacattgacacaattctcacaacatccttataaggaaagcactattatttcccctaaagatattaaaaagtgatagcacaggtaagtcactctgaacatagaaatacaaggggaatttaaaggtttg

SEQ ID NO: 724067 - DNA, 1553 bp, Homo sapiens
tggtggcttcatagaatgaggaagttttctctctgcttataatcttctgaaagagattgtagagtattggtataattccttccttaaatatttgctagtatgtatacatctttaattttactgttcattygaatcatgtcatctatttgaatagttcaatattatttagggagaggctaaatcaataatagttaaataggtggactatggtttagtagcaggtgtttcatgagggcccttcagcctgtgggcatgatcaggtcacagggtattatattttccctgtgggctcatcatggccgggcactcctaatcactgctaccaagcttactaacaataacaaaaaggaacgctctatcctgttataagtgctgttacatggctttatcttattgagcaagtgtctctaggctaatcactggactgtggtcaccttagaacaactctctggtgaatgctgtgatgttcacccaaatctccattcaggaattgagaacttattccccatctgtggaaaggctacggaagatgccccttaggtcagatctcctgccaaggacagcctgcacccagtcactgatcactgtggggacataaaggcccgggcccatcaccccaactaaagggctacttaagctcctgagatccccaaaggctgagacctctgttggaacctcatggcagctcaatttctgtttctgcccaatcctgctttcttttcttctgcagatatggatcccaggagctatccaaaggtttcctggggtagaatcaaatcactgatccttgtttttaaagcgcccccttttaaaatagccttggattgttagtgatgctgttgtggctacaggctcggaagtcaagctttctgggtttacctcctggttctctcatctctttactacagcaccttaggcaagtaacttaatctcactgtcagtttactcagctataaaatggatataatatttgcaccaacctcatgatatatatcccagatacactctgactctgagttgtttagtgtattagggaggaaattgacatccaggacagttaaactctaatgggtggaggaaagataaagagaaaacaatataaagcgtggcatgctgactaaggactgaggactaagactagggcccctccttgtgaccttctcaatagagaaaatgtaacggaaacatagttacagtaaaggtcaggaagaaaaatggatggggaaaattaataaatgatatctatgataagtcaattatttattatactccatccacttccaaaaataagtggatgtaacttataaatttgaatacaacatatggcaaagacaacttttttctaaagaggaaaaaattgctagaattaaaagtataggcatttcaggtacctggaatgaaaagctccttttatctcatctgaataacaaagtataaccatttgtctggaagaaaaatatcatgggtgttacttcacatcttaaatatgttccaaaaactcacagtggaaatattgtttggatgtttgtatttactttccattaaaaccaaca

SEQ ID NO: 724068 - DNA, 1332 bp, Homo sapiens
tctattaattcagcttttcattcaacaaatgtttattgtgtacctactatgtaccagtttacactccagaagaaaaaagactattttaataaagcatatagtatgttctatggcaaagacaaaagctgcaaggtggaatatggggaattctgaaatggtattttgtttgtagaccccactgataatgtaaatttgataaaagacctgaagggggtaggggagttagccatgtacaaaggtggggtgtcttagtcagtttgggctgctataacaaaaacatcatagactaggtagttcaaacaacaattcatttctcacagttttagaggctgcaaagtccaagatcaaggtattggtagattcagtgtttggtttgcgaatttccgtcttcttattgtaactgcacatggtggaaagcagagagacacagagagagaaacagaaagagagagagagagagagagagcaagttattgtgtctctttttgtaagggtgctggtcccattcatgagggctccacactcttaacctaattagctctccatgatcttatctcctcctgccatcacattggggatcagaataacaacaaatacattttgggggacataaacagtctgcccacaaaatgggggaagtaagtttcaggtagaggaaacagcaaatgcaaaggcccaggggttgggaacacatctaatgagttttaagaataccccgaaggccagaatggctagagtgggttatgaggaggagaagagaaggtgaggtgagcaaggtgatagaaagcttgatcaagtggagtcctgtaggctgttaaaattgttgtggcttttattctggtgaaatgaaaaaccagcggagcattttgagyagttgattgatttgacagcatcactggggctggtgattgagaaaagtgaaaggaggccagaaccccaatttgcaggctactgcaataacacaggaaaaagaggatggtggctagtactgggatggtatcactgaagttagtgagaagtgattagattctgaataataatgataaacaatttgagttaaaaaatccaagatatgtaaatcataatttgattttgataatagcaatgtttatttgatatagcaagagttcttgatattaaaacaatgcttttgacaaaataatgctgaaagtacctattctatgttcacaattctactggaaatgccatgaatatgaatattatgcatatggaacaccaaatatcagcattaaattctttggcaatatatttttgtctttcctagcatatctcaaaaatcaagatgaatccttaagctttctacccagatgt

SEQ ID NO: 724069 - DNA, 946 bp, Homo sapiens
tcttctagccagaaaagccagtctaggagttagatttaaatgttatttccattcaggttggggaattcagaggaccggcttgaagtcagtcccctgcctgcyctggagaatcagctgggggccaggggaccaccaccttgcttcctctggaagaagcacactgttagagtgcatcggtcaccaggcatttcatgccacactagggctgtcaggagtccaatatctaaaccaagtgatgcctgatctgaaataagagaacactctgagtggtcctaatttcaccagaagtaccatgtcaatggttataagtaaactattcatgtcgtcggtggcctggaaaacatttagaaaccttcatgaccttaattcttcttagctctttaccatttttatagactttcacttgcaaatctcatcttatctcataaaatatacatgcgatgatatttaaattaaaggaatttatcacaattaaatgactaatttcatatctggcccaatacttactgttcctttgctatctttcagaggcttgagttagtttactttaaaagactgtgtggggccaggcgcagtggctcacacatgtaatcccagtactttgggaggccaaggcaggcgaattacttgaggttgggagttcgagaccagcctggccaacatagtgaaaccctgtctctactaaaaatacaaaaattagctgggcgtggtggtgggcacctgtaatcccaggtactctggaggctgaggcaggagaatcccttgaacccgggagatggaggttgcagtgagcccaacctgggcaatacagcgagactcagtctcaaaaaaaaaaaaaaaaaaaaaaagaccacgtgctctccttccaacagcacagtctttttgaaatatctgaagcatgaccatgtgatgtaagcagacatcactgagctgtttccagacatca

SEQ ID NO: 724070 - DNA, 1356 bp, Homo sapiens
atttagtaagtacttggtacaggcagctgtgactgttattactattagattgctttttgtctggtttttgctattttccttctgaattggattggcagttctgtgactgctgggcccacacctcacttggctattctgtccccagtgtcaggcccagacccaggtacatagagtatgctcagtaaatgttcattaataagtgaatgacaagaggctgggcgcagtgtttcacgcctgtaatcccagcactttggggggccgaggagggcagatcacttgaggccgggagttcaagaccagcctggccaacatggtgaaaccctgtctctaataaaaataaaaaaaattagctgggcakagtagcgcatgcctgtagtcccagctactcgggagactgagtcaggaaagtcgcttgaaccctggaggcggaggttgcaatgagccgagatcatgccactgcactccagcctgggcaacagagggagactctgtctcaaaaacaaaacaaaagaaaaaagaaaaactagtgaatgacaaaagacttagggggttagtgacttgcctgcggtcacaaagccaggatcaaacccagtctcctaattctccaacccatgctctttcagttagccacacagttctaaaaaaagtcgccttgttaccacggcagtgatggccgagcccccttcttatttgaactttccactgtaattacatgaaggcaacttgtttctttaggttttaaagtaatcacctttcccaatctttttatatcaatacatgttcattacagaaaaagagagaaataaaagaaggaagtgaaaattacccataatcccaccactaaaagataccaattcacaccatttttggtatttatccttccagttgttttttatttttctaaataaatttaattacaccttttaaactcattaacctttgttcatactttcataaataaagcaaaagtgaccaactcttccattatgtttgttgaaaattattgtgcttcttgcctaatatctctattctgttacaaaaatggaattggaagaccaatgctgaaaaataccatcttaaccagacaagcaggtctgtgtggattaggggaaacactactacaagtctatctaaaaagcgtaagaagaatcagatccttcacgcacccagaaagacattgaacatcccccacaaaatctaatacagctgagatcccaggagatcatgaacaatttttgaaaataaaacattttgttctttctacaaaagtaataaaagttcattaaagaaaaagtaaaaataataataagcaaacagaagaaaattaaaatgcctgcagtgctgccaccacaggta

SEQ ID NO: 724071 - DNA, 2716 bp, Homo sapiens
agaggcgtgacataacgcccccattttcaagtctttaagaggtaagaaatcacaaacaccaggatgagcgctcctatttctgtctggagtagggtaagagggaagatttctgtgmcgcccctgcccacacttttggatgaccttcggtaagaatgaccaccagccatgtccagaagataaacctcaaggcgtaactagtctgcacacggaatcattatcccttgaatgtgttgggagtgggtttcacaagaatgtgggtgctgagcttggagaatccagcagtgatgaagtatttaagggactagagttttagagtcttataaagagtattgattaaaggtcaagacttaggctgggtgtgatggtgcatgcctggaatcccagcattttgggaggccaaagcgtgtggatgacttgaagccaggagttccagaccagcctggccaacatggtgaaaccccgtctctaccaaaaaatacaaaaattgtccagcgtggtggtgcacgcctatagtcccagctactggggaggctgaggtgagtggatggcttgagcccaggaggtggaggttgcagtgagccaagatcgcgccactgcactacagcctgggtgaggaagtgagaccctgtctctcaaaaaaaaaaaaaaaaaaaaaaaaaaaaggacttatgaaacttacatgctactttgcagattttttttccagttaaatagacaaataattgccgttcagtaaaaaacaataatctgaaagctttattatctgaaaggtttattatctgaaacaataatctgaaaggtttattatcttgtaggactttaaccagtttcatacttagccttgcaatcacactctaatatgccttaattaaattgcctatacctacctagcccctcaatgatctctttttaaaaataaattcattcaagttggacaagtatcctcaacgatctttgacctagttttaacatttcattgattccctattaattgatcaaaattgattaaaatctttgacatgagttcattttatatttgcatgagagtcataattttgcctttttgaaaactgtactttaaccatctacattgggaacaaaagggaaaataaaagcctttgcagaggctataatgaaataattatggtatatttcatcgtaattcccatgaaatacatttaaagcaatctttaaaaaccgatcatctgaaatgtgcttgcatttgtctagaaataagatagtgcatatctttagacagagcagttgttgcaatatggcagctgccctgaagggtccagattgaatgcagcttagctggcggatttgcctattgtaaaagtaaggactttttcccagagaacaatggggtttttatgatcatccaccccactgggcactcacagctgtccaagatgaatagcagcagtcttattcttgatatatgatttattttgtaattttgacctgctgtcttcaggacagcagaccacatcttcaaaggatgtaaactcccagcaaaggaaaactctaaatatgttgccataacacgattcccctcaatatgaatgaaacactgtatggcgtttcattacaattgacaggggtgtctctggacagctcatgcaatcaattaattatgcctcagcgtttcagtagcaaagaccatcaatattaatgttacaaaagacgaatgaaatgcatgtgcaaagtcttggggagttccttacctggaatggagggaaaacagggaattatactgaatgagaacctattttgtgttggatgcactgaagtcataatattacctatttctatgaaatctcagaggcagactttcttatccccattttacagatgagagaactgagggtcagagagatcaaatgacttgtccaaggtcacttaaattctaattggttcctcacatccattctttcaccttataatccactctccagacactagccagaatattttattttatacacataaaattggatcctgttggtctcttattttaaaaacctctaattgcttagaactgcattcagaacaaaaggtcaccttcctagtgtggcttcgaggcaggatcagcctcccagtttgcagctctaccctcattcatttccctccagtcacattgttttcttacttttctcaaatgccctgaggttgcttccacctcagaccttttctttgctgttccttctgcccagaactctcttccgccagatcctcctcctctgggtctcagctcgagtcacccctttgcagaggctgcccctgaccaccccacttttggctgggctcaggctgttatggtcaggctgggcgtgcagggagcactggacattgcaatagcagcagccagcactcatcctgcacccatgttcctggcgctgcactgagctctttgtgaataacagatggaagcagttgacaggccactccaaaggcatccagtaaccattgcaatggttgctgaggccactcacaaggtattcttaaatagagtgttaatttggaaatatttgtgtagaaatttcagaggtgaaggaggatgtatgttcacatttttgttccttgtgggtacacaagcagttagattctgggtacaatggaagaaatgttcttaaacgatttccaaaaaggacatttcccccaaatgcccatcttcatacaacagctgggagagggaaaaggaaaatgaatatgc

SEQ ID NO: 724072 - DNA, 2716 bp, Homo sapiens
agaggcgtgacataacgcccccattttcaagtctttaagaggtaagaaatcacaaacaccaggatgagcgctcctatttctgtctggagtagggtaagagggaagatttctgtgacscccctgcccacacttttggatgaccttcggtaagaatgaccaccagccatgtccagaagataaacctcaaggcgtaactagtctgcacacggaatcattatcccttgaatgtgttgggagtgggtttcacaagaatgtgggtgctgagcttggagaatccagcagtgatgaagtatttaagggactagagttttagagtcttataaagagtattgattaaaggtcaagacttaggctgggtgtgatggtgcatgcctggaatcccagcattttgggaggccaaagcgtgtggatgacttgaagccaggagttccagaccagcctggccaacatggtgaaaccccgtctctaccaaaaaatacaaaaattgtccagcgtggtggtgcacgcctatagtcccagctactggggaggctgaggtgagtggatggcttgagcccaggaggtggaggttgcagtgagccaagatcgcgccactgcactacagcctgggtgaggaagtgagaccctgtctctcaaaaaaaaaaaaaaaaaaaaaaaaaaaaggacttatgaaacttacatgctactttgcagattttttttccagttaaatagacaaataattgccgttcagtaaaaaacaataatctgaaagctttattatctgaaaggtttattatctgaaacaataatctgaaaggtttattatcttgtaggactttaaccagtttcatacttagccttgcaatcacactctaatatgccttaattaaattgcctatacctacctagcccctcaatgatctctttttaaaaataaattcattcaagttggacaagtatcctcaacgatctttgacctagttttaacatttcattgattccctattaattgatcaaaattgattaaaatctttgacatgagttcattttatatttgcatgagagtcataattttgcctttttgaaaactgtactttaaccatctacattgggaacaaaagggaaaataaaagcctttgcagaggctataatgaaataattatggtatatttcatcgtaattcccatgaaatacatttaaagcaatctttaaaaaccgatcatctgaaatgtgcttgcatttgtctagaaataagatagtgcatatctttagacagagcagttgttgcaatatggcagctgccctgaagggtccagattgaatgcagcttagctggcggatttgcctattgtaaaagtaaggactttttcccagagaacaatggggtttttatgatcatccaccccactgggcactcacagctgtccaagatgaatagcagcagtcttattcttgatatatgatttattttgtaattttgacctgctgtcttcaggacagcagaccacatcttcaaaggatgtaaactcccagcaaaggaaaactctaaatatgttgccataacacgattcccctcaatatgaatgaaacactgtatggcgtttcattacaattgacaggggtgtctctggacagctcatgcaatcaattaattatgcctcagcgtttcagtagcaaagaccatcaatattaatgttacaaaagacgaatgaaatgcatgtgcaaagtcttggggagttccttacctggaatggagggaaaacagggaattatactgaatgagaacctattttgtgttggatgcactgaagtcataatattacctatttctatgaaatctcagaggcagactttcttatccccattttacagatgagagaactgagggtcagagagatcaaatgacttgtccaaggtcacttaaattctaattggttcctcacatccattctttcaccttataatccactctccagacactagccagaatattttattttatacacataaaattggatcctgttggtctcttattttaaaaacctctaattgcttagaactgcattcagaacaaaaggtcaccttcctagtgtggcttcgaggcaggatcagcctcccagtttgcagctctaccctcattcatttccctccagtcacattgttttcttacttttctcaaatgccctgaggttgcttccacctcagaccttttctttgctgttccttctgcccagaactctcttccgccagatcctcctcctctgggtctcagctcgagtcacccctttgcagaggctgcccctgaccaccccacttttggctgggctcaggctgttatggtcaggctgggcgtgcagggagcactggacattgcaatagcagcagccagcactcatcctgcacccatgttcctggcgctgcactgagctctttgtgaataacagatggaagcagttgacaggccactccaaaggcatccagtaaccattgcaatggttgctgaggccactcacaaggtattcttaaatagagtgttaatttggaaatatttgtgtagaaatttcagaggtgaaggaggatgtatgttcacatttttgttccttgtgggtacacaagcagttagattctgggtacaatggaagaaatgttcttaaacgatttccaaaaaggacatttcccccaaatgcccatcttcatacaacagctgggagagggaaaaggaaaatgaatatgc

SEQ ID NO: 724073 - DNA, 913 bp, Homo sapiens
tatttaaaatgtttctttttatttgtctttgtctgaatgcctgctgcgttgtggacmgtgtgctaatttcaggagtaactgactttgtatttggaagtcttaacaccctctctttgtagagcactcataccgttgagctggggatggactttgaggctttcatttctagcacttgtccctcacttacaatgagctgttgaagctgaaggaaatctcatccctcctaccccttttagtttgattagctgagggtgttagagttaacttaacaatttaaggttgtaatacagtacttacaggcgtataaataatacatttcaaggctgggcgcggtggctcacgcctgtaatcccagcactttgggagaccaaggagagtggatcacaaggtcaggagttcaagaccggcctggccaagatggtgaaaccctgtttctactaaaaatacaaaaaattagccaggcgtggtggcaggcgcctgtcgtcccagctgcttgggaggctgaggcagagaattgcttgaacctgggaggcagaggttgcagtgagccgagatcatgccactgcactccagtctgggtgacagagcaagactccatctcaaaaataataataataatacattttagtagtaactttgtgaagtgtctacatttgtttcctctttgtcagttttttgctcaattccattttgtcaatacttggaaaatgaaacattggttaatcaatagtacagtaataagcttattgtggaaaatcttcgatatatgaaaacttagactcttctaaaacttcatgaagataataccactgttgaacgttttgacgtatttttttttggtctttttcttaaacgtatattatcaaagaaatttcaatggaactgagattttggcataaagtttttgtatcat

SEQ ID NO: 724074 - DNA, 869 bp, Homo sapiens
ggcaagacagactttttcttcctgaaatcactcttctaaagctgagaccggaagaggaaccttgcagaagtgcactgtgaccacagttcttggcatgaaagataaacaatttgcagtctcatgccaaaaagtatttccttgcatttacattcattacttagaatgatcacattattcatttttttccccagcacagaaatttgcattttgcacaraatttgcctggtgcagcagatctttatagttatggaaactgtcatcattatcggaatgtgctgctgctcaactccccagacataatttaatatggtgaggagaatatgacctgcctggctctatgggtgatcatatttctactgctgcagcaagctgggcttgtgtatttttcctcacttcagttgttcttcccatagttcatgtagggaggcactttggcttttgaaacactacatttctcaatatttaagcacaatttattgtccttatttttcagaacccattaaatataagggtcagaacctagaaaatcttatgtgctggatttctaccctgtatgattcttttcatccatgctttgcacttacgtaggaatatacataatttggtctgaagaagtataggaacagttgagcacattacttcaccactggaagaataggaaccagggaaaaacatcagcctctgccacttggagcactagaggatgacggaatgtcttgtatatgcggtcaactgttcaggatttactactcaattggttgttcacaatcagggaaatgattggcttcttggttgtttgttgaactttctttctttatatggttaaattattttgttttgataaaaataaaacttaaaatgcaaatgtc

SEQ ID NO: 724075 - DNA, 869 bp, Homo sapiens
ggcaagacagactttttcttcctgaaatcactcttctaaagctgagaccggaagaggaaccttgcagaagtgcactgtgaccacagttcttggcatgaaagataaacaatttgcagtctcatgccaaaaagtatttccttgcatttacattcattacttagaatgatcacattattcatttttttccccagcacagaaatttgcattttgcacagaatttgcctggtgcagcagatctttatagttatggaaactgtcatcattatcggaatgtgctgctgctcaactccccagacataatttaatatggtgaggagaatatgacctgcctggctctatgggtgatcatatttctactrctgcagcaagctgggcttgtgtatttttcctcacttcagttgttcttcccatagttcatgtagggaggcactttggcttttgaaacactacatttctcaatatttaagcacaatttattgtccttatttttcagaacccattaaatataagggtcagaacctagaaaatcttatgtgctggatttctaccctgtatgattcttttcatccatgctttgcacttacgtaggaatatacataatttggtctgaagaagtataggaacagttgagcacattacttcaccactggaagaataggaaccagggaaaaacatcagcctctgccacttggagcactagaggatgacggaatgtcttgtatatgcggtcaactgttcaggatttactactcaattggttgttcacaatcagggaaatgattggcttcttggttgtttgttgaactttctttctttatatggttaaattattttgttttgataaaaataaaacttaaaatgcaaatgtc

SEQ ID NO: 724076 - DNA, 869 bp, Homo sapiens
ggcaagacagactttttcttcctgaaatcactcttctaaagctgagaccggaagaggaaccttgcagaagtgcactgtgaccacagttcttggcatgaaagataaacaatttgcagtctcatgccaaaaagtatttccttgcatttacattcattacttagaatgatcacattattcatttttttccccagcacagaaatttgcattttgcacagaatttgcctggtgcagcagatctttatagttatggaaactgtcatcattatcggaatgtgctgctgctcaactccccagacataatttaatatggtgaggagaatatgacctgcctggctctatgggtgatcatatttctactgctgcagcaagctgggcttgtgtatttttcctcacttcagttgttcttcccatagttcatgtagggaggcactttggcytttgaaacactacatttctcaatatttaagcacaatttattgtccttatttttcagaacccattaaatataagggtcagaacctagaaaatcttatgtgctggatttctaccctgtatgattcttttcatccatgctttgcacttacgtaggaatatacataatttggtctgaagaagtataggaacagttgagcacattacttcaccactggaagaataggaaccagggaaaaacatcagcctctgccacttggagcactagaggatgacggaatgtcttgtatatgcggtcaactgttcaggatttactactcaattggttgttcacaatcagggaaatgattggcttcttggttgtttgttgaactttctttctttatatggttaaattattttgttttgataaaaataaaacttaaaatgcaaatgtc

SEQ ID NO: 724077 - DNA, 2148 bp, Homo sapiens
cttatgcagagcaaggctttgaggacagaatgacaggataagatcctggccttggtacttactagctatacatccttgagtcaattaaccacctttgtttctcagttgcttcaactataaaatgggaataatcactgtacctaactcttgtaagtattctgatggttaaatgagaaaaaaaaaactttagactaataccatactaataccaaatgtattatttttagtatactatcatacattttttctgttatcatactaaaaaattttccacttctcaatgcccaagcttattacgtatttcatcaagggaggacaggcccgagttcttataactctttcattttttctttcttagtttttcctgtttaatattatcctaagcgctacattgctttgactatgaagaaaacccatcttaytctgtttgtttgcttaaattacgtaacagcatttgcattatcatgaagttctccagaaaagatcattgttcatactcataaattttagcaaaagggtgagctaggaaaacaacaatatttagagataagaacgtttgggacagcattttgacatttggaacaaacttactttattctttttggttgcttaaactacataagtagcatttacatttcacagatattttctgggaaatagtattgttcaaacgtttaaattttagtaaatgtgtgaactgaaacattcatgttttgagctaagcatatcaaagtcagtctgaaattcttttatctttacagagacaataatggattttaatgaaaatgaagttttcctttgctaagcactggagttagttagggcataatattggattacagagagagtttacatggacagaagcaagcgcaggtgaaaagaattaacatcattcctcatttcaagagtgaagaaaaaaattccaaaggtagcacaggggcaaatgtcccaggatacagtagaaatagttatttggagcctgtatgcatacaccaagtgatctggttcaggaaaaaacagaagaggtaacagaaactaaatatgaaaatggttgttttgtaacaacaaccaaaaaataaaagggtatcgtgtatcttcttataacaataaacaaagctaaacaagtcatcagggactatacaaacattttcagttgtatgctttttagatgtttataaaaatgatagaattggtaacaattgataaagcttttctaataaaaattaggctattaagattcttaaactttttattaactcaacttacctgctataatcaagcaacttattgctgtctattgagaggtgtaagatatataaatattattgtagagtaagtaatcctatgttgatatttatagtaacaaaaaatgctacagagtaagtagtttagaatcattctaagttttgcagccttcccaagtttgattttatagattggatttcaaaatgccacattgggatggggtacaaaagtgatgcagcagaataaatatttttgtttgctagttttttttcataatacctttagtgatatcttagagaaatatgagattgttcaaaaaacagtacagaactgaacctgggaatataatactgtgatttgctttgtttcttcattgttaattaaataatgctaacatagtcattgtattagtcaaggttctttacagaaacagaactaatatgagagatatatatgtataccttatacactattcaaaacaataagatttagaactgtgttttttattttcttcccaacatatttgctgaatattttaccatttagggtattgtggggaaatttattgtaattaaaatggttccaattactctcgatttctcttaacatgtttgattatatattatccattcctttctaagacttcctttgaactgtactgaatgtgtgatatctgacagggtaagctgatattcatgttaacagatctcagctgatgttccatagttattattatgagtgacaactgttacaagtcatatttttaaaaattaggatatattaagggaagaatataaacataaatattaatattaaattttatatgttgtctgtcatgtttaaattatagtgaaataaatctaatttttcctagtttaaatatagaatttaaagggattgctg

SEQ ID NO: 724078 - DNA, 321 bp, Homo sapiens
tctagaggttgcctgcattccttcgctcatagctccttcctcagatccctccacctagcttccgtgctcatatttcctgctacttactcaaattctcctctttctctcttataagggcctttacactgggctgtcctagacaatccagratactctccccatgtcaagatccttaatcacatctgcaacatgccttttaacatgtaaggtaacatattaaaggtttccagagatttaggacatggacatcttcagggggtcattattcagcctgctacaggaataaaagatattgggatgttatcctatttgaaagagaaa

SEQ ID NO: 724079 - DNA, 321 bp, Homo sapiens
tctagaggttgcctgcattccttcgctcatagctccttcctcagatccctccacctagcttccgtgctcatatttcctgctacttactcaaattctcctctttctctcttataagggcctttacactgggctgtcctagacaatccaggatactctccccatgtcaagatccttaatcacatctgcaacatgccttttaacatgtaaggtaacatattaaaggtttccagagatttaggacatggacatcttcagggggtcattattcagcctgctacaggaataaaagatattggkatgttatcctatttgaaagagaaa

SEQ ID NO: 724080 - DNA, 1229 bp, Homo sapiens
aacaaccctgcaaaaaaccgagatgcctctacactccagtcccagaaagcggaaggcactggggatgccaagtgaaatgtacatttttgagagctctgtacttatagtgactctactgtttgaaatactatttttttaaatcaagttttataaaagtgtagaattttggcttttttaagttatgttgttagcacacaggacacttccttgttgtcttttgtggaaagggcaagtaccactaatagggtgtatctcagaaactgaattgaaataagggaaaataggattttctgtcctggtttttgaagattgttcttgattcccttgattcccaggagagattctctgacattcacgtgtcagccactttggcacggaagccttacagtgtggggaaccaaaacttcgtgtctccyctttccccgatgccatcagcatagacttgacttccttaaaccgagagttttgatgtggccttggcaaccctaaaatcagctgtgttaggtaacaaaactcaggctttctgttgatgacatcgagatggtgtcacttaaaagagccaagattcctgttttcagtttgtggattcatcctgctggttttactttagtccctccatgtcaaagtgggcctgagaaaagctcatacatgcctcatgtgaagtgtccaccctctctgaaaatctttcttgttcaaaacagcaacgacatatcttgttaacttttacggtgacttttggaggaggggagtttggaaattgtaaaatgttatagattgttgcctatttcctgctgaaagtaaatgtttttaaaaagtatcatataaagctgaatacaaattggtttggggggagatcctttcctacccaaagtcataaatatattctttactgccttgtggaaattttatagttttgcctttcacatttgtctttagtctgtcctgaactgatttttgtgaaaattatgagttagaaattcaacttaacatttttcatattcgaagtggttgtctctgcactatttactgaaaagttcatcctttccccagtgatttgtaacactgcctctttcataaattaaatttttgtgtatgtgtgtgggtcttttgatggtttctattctgactgacatcaatttgtctaatcttgtagcagtacagtacagtcctgattattgcaactttaggaaaaggtctgataaaaaccaagatgcctccacattttgtca

SEQ ID NO: 724081 - DNA, 1229 bp, Homo sapiens
aacaaccctgcaaaaaaccgagatgcctctacactccagtcccagaaagcggaaggcactggggatgccaagtgaaatgtacatttttgagagctctgtacttatagtgactctactgtttgaaatactatttttttaaatcaagttttataaaagtgtagaattttggcttttttaagttatgttgttagcacacaggacacttccttgttgtcttttgtggaaagggcaagtaccactaatagggtgtatctcagaaactgaattgaaataagggaaaataggattttctgtcctggtttttgaagattgttcttgattcccttgattcccaggagagattctctgacattcacgtgtcagccactttggcacggaagccttacagtgtggggaaccaaaacttcgtgtctcccctttccccgatgccatcagcatagacttgacttccttaaaccgagagttttgatgtggccttggcaaccctaaaatcagctgtgttaggtaacaaaactcaggctttctgttgatgacatcgagatggtgtcacttaaaagagccaagattcctgttttcagtttgtggattcatcctgctggttttactttagtccctccatgtcaaagtgggcctgagaaaagctcatacatgcctcatgtgaagtgtccaccctctctgaaaatctttcttgttcaaaacagcaacgacatatcttgttaacttttacggtgacttttggaggaggggagtttggaaattgtaaaatgttatagattgttgcctatttcctgctgaaagtaaatgtttttaaaaagtatcatataaagctgaatacaaattggtttggggggagatcctttcctacccaaagtcataaatatattctttactgccttgtggaaattttatagttttgcctttcacatttgtctttagtctgtcctgaactgatttttgtgaaaattatgagttagaaattcaacttaacatttttcatattcgaagtggttgtctctgcactatttactgaaaagttcatcctttccccagtgatttgtaacactgcctctttcataaattaaatttttgtgtatgtgtgtgggtcttttgatggtttctattctgactgacatcaatttgtctaatcttgtagcagtacagtacagtcctgattaytgcaactttaggaaaaggtctgataaaaaccaagatgcctccacattttgtca

SEQ ID NO: 724082 - DNA, 1320 bp, Homo sapiens
ccaccaaatacagagaactaaatactgagggtgaatttccaaatcaaccaattaaccacataaccccagtgtagaagagccttccttcataaaatataatagaacagacatttatctaattaaattatactagaatacatgctggagaacagggagaagctctttaatcagatttaatcagatgtacaactttaataagatttaatcagatgtacaaacttttttagcactgcaaatgaccctaggaagaatttctcttcatgacagttaaaaaacagaggaaaagattatatatatgaagaatttggcttcggcggtctcaaactattgaaagtaactaaactccttctataatgccttcaaacaacaacatcaatataaagcaggtagaagaggcatagctctgactgaagtgggggaagatcccaaaggcttcatctctaggcagccttagggctcggtgggtggaggggcatctttgacaagcagctaatctggttctagcctcttattttaaatatgatgaagctgataccattgaggtgattttcccaagagtgcaaagttaatccttggcagagctgggctagagcctgcattttctgattttcaatttaacactcattcctgtcttgctattagtttaattttatctgattgcatcactatgccatgcaaacttgaagttaagaatgtctttctcaccagtttttatctggtcagtaattatactgacattttattatttaacaaacatctcaccttaatatccaccttaaaaatcctaatgatatcctctctagaactttagccttgcatttaaacttgcccccaggctagcatttaattctgcggaaataagaaacccaagtttacctttgcaagattgcttggcatgtycagacactgtgctaaatgctttatgtaggttcctttgtttatgcctcacaaacaccatatgaagtaggtcttatttcttgcaatatatggataaaagaattgaggttaagtcacttgtcttggatcacacaggaaagactagatttaagccaggatgtctggtcaaaagcccaagctacgcaattcttccacagaattgtcagccttttcttttgaagaccatcagcaatttcctttcacataaagcagaggaaccccataagtaaatataaataaaataacaccttaaacacatttcatattaatattacataaaatattttacacacattacctcatagcaggcatacttatggaatggcgaatggagtaacttcagagcaaaagcagattaaaggggaaaaaagaaaaaagaagaga

SEQ ID NO: 724083 - DNA, 2567 bp, Homo sapiens
attgctaccttttttatttaataagaaatctgttgaaacaaaacctatggcattgtgttcttggctattagcaggctgaagaataattgctaccttcttttacattttttcacctattctaatcaagttgcaatcatattttcttatttgttccatgaatgaaatggagattaaaaaaaaaaaaagtacttgcattgaatggacccttgttcaaattgtggctcattctctcgctaccttcatgatcttgggcaagttacctaaagtcaaaactccgtttctttatttgcaaactgaggattgttctacctatctaacaaggtaggaataagttaaatgttgacacagtggagtccctatgtaacagacactcagcaaatgctttctattatgattactttctacatctctttctctttatgttgcttgtttctttgaaggactgtagtggaggagctggaagggggttgagagtaggaaaaagcaattaaaaagataccttagctgctctgtagccaagccttgcattggatttcaatttgattttaatgtgctgctgctgagagccatgctgttgaaaaagagagaagagtaagaagcagatgctcttagaagaacagtggggcatttatctcttttaatgagataacatcattagagtgacaaagtgcagcgaatcaatactcgaaatggactggcgctatcttcccaaagtgcgctgattgttacacttcacaaccttagaatccgctgaatcacgaattctgtcttatctgttattagagccgctggctttgatctcacagactagatccacaccttagggatctccagaggaacaggaaaacagactaataggataaatgagaaaaatccaaggtgatttataaactgccctgtaatcaaggaacctcagagaaaggtggttgtgcttgttttttccttggacttctttaaatggctactcataactgccttcccctcygctcgctctccttgctctctgtctgcttcttggtgtaatgtcagaaacgctaatcatgtcagactgtgacactgacagccctgacattcacaacaaagagacaaggaggagagagaggaaaagagatgggggaggggggaggtgaggaaaagcagcaggagaagcatttttttattgcacataaaatccatagctgcagaatcacccacatctggacatgtcatatccaaggaaaatcaaggaaggcacaaggtgaattccaatagagattgaaactgagctggggattttcccctcttcttttagatttcattgtgtagtttatattagaattactgtgactatgatttcttctcatcaagaaaaagggcatttacatttatttttcctttttctttactacagtttttctcttcgaaacaaagcaaagttaaacacagatcttagcaggaagtgtgtgctgtcagaggttttccaatttattaccagattcccatagtttaatctgaacaatagccagttcaggaaagaagtcatgggtgagggatgttttctgaccatggcaaggctgaatgtcatgacaaagctgttcagtgtcatcctcaggcccttggcttctgcggcacctgcttaaagctgctggatgcagaaaatgctgatgttacctgttccctaacagtttggagtgggcttccaaatacctttgagacttctgtttctctcaggcactttctccatttggaataatgctggtgagtggtctgcaatctctgtcttggatcagtcatgacctgaaaatcggctgccacatctcacatgtgttttgaatccagatgctatgatctaaattgagctctgagctcaggctgaatcatcctagcttttctataaacatgagaagccagctgccagctcggcttttgaggtattttgaactataactctaagtcttaccgaagatagttatcatttcattttttcttcatgtcagaaaaaaaaaatcaaaaatggaaaatggtatccagtatttattctgtatcagttaccctgtcataaaagagggtacattttttgtccatattcaaacagaaggtattctgtacctagtgacttcttttcagattgattataaaaatattgagaactttggaaaaggctgataactcatttcacagtgttctcatctttagtacccaagtaaaattttacatacttgggctacttgatagaaatgctccacttaatttcaaaaaaaaaaaattaagtggattatgtggcgtagttgaagttccagcaactttgacattgtgacttgtttaatattcttgaggaaattctacttctattggcagaagagagtaaatttataccctatggaggatttgagagaatttaccccaaaatatcttcctgtaaattcaaattttctttgaagtgtttttaatcctaaaattttacatggattgttccctgtgatatgtgataggtccatgtttgttttcatgtaaaataatttaaaattacttgccacttaaattaattaggtcctatagtaggtaatgacagctggtataacagataa

SEQ ID NO: 724084 - DNA, 2567 bp, Homo sapiens
attgctaccttttttatttaataagaaatctgttgaaacaaaacctatggcattgtgttcttggctattagcaggctgaagaataattgctaccttcttttacattttttcacctattctaatcaagttgcaatcatattttcttatttgttccatgaatgaaatggagattaaaaaaaaaaaaagtacttgcattgaatggacccttgttcaaattgtggctcattctctcgctaccttcatgatcttgggcaagttacctaaagtcaaaactccgtttctttatttgcaaactgaggattgttctacctatctaacaaggtaggaataagttaaatgttgacacagtggagtccctatgtaacagacactcagcaaatgctttctattatgattactttctacatctctttctctttatgttgcttgtttctttgaaggactgtagtggaggagctggaagggggttgagagtaggaaaaagcaattaaaaagataccttagctgctctgtagccaagccttgcattggatttcaatttgattttaatgtgctgctgctgagagccatgctgttgaaaaagagagaagagtaagaagcagatgctcttagaagaacagtggggcatttatctcttttaatgagataacatcattagagtgacaaagtgcagcgaatcaatactcgaaatggactggcgctatcttcccaaagtgcgctgattgttacacttcacaaccttagaatccgctgaatcacgaattctgtcttatctgttattagagccgctggctttgatctcacagactagatccacaccttagggatctccagaggaacaggaaaacagactaataggataaatgagaaaaatccaaggtgatttataaactgccctgtaatcaaggaacctcagagaaaggtggttgtgcttgttttttccttggacttctttaaatggctactcataactgccttcccctctgctcgctctccttgctctctgtctgcttcttggtgtaatgtcagaaacgctaatcatgtcagactgtgacactgacagccctgacattcacaacaaagagacaaggaggagagagaggaaaagagatgggggaggggggaggtgaggaaaagcagcaggagaagcatttttttattgcacataaaatccatagctgcagaatcacccacatctggacatgtcatatccaaggaaaatcaaggaaggcacaaggtgaattccaatagagattgaaactgagctggggattttcccctcttcttttagatttcattgtgtagtttatattagaattactgtgactatgatttcttctcatcaagaaaaagggcatttacatttatttttcctttttctttactacagtttttctcttcgaaacaaagcaaagttaaacacagatcttagcaggaagtgtgtgctgtcagaggttttccaatttattaccagattcccatagtttaatctgaacaatagccagttcaggaaagaagtcatgggtgagggatgttttctgaccatggcaaggctgaatgtcatgacaaagctgttcagtgtcatcctcaggcccttggcttctgcggcacctgcttaaagctgctggatgcagaaaatgctgatgttacctgttccctaacagtttggagtgggcttccaaatacctttgagacttctgtttctctcaggcactttctccatttggaataatgctggtgagtggtctgcaatctctgtcttggatcagtcatgacctgaaaatcggctgccacatctcacatgtgttttgaatccagatgctatgatctaaattgagctctgagctcaggctgaatcatcctagcttttctataaacatgagaagccagctgccagctcggcttttgaggtattttgaactataactctaagtcttaccgaagatagttatcatttcattttttcttcatgtcagaaaaaaaaaatcaaaaatggaaaatggtatccagtatttattctgtatcagttaccctgtcataaragagggtacattttttgtccatattcaaacagaaggtattctgtacctagtgacttcttttcagattgattataaaaatattgagaactttggaaaaggctgataactcatttcacagtgttctcatctttagtacccaagtaaaattttacatacttgggctacttgatagaaatgctccacttaatttcaaaaaaaaaaaattaagtggattatgtggcgtagttgaagttccagcaactttgacattgtgacttgtttaatattcttgaggaaattctacttctattggcagaagagagtaaatttataccctatggaggatttgagagaatttaccccaaaatatcttcctgtaaattcaaattttctttgaagtgtttttaatcctaaaattttacatggattgttccctgtgatatgtgataggtccatgtttgttttcatgtaaaataatttaaaattacttgccacttaaattaattaggtcctatagtaggtaatgacagctggtataacagataa

SEQ ID NO: 724085 - DNA, 1066 bp, Homo sapiens
tgtgcatacatcaagccctggactgttgaaaacattaagtacctgaactttggctccttcaggaaaggctgtatgcatgttagtttataccaggtatctacccatctaactccattctttcatttaatcaataaactgcctactaggcatctggctctgtgctagctactaataattaaaactctgagcaagaaatacatgatctctgcctttatgaaggtcagagtccagcagagacataggaccataatgatagaatgtgataggcaccataataggagcaggacagggagctgcagaagctgtactgggagaacctccaggatgtcttttaggagatttaagcaacagtttctactgatgcaatcttataactgaaagagataatgattcacaaagtatttgccactatttataatactgacttgaatatkggccttatttatcatctgttctgtctattcaaataattaccttgtccttgggaacagtctgaacaggttctaatggccacacagttgatgagatcaaaattaacaaaggttgtgttagacaccatcagttcccatcttttaggagttttaatcccagatgacatacacagacttccctgtgatttaaaagaaaaaaagatgaaagcaaaataagaaaactggacacatgaaatacaattcataatgcatgaataaaaacaaagataaaaaagcgagctattgactaagagaaaatatttgccaatcacacatatgacaaaggacctatatccagaatatagaaagaactcttaggtttcaacagcaagaaaatagacaacgcaattcaaaaatcaggaaaaaaaaaccttcaaaagataacccagaaaagaaaatatacagatagcaaataagcacagaaaaaaaaaatgttcaacatcattattcactagggaaatgcaaattaagatcacactaaaatatactatgcacctattgaatgaataaataaaaatacagtgacaatagtaagtgctgatgaggatgagaaagtattaaaactctcctgtttctagtggaatgcaaaatgagac

SEQ ID NO: 724086 - DNA, 1066 bp, Homo sapiens
tgtgcatacatcaagccctggactgttgaaaacattaagtacctgaactttggctccttcaggaaaggctgtatgcatgttagtttataccaggtatctacccatctaactccattctttcatttaatcaataaactgcctactaggcatctggctctgtgctagctactaataattaaaactctgagcaagaaatacatgatctctgcctttatgaaggtcagagtccagcagagacataggaccataatgatagaatgtgataggcaccataataggagcaggacagggagctgcagaagctgtactgggagaacctccaggatgtcttttaggagatttaagcaacagtttctactgatgcaatcttataactgaaagagataatgattcacaaagtatttgccactatttataatactgacttgaatatgggccttatttatcatctgttctgtctattcaaataattaccttgtccttgggaacagtctgaacaggttctaatggccacacagttgatgagatcaaaattaacaaaggttgtgttagacaccatcagttcccatcttttaggagttttaatcccagatgacatacacagacttccctgtgatttaaaagaaaaaaagatgaaagcaaaataagaaaactggacacatgaaatacaattcataatgcatgaataaaaacaaagataaaaaagcgagctattgactaagagaaaatatttgccaatcacacatatgacaaaggacctatatccagaatatagaaagaactctyaggtttcaacagcaagaaaatagacaacgcaattcaaaaatcaggaaaaaaaaaccttcaaaagataacccagaaaagaaaatatacagatagcaaataagcacagaaaaaaaaaatgttcaacatcattattcactagggaaatgcaaattaagatcacactaaaatatactatgcacctattgaatgaataaataaaaatacagtgacaatagtaagtgctgatgaggatgagaaagtattaaaactctcctgtttctagtggaatgcaaaatgagac

SEQ ID NO: 724087 - DNA, 1066 bp, Homo sapiens
tgtgcatacatcaagccctggactgttgaaaacattaagtacctgaactttggctccttcaggaaaggctgtatgcatgttagtttataccaggtatctacccatctaactccattctttcatttaatcaataaactgcctactaggcatctggctctgtgctagctactaataattaaaactctgagcaagaaatacatgatctctgcctttatgaaggtcagagtccagcagagacataggaccataatgatagaatgtgataggcaccataataggagcaggacagggagctgcagaagctgtactgggagaacctccaggatgtcttttaggagatttaagcaacagtttctactgatgcaatcttataactgaaagagataatgattcacaaagtatttgccactatttataatactgacttgaatatgggccttatttatcatctgttctgtctattcaaataattaccttgtccttgggaacagtctgaacaggttctaatggccacacagttgatgagatcaaaattaacaaaggttgtgttagacaccatcagttcccatcttttaggagttttaatcccagatgacatacacagacttccctgtgatttaaaagaaaaaaagatgaaagcaaaataagaaaactggacacatgaaatacaattcataatgcatgaataaaaacaaagataaaaaagcgagctattgactaagagaaaatatttgccaatcacacatatgacaaaggacctatatccagaatatagaaagaactcttaggtttcaacagcaagaaaatagacaacgcaattcaaaaatcaggaaaaaaaaaccttcaaaagataacccagaaaagaaaatatacagatagcaaataagcacagaaaaaaaaaatgttcaacatcattattcactagggaaatgcaaattaagatcacactaaaatatactatgcacctattgaatgaataaataaaaatacagtgacaatagtaagtgctgatgaggatgagaaagwattaaaactctcctgtttctagtggaatgcaaaatgagac

SEQ ID NO: 724088 - DNA, 660 bp, Homo sapiens
atgaataaaaaataaaatgtggaatttaaatcctaaggaaaaaaaggcactacaaaaaacrgcacatttgaaaaagaatgaaatataatttctagaaataaaaaagtcaatagactaaactgaaagtaatatacaactaaaggacttgcaaacagagttggaatgaagactattactcagaatatagcactgagagataaagaattagaaaacaggtaggagaaattaacagatatgaaggttagaatgagagccacagtcaggtaggagttgtagaaggtggtgtttgagagaagagggagaagtaatatgttgaggtaatggctgagagttttccagaatgtatgaaatatatgaatccttagattaaggcaacattataagtcatgagcaggctaaataaaaataaatcacacatagagccttatagtaaaaccatcaaataccaaagacaaaaagaggatctagaaggcaatcagcgagaaaatacagattacctaaaaagaaacaaaaattatgctgtcacatgcttttaatagcaagaaaaaaggctaaagagaaacggtatattgtattgcctttcttcaaattactaagagaaaataattgttaatctagaataaattatacaaactgtcatttgggaaggagagttaaaaa

SEQ ID NO: 724089 - DNA, 2850 bp, Homo sapiens
tgagaatgttgcatgtgtactaaatgggtaattatgttgatgctggaaaacggtattttagttgtgggaaagagcatatacaaatgcacagtttggccgggctcatgcttataatcccagcactttgggaagctgaggcgggtggatcacctgaggtcaggagttcaagaccaatctggccaacatgggaaaccccatctctacaaaaatacaacaattagccgggcatgatggtgggtgcctgtaatcccagctacttgggtggctaaggcaggagaatggtttgaacctgggaactggaggttgcagtgagcctagattgtgccgttgcactccagcctgggtaacagaacgagactgtcacaattgaaaaggtaaatgtgagttggaaataacattatgaacatatgatttattttcaatatatattactttaactactaaaaaggcctagaaacaatgagcactcctagaacccagattattatttctaaatactatttccaaaggaaccaactctccttggagaaatgactgatttcctgtctagagcaagaagtgaataaaatgaacctgagacatcctgcacattagaaataaaaggagctattaaagattattgttgtcatgtcaaaggagtcaggaatcatcatgaaaatgttcctggctgggtgtggtggctcacgcccgtaatcccaacactttgagaggccgaggcgggcggatcaccttaggtcaggagctcaagaccagcctgaccaacatggtgaaaccccatctctattaaaaatacaaaacttagcgaagtatggtgcacacctgtaaacccagctacatgggaggctgagacaggagaatcacttaaacctggaaggcagaggttgcagtgagccgagattgttccactgcactgcagcctggaggacagagtgagactccatctcaaaaaaaaaaaaaaaggaaaatgttcccactggactaagatgggacaatctaaccattaatatgaataatatttgtaaaggattgaaacactgcaaatatatttaaaatcgtgaatttgtaatgatacaaaaacacaaccatgggaccaccattggaagatgctcagtgaactaccaaaattttgaaaactggtgcataagagaacaaagccaggtattcatcctgtctttattgtctgaaatatatctcaggataatcatatagttgatgagttttttacagacatatttgactgctacgtagaaaaggaatggaagatttggattactattagatgaatgttattattaggttatttaacatttctgtgtctttacttaagttttaactgttgcatccatcatagcctaagtaggtgcattacagttgtctacctctagtgtgtttctgtttctgcttgcgtcttctgtttcttttatgattgttgttatatcatttggttcataagtattcctaatatatttagtgtgatgtgcaccccatagtattgtaaactgccctttattgtggcatttatttttggctagctttcaaccttgctgatattaagattcatacatctgctttccctttgatagcatttgtctggtatacttttgatcaccctgttattttgaactgttctgaatcatttcatttttaagtgttttgcgtgtgtgtgtgtgtgtgtgtgtgtgtgtgtgtgttccaatctgaaaagtttgttttgtttgcttctttgcctttattaacaaaaagtcactcacagcatttcaacattgttcaaacacacaaatcacagccaatggccccaacaaataaccacttaatgtctagatcaaaaccatgctgcagggagcagtgttcctctggttctgttccttgagcatctcagtttcttcttttcttgtatctcactaactcccctgagagttataaaatgtgcagaaacaaaatcaccctagaggagtcaccctactttgttaacaaggaagagtatttgatgcctgagaaacaaatagaagtgcactgcttgttgccaccccagggatgccagtctactcactacacttgtctgttcaatcctcagcctgtccatcccctaggtccttgcaaggcctcaggagaaagaaaaaagcaaggaagacgctccaagcatggcagtatctggcactggggkaattagtgctgaccgaaaccatgggcagaactctgcagtaataaggcaggctctccttgagggtagaaggaaggaacggagagaaggtttcaagaaaggatctatgctccatttataagcagtttggctaagatgccacctagaaaccttaacaatgaatcctgctcttattcctggagctctaggaaatgttaaattaataattaggtggcaatcagatgtaaaacttgattaaaaccaggcctcaagggcagaaatatcatctgtgtttgtctcaccgagcgtctggtatggggctcaatatcacttttaaagaataaaatttatccatgagataatcatttggaaatccacccttccagaacacctctctctttcctggaaaacttggtaatacagcttaggaaggaccagtggcatgccccatagatatgaacttgggccatgttgggtatcagaaattcccaggaaaggaaataaaagggctgggacctaaacaattagcatgaactggacacaatgtcctgattttagctcctctttgtcttcatgagtctaatatgacttaccctaattggccaaagagtatctcttttacacctattgtcttaatctagtaaaaatggctttctgttaattttgtttttattttttttcttgaatacatccaaagcctcatttctgaa

SEQ ID NO: 724090 - DNA, 560 bp, Homo sapiens
taactttagatttgtctgtttatacaactgtctctcccactgatttgaatacctgaggacagaacaatggcaagagcagtgcctgtcacataatatatgcttaatagtgtcatcaaatagatgtatcagggaatgatttcgataaaaatcatggattgggtatctcaaggtcaaactgaacactgggccaatataatcatttcacttctcttggttttattctccttattgcaaaatgagtataatgagattaatcaccttacaggatttttacaaagatttaacaagacagtactatgcaaagcacttggcatggtgcccgatgtagtaattgctcactaaatatgacaatataataccaacaatgaacttttctgcttctactagtaatactgttggttggcgttatcaggagggtaattcgcragtctattcttttcactcatcactattattagctttaacagtgaggaaattggccttatggaggctcattttctcaataagtgagctcaagcatcatgctggctttattactgttttttaactacaaagatatt

SEQ ID NO: 724091 - DNA, 602 bp, Homo sapiens
acctgagttccaaatcaagacatatcaaaccaagctaaattaagttaaatcaagctgagaatacaaggatgacacgatggaaaatttacgaatatagtggggtaactttaaaactgcatatcataatgtgaaaaagaatkaaggaacatggctattgcataaatctgtatttactatttaactgaactgcattaggtgatattgtctaaaataaatcctttcacctaaacaattgctccaacatctagaacagagtctgaaattagtagacactcaaaacatatctatggcagaaatgtcttatggtaattataagactctagtggccaagattaaaaaaaatttttgaaaaccaatcactctctttctataatagttgcatgattattaaaagatcagaactaatcataagtacaaatatgaagaacaaaacataaaatgcagttataaatatgtatattttgggataccataaactatcatatttgtttttaatcctacaatttaaaaaattgtagttattgctttgaagaaatacttttaaaaaatgagttataaaagctaatatgaaataaaagtgaaatcactattttgtcctttaa

SEQ ID NO: 724092 - DNA, 611 bp, Homo sapiens
tggttactgctcttttttcaacagatattttttgttctgttaatcatcttcttaaaaaaataagtgaatacattaataaatggcaaaagatacatatacaaacatatccagaggaatgaaattttttgctagttatgctaacatatctttagaatgaagtctccaaattgcccttgaaattattcttcaaatgttcaragcctaataaacaaccttaaatacaggagtcaggttttattttccacattatataagttttcagattattggtcaatgctctaccgccttattaatttgcaagacaaagtcttaaatctttctttctttttttttttttttgaaacagggtcttgctctgtcacccaggctggagtgcagttgcatgatcttgactcactgtaaccttcacctcccagcctcaagccatccacccctctcagctttctgagttgttgggactacagctgtgccaccacgcccggctaatttttgtatttttttgtagaggtgggatttcaccatgttggccaggctggtctcgatctctccatctcctgagctcaagtgatttgcccacactaagctaatgggatgaattttggcaaagatca

SEQ ID NO: 724093 - DNA, 611 bp, Homo sapiens
tggttactgctcttttttcaacagatattttttgttctgttaatcatcttcttaaaaaaataagtgaatacattaataaatggcaaaagatacatatacaaacatatccagaggaatgaaattttttgctagttatgctaacatatctttagaatgaagtctccaaattgcccttgaaattattcttcaaatgttcaaagcctaataaacaaccttaaayacaggagtcaggttttattttccacattatataagttttcagattattggtcaatgctctaccgccttattaatttgcaagacaaagtcttaaatctttctttctttttttttttttttgaaacagggtcttgctctgtcacccaggctggagtgcagttgcatgatcttgactcactgtaaccttcacctcccagcctcaagccatccacccctctcagctttctgagttgttgggactacagctgtgccaccacgcccggctaatttttgtatttttttgtagaggtgggatttcaccatgttggccaggctggtctcgatctctccatctcctgagctcaagtgatttgcccacactaagctaatgggatgaattttggcaaagatca

SEQ ID NO: 724094 - DNA, 575 bp, Homo sapiens
ttttgtgtaaggaccgagcacttagccagcagagaagtcatttccacagatggtgtcctctgagactgcaggtctttgcgggataacagcgccgtcttcctgagctgtccggaaaggcgatgtccatgggacccaagagctcaaagtcccaccaaccccctgaggccccagttgcagcccctcagccccagcctttctggagaggtctgctattttctgttcaaatccagaattcctagctcctgaattattttgtttggaccatctccttgggtgcattcgcccagctgtgctgaatggcgttgcggggtctacgggagagcaagtgtgaagacyggaggcagtggcagcccgagggtggggctggagcggatggtgaagggtgaggatggagccaacaacccaccaaggaacatggagctgaagggcctctgcacactgggacacctgttctcagtctttatcctctcagctgggttgtgcgaggtccctcctgcctctgcacctgggggatcagagagaagtggcattgagcctgggagtcctacggggaggccaatggggcaacgcagacc

SEQ ID NO: 724095 - DNA, 592 bp, Homo sapiens
ttggtaaacattttctgagaatctaccatatgtcaggcattggctaggattgtgacacataaggattaaacataaaatagagtgtagtttaaacagaagacattttaaacasaatgtagtttaaaagacacatgagttgtttcaatttattttcccataatttaagtccagtaaagagaatcacaaagctaatatccacaaagattagaggtctgaaaactacattctagtggccaaatctgtgactttttatattttttaagttgttaaaaaaggaaagaaagaagaggatcaacaacagaaactgaatgtggccttcaaagtctgtaatgatggctctctagccctttccaggaaatgtttgcctagattataagaacatctagaacaaagccacacttcagcacattcttctcttcttattctccaagtttgcagagtgtcagatattttgggcttctctatttaatttaaattaattttaaacttatttcagaattcctggcttagtatttattatggagtgtatttcttaatgaagaaatcggtatattacacatttcaacagtattcaaactctattgatttctga

SEQ ID NO: 724096 - DNA, 1031 bp, Homo sapiens
ctagtattttaacttacataggagatattgcgcagcactatcaatatttctttgattcaatctgtcagcttaacatttatgaaattgatcacaaattcaattccacctcactccatattttttcttaggtattcattcacattcaattattcggctatgtgtgtctttctaataactttttttkttttttggagacggagttttgctttgctgttattgcccaggccggagtgcaatggcgtgatctctgctcacggcaacctccgcctcctgggttcaagcgattttcctgcctcagcctcctgagtaggtgggattacaggcctgtgccaccacgcccggctaattttgtattttttagtagagatgcagtttctccatgttggtcaggctggtctcgaacttccgacctcaggtaatctgtccgcctcggcctcccaaagtgctgggattacaggcgtgagcaaccatgccccgccttactaataacttctatagaagtgttccatccttcaaaatttttgctggttaaaataaaataagacagtgctgttctattgagcatttcaaatgtatccacagtatgcatgttacttgattcatattcaaaagctcgtattttcaaaaatgaaataaaaaatgtgttctagtaaaataatatattttttttacctaactcttttcagctaacaggcatattctatgttacaaatacaatctttagttaaaaatctagttgtatatttcttcatagcattgtgaaagcaatattaacttattttgcatgtgcttttagtactgtgaaaggaggtgtgggcattagaaactatttgctcacacacacaaaaaagaaagaaatgttacattttgtctgttcgtgcaataaattcttaaccatgtctctcactggtgtgagcatggtgagggagaataaattaaagtaattttaacataggttttggtttgcaaaaatctctgggccttcccaagtattctgcaattaagatctctacacagtacttcattcagcc

SEQ ID NO: 724097 - DNA, 616 bp, Homo sapiens
tagactgcagtgtagtatacatwtgagttttatatgcactgggaaagcaaattgtgtgacttcctttatttaaattttattgtggtggtctggagcaaaacctgcaatatcttctaggtatgccagtaccaccttagcgatgttaaatacctacatctatgttgtctaggatctatcccgtcaagtatcctatgtactattctaaaccaattcttcaattattttaaatcagcaagtaaatttatctttgctgaaaatgaggaaagatggttattgtgaaatcagtcagatggaatcttgacctgagtaggcccttagatacaattttgagaaaggcataactagctgcagataagaagtacaaggtaaagccaaaaaaagactgcaaaaattcactagaataggtaaatactgaagtcagggcagtcaacagttctgcttggatgatgacacagtgctgaagggtgacccaagtgatttctgccataataacttccatggattcaacttagacactttaagcatgctaccaaaaattcaaatattcagaaaatgtatgacaaacataaaaagtttgagaggcactaatcttatatctttgtatcacctcaaagcc

SEQ ID NO: 724098 - DNA, 656 bp, Homo sapiens
aaccaccatatatattttctaacttctatatatatattaagaaagataaagatcagaagacagcaataaaaccaacctgtaatttctcagcatccagcaggaatactttaactgaaacttaataacatgctctcagcttttacaaaggttcagtgtaagactctccacttgagtaatggttctatgtgtttagccaaaccatggtttaaaaggtcctttattatgttaccaacaacctttatatgaatacttcatggatcataaaatattcatgcatcccaaktctgtatgtccaaatcgtaccatccttcagggttcaattcaaatatcaatttgtccatgaagccctctctgagtctcctaggtagatatatcttactcttgagcttgtcctcctactatgcttactactttcaacatcatattaaataagaacttaggggagggcattttattgatcatttgctatgtatcagacactgtgctaataagcacaatactaagggttgttatcatatgtaatcttcatctcaatcccatcattatccttatttgaaagatgagaaaactaagtccagagaggctgacttaaccaaagtcacatggcaaataactggcaaataggtctgggctctggtttgattccaaagtctaca

SEQ ID NO: 724099 - DNA, 1324 bp, Homo sapiens
taattactttagttaaacttctctttttactgataactattcagtcctacaaaggcagaaataaatgtayccctagaacctaacatcacgtgaggcaaccagtaagagttcctttaatatgtgtccaataaacaataaataaaacaaactcttagaatgctaaaaggtgtgtgagcatgtattactgaacagctctcacataaagtacctcagtacatctcagccactatatgtaacctcattacaaagtctactatttactgcagtgtttatttgccttgttctaggtagctggttgataagacaagaaagatttttctatcttccttcaatagcattaaaaagaaaatcagtaactttttatatttctgttaagaactcatttcttataccttttttcaactttaagatatattaaactagtaaagtaaattaactacaaaactccaggaaacgttagtattctacataaattaagaatggtgacttacgtgtaaaattgatgaaaagtgatacaaaaagctgttttcactccatactaccacctcaaaagaaaaccttcactataagaggccgaatcagtgaccctccacatatgctctaattcctgggtcctctgaatgtgttaggttacatggtaaaaggggctctgcagatgtaattaaggttaaggatcttagatgaaaagattatcctggatatccctgtagtctgatctaatcgcacgggcctttaaaagcagaaaactttctcaggttggaggcagtgtgacacagcagcataagttagagagatctgaagcatgggaaggctctgagatgggacccacaggcaaggacttcagaggcctctaggaaatcatggaaagcatgagaaggaatgtgggcagcctctaggaggaaagaccaggcttcaactgacagccagcataaaaacaggatctccaacaacttaaataaccttggaagtaaattcttccccagagcctccggtaaggaatataagccttgctgacaccttgattttagcctggcaagacccatgtccgatttctaacctacagactgtgagataataaatgggcattgttttaatccactaaatgtgtggcatttgttaaggctggaatagaaaactaatacactggtcactttttattttctttatataaaaatgctagtgtcattgctaaatatcagggaatatatatacaatgtacttacgcacacagacatatgacacgagtgatttttaaatattctaagggagtgtttgaaaaaatggctataaaggctctaatctacacacgctaataagctttaac

SEQ ID NO: 724100 - DNA, 2706 bp, Homo sapiens
tatgccaggctaagaaattcggacttcctccagaatgaaattggagaggcagagatgggtcttaagccaatgaataatataaacacatatggcaatgctgtgaaatatatcagaaagggcaaagcaagcagacaagatgctatgatagcaagagatatacttaagagataaaattgccaacagagttgaatgtggcaggtgggcattaagcaagagactcaaaaataatttctgagattcttaactcactaacacagagctctagtaaatttaacaatcatgtataaatgttgttatacataaaaatgtatgctattcagtccctgctgaaatattagacttgatcaacccaacaaaacaattacacaaaggttacaacttcttcgtaacccaacaaaacaattatacaaaggttaaaaagctgtctgggaaggaacagttactggagagcaggaagaaaaggcaaggaaagtggagaggggaggaagaaagaaaggaaaaataaagaaatactaagaaagaaaaagaaaactaaaactaaaactttctggtgaaagtaaaaatctatccacacttctgaaagagaagtttaaaaagaatttttcaaaaccataaaggaaaacactattggtgcttgactacataaaacctgaatatgtaggtatgttgactaatacaattttagaattttagaaaaaaactatgtaacaaatacaacaaagagtcactatcctttaaagtatgtaaaagcaaataagatcaggagatgctatcaataagtaagcaaagaatacaggtagttaatcccacctcacaaataaggaaaatgaattattattaccaacaaaatgcacaggatcacaacagtatctctatgtctaacctattagcaacggttttgactgccctatcttgttcagagtatagttacatggcagtcttttacaaatatgagtgtataggtagaataagattttgaaaaagaaatatacgtatacacttaaatctttaaaatggttcacacgctttgacaaagtaatcccaattctgaaaacctaccctaagaaaatgatctaaaatacaaataaaggttaacatatagcattattttatagtagtaataaaaaactggaaatggtctaaagcttcccaaagggagatgaatatgctatagtacagatatacaagaaaatataatgtagtcactaacaataatgtttttagaaagattttaatactaagggaaaaaawattacaatatttataaaaatggaaaaaatagtcacataaactataatttcaacactaagtgaaaaacaacaacgacaacaacaacaacaaaaacatagaaagggcagggtgcagtggcttatgcctgtaatcccagcactttgggaggctgaggcaggtgatcacctgaggtcaggagttcgagaccagtctggccaatatggcgaaaccctgtctctactaaaaatacaaaaattaaacaggcgaggtgccccacacctgtaatcctagctacttgggaagctgaggcacaagaattgcttgaatctgggaggcggaggttgcagtgagcggagatcgcaccactgcactctagcctgggcgacagagcaagattccatctcaaaaaataaaaaattaaaattaaaattaaaaaacatagaaaagataaatattatttctgagtagtaatgataggtttttccttttcctttcctgtattttctaactttattttttaaataatgagactatattatttttgtatttagaaacaaactccatctaactcatctatcctcaataaaagtatgccttaaccttgtatttacgtaaatagctcattcatttgagatctttctgtaaagttagttatctctactcatttaacttaaacttgtcaagcagttcagcacactgttgttgaattaaaagagctttctacagtgccctaaagtcaagggtaacaagtacatggtactaagaacttcaatttgaataatggaatgaaagcaagaaaaaaaaataagtttttagtaattgaagcggtttcaccactttaatatactttattcactttactgcacttggatttataagcataacaaggctgtgcctttagattacctgaggtgattgagcagaggctgaagtctttcatcagactgcacagcaggcaaggacctggctgttaactaaaagcagggaagaaaattagtaaaaacagcaaaggccgaacaccgaacatatttgaatactaaatgtaaaacgagctgaagggcaaatagggaggcaatacttaaaaatataaggttctatttctcttttttcaaatcaagaaattatataaaaacctgacacattacatgatcaaagctagctacatggttctaaggacatagggtatgtcactaagtttaaaagtaaagaaaaaggtgagcaaaacagagagtaaaagggagtgtcctgagttcatgaaaaagcattcacttatgagactattatctttgtaaataaaaaaggaaaaacttctaaatgtaaaactgtataacaacctatcttgtagcaccgagtcctaagatgatgaataaattggaaagataaattctgatttatagctaagccactgtgaaactggttacatacagaagtgtatgtactttattctgtcagccacatgactataaggaaccaagg

SEQ ID NO: 724101 - DNA, 2706 bp, Homo sapiens
tatgccaggctaagaaattcggacttcctccagaatgaaattggagaggcagagatgggtcttaagccaatgaataatataaacacatatggcaatgctgtgaaatatatcagaaagggcaaagcaagcagacaagatgctatgatagcaagagatatacttaagagataaaattgccaacagagttgaatgtggcaggtgggcattaagcaagagactcaaaaataatttctgagattcttaactcactaacacagagctctagtaaatttaacaatcatgtataaatgttgttatacataaaaatgtatgctattcagtccctgctgaaatattagacttgatcaacccaacaaaacaattacacaaaggttacaacttcttcgtaacccaacaaaacaattatacaaaggttaaaaagctgtctgggaaggaacagttactggagagcaggaagaaaaggcaaggaaagtggagaggggaggaagaaagaaaggaaaaataaagaaatactaagaaagaaaaagaaaactaaaactaaaactttctggtgaaagtaaaaatctatccacacttctgaaagagaagtttaaaaagaatttttcaaaaccataaaggaaaacactattggtgcttgactacataaaacctgaatatgtaggtatgttgactaatacaattttagaattttagaaaaaaactatgtaacaaatacaacaaagagtcactatcctttaaagtatgtaaaagcaaataagatcaggagatgctatcaataagtaagcaaagaatacaggtagttaatcccacctcacaaataaggaaaatgaattattattaccaacaaaatgcacaggatcacaacagtatctctatgtctaacctattagcaacggttttgactgccctatcttgttcagagtatagttacatggcagtcttttacaaatatgagtgtataggtagaataagattttgaaaaagaaatatacgtatacacttaaatctttaaaatggttcacacgctttgacaaagtaatcccaattctgaaaacctaccctaagaaaatgatctaaaatacaaataaaggttaacatatagcattattttatagtagtaataaaaaactggaaatggtctaaagcttcccaaagggagatgaatatgctatagtacagatatacaagaaaatataatgtagtcactaacaataatgtttttagaaagattttaatactaagggaaaaaatattacaatatttataaaaatggaaaaaatagtcacataaactataatttcaacactaagtgaaaaacaacaacgacaacaacaacaacaaaaacatagaaagggcagggtgcrgtggcttatgcctgtaatcccagcactttgggaggctgaggcaggtgatcacctgaggtcaggagttcgagaccagtctggccaatatggcgaaaccctgtctctactaaaaatacaaaaattaaacaggcgaggtgccccacacctgtaatcctagctacttgggaagctgaggcacaagaattgcttgaatctgggaggcggaggttgcagtgagcggagatcgcaccactgcactctagcctgggcgacagagcaagattccatctcaaaaaataaaaaattaaaattaaaattaaaaaacatagaaaagataaatattatttctgagtagtaatgataggtttttccttttcctttcctgtattttctaactttattttttaaataatgagactatattatttttgtatttagaaacaaactccatctaactcatctatcctcaataaaagtatgccttaaccttgtatttacgtaaatagctcattcatttgagatctttctgtaaagttagttatctctactcatttaacttaaacttgtcaagcagttcagcacactgttgttgaattaaaagagctttctacagtgccctaaagtcaagggtaacaagtacatggtactaagaacttcaatttgaataatggaatgaaagcaagaaaaaaaaataagtttttagtaattgaagcggtttcaccactttaatatactttattcactttactgcacttggatttataagcataacaaggctgtgcctttagattacctgaggtgattgagcagaggctgaagtctttcatcagactgcacagcaggcaaggacctggctgttaactaaaagcagggaagaaaattagtaaaaacagcaaaggccgaacaccgaacatatttgaatactaaatgtaaaacgagctgaagggcaaatagggaggcaatacttaaaaatataaggttctatttctcttttttcaaatcaagaaattatataaaaacctgacacattacatgatcaaagctagctacatggttctaaggacatagggtatgtcactaagtttaaaagtaaagaaaaaggtgagcaaaacagagagtaaaagggagtgtcctgagttcatgaaaaagcattcacttatgagactattatctttgtaaataaaaaaggaaaaacttctaaatgtaaaactgtataacaacctatcttgtagcaccgagtcctaagatgatgaataaattggaaagataaattctgatttatagctaagccactgtgaaactggttacatacagaagtgtatgtactttattctgtcagccacatgactataaggaaccaagg

SEQ ID NO: 724102 - DNA, 1658 bp, Homo sapiens
catgtaatattattcagccttaaaaaagaagaaaatcctgctatttttgacaacatggatgaacctagaacacaatatgctaagtgaaatacaccagacacagaaggacaaatactgcatgatctcactcatacgtgtaacctaaaaaagtcaaaattcatagaagcagggagtagaatggtggctgccaagggctgcagagtggagggtcacagggagatgtttttcaagtggcacaaagtttcagttacgtaggatgaataagttcatgaaatctaatgtacagcatggtgactatagttcgagatactgtatcatatacttaaaatacgctaaaagagtaggtatttaagtgttctcaccaatgtaatggatatgttaattagcttgattgtggtaaccatttagcaatgtgtgtgtatgtgtgtatatatatatatatatatatatatayatatatatatatctgaaaatatattgtataccataaatatatatacttttaatttatcacttataactcaataaagccagaaaaaaaattttttaagctgagtatttgtgaaactatgaccagggatgggtatgttgatccacagtttagagtactgccagcagcatatatatcaggaaaaaaaaatgtttgttagttgaattaaagtccaatgagtctagagtaaatattaaatatagctcgtgcaaaatgcttttggtaatagaagttatattgttcatcaagtaatgaaatggaatattacctaagattttaatgagaaaaaagttaattttgtccaagcataactttgctgaataacaagcagaactgagggctctaccaatattatctagagaactcacatggagttgttaaataaaaaggtggggggggcggttatggatgctacagaaaaaaaatgaaatatcattttctagtacttacttggattagtatctctttcagctctaatattcgtattttaatgatattgatgcaattctccaattttcattttataaacttgaatgttctaaaatatttatctaatactcacaacccaaataataacatcttccccctttaagggtcatatatgtatttccattcaagagaagatgctaacaggtaggctgagcagggaaagaactaataaatgatatcagtagtctgtgagcccatttttatttcctggcatataatatatttttaatacattgaagagttgaataaatcaatgtatcaataagtaaatggggtacagatgagtaaaagataatgggaaagtgaagcatagctatgtctaaaaagttatttgttgctctgaaacttcatagttcaggtttctgagatatttaaagaaatctctctaaactcccaagattctgggctcttctcctttttctttccatctcaggcccaacctgaacctaccctcttacatctatatcctcctaccatgcctactttcagaaaaactgtctttgaaaaatctctgaaattctaacttattagccagccagtagaacaatttaaggtacacacttactagaacagcaaccacggttattttcttttgtgaaaactactttgggaagaagttgttaatactaggacctctacaagaattccaagttattattttaaggtaaggaaaggtttg

SEQ ID NO: 724103 - DNA, 656 bp, Homo sapiens
tttgcattttttcttgcttgtttgctatctcttactactgtaactgatctttggaattaaaactccatatatccttttacttaacttttttgtgatgtaaaattttaaacatttatcatgcttactatatataatgaactgttggccaattttgtgttatttgtacatctcataatattttgaactaaatcccatacatcatttaatgagtattatacattattaaaagaaatactttacattaagtaagcacaatttatttgcacaaagaatgatttatgaatcgggcagcattcagaaccagaagaggctcagagagctgtgctgcagcctgagcagtgagcttttatargccgatgcagaataaagacaaagaaaatatatttaattggttagagtggaaagaccctagttagaggttagttggtggtttctgattggtaaagactctagtttcattttactgtttactggctgtgtgtttacttatggataaacttaaagtgctagagttgccccagtctaatggcatctcaattagtatttttgtaacaatatcttttagtattttaaaatgatttattcttaaataactatattattaactttattttatttatttatgtttttgagatggagtttcgctctgtcgccga

SEQ ID NO: 724104 - DNA, 630 bp, Homo sapiens
ctccccttccctccagcacctagccatgttttaaggtaagtataaagaaggcctcccccacctctttctgggatttgagcatggaacttcayaaggaatagagaggcagagtctccgagccataaccctcccaacctcatattttctcaccccctcttttagaatagacataaatctgagagattcccaagcccctcggatcccaaggactgcctgacaggtcctccgccctaagcctccccttgtctcaatgccaccttcccctcccctgccctcccctctcttacctagtttcttggccacagctgcatccttctcagagtctaccagcccgaagccaacacccttgtcttctaggacttgggctgctaactggagggaaggattatgattaaaattagcccctggaatttttattatcccctattctccctctcatgctttcaagttgggtcagttgaggtgcgggagatataagagttgaccttgaccctttgctaagatccagaatatcccccaaattccctacagccacacagttctgtttttggctcaacttagttcatgaatattgattgctcatttgcaatgtgcttattatgttggacttgaagacactgcactcaatac

SEQ ID NO: 724105 - DNA, 577 bp, Homo sapiens
gttcaaggtctcacagtgatgaacggagccggactggacccaggcagtttggcatcagaacccatgaattcaccactgcacgctgctggattttgcctgatagctaaattccctctgatttcctcctccttcttcctgagccagctctgatatggtttggctgtgtccccactgaaatctcatcttgaattcccacgtgttgtgggaggcacctggtgggaggtaactgaatcatgagggcaggtctttcccgtgctgttctcatgacagtgagtaagtctcaygagatctgatggttttaaaaagcaaagtttccctgcacaagctgtcttctctcgtctgccaccatgtgagatgggtctttcaccttctgccatgattgtgaggcctccccagccacatggaaccgtaagtccaataaacctctttcttttgtaaattgcccagtcttggatatgtctttatcagcagtgtgagaacggaccaatacacgctacttcctcatgggccctgctccttcctccctgataatttattctggccaggaccttgccctccatcattatacctggagaga

SEQ ID NO: 724106 - DNA, 577 bp, Homo sapiens
gttcaaggtctcacagtgatgaacggagccggactggacccaggcagtttggcatcagaacccatgaattcaccactgcacgctgctggattttgcctgatagctaaattccctctgatttcctcctccttcttcctgagccagctctgatatggtttggctgtgtccccactgaaatctcatcttgaattcccacgtgttgtgggaggcacctggtgggaggtaactgaatcatgagggcaggtctttcccgtgctgttctcatgacagtgagtaagtctcatgagatctgatggttttaaaaagcaaagtttccctgcacaagctgtcttctctcgtctgccaccatgtgagatgggtctttcaccttctgccatgattgtgaggcctccccagccacatggaaccgtaagtccaataaacctctttcttttgtaaattgcccagtcttggatatgtctttatcagcagtgtgagaacggaccaatacamgctacttcctcatgggccctgctccttcctccctgataatttattctggccaggaccttgccctccatcattatacctggagaga

SEQ ID NO: 724107 - DNA, 2609 bp, Homo sapiens
tgtttgacctggctccagccccaagagccccttttccttctaactgaagtctcttgaccatacccatggggttggcttcatcccagagcatggaagaatgactttcatgtgtcctagtttcactttctgggactcagtgaaagtataaggtggttggaacagcatggacaaagatctggaggtgggattgagctggagtccacaggtggcagcaagctgatattcagagaaagaggtagtttagagtctgattaccagtatttagaatgtcaggttagggagtgaggaagtagggaggcaaggcaaacctctgagcaagaaagtggcaggatcaccactgcgattcagcaaggcatctctgtgatgctggttgaggcaggatggtggcctggttgttaaggcaagggaagaaccctggattcaggaacaggctcagtgcaaaggcaaactgtgatattccttcctgggagttttggaagagctggtagcagctgactgcttctatacctcccctgcccgggcatgtatggttgatggaagagcaaaggactccattctttgggctggaatgccaaggcctgggtggtggtgtagcagagggaaaattaaactcctgctgtgtccttgagtaagccgctcctcctctcttggcctcagttttcccattagtagaataaggggttaggagacctgggtaggtttgtgactgcttcatcctgtttcttggagtcctgctatcatacagtaggaatggcaggcgtgttttaacttctgtgccactgctgcttggagtgtgtgctgtgttggattctgaagtggaatctgggctcagtgggaaagggctctgatagattagcaatgcctgccctggttgtgacttgggcagtggcctgtctcgttaatgccccatcatatggaaaccttatgttcacacggcatgactctagtcactcaggttaacatcgtcacaatttttgctctatctatataccacctcaactgacttaattaaaaaattaatatatcttaaaaattgacttactttgacattatattgattgtttacatggttttgaatccggattatttaaaaacacacatgcagctaagtctaatttttattcgtagtccctttcccctgttcttgctcttactcccaaagagaattgtttttatttgtttttggtttatctttctattgtttcttttggcaagttatataatgcattgttattttccttaactgtctatagatcggtaaaagggccaaaatgttatttgcttttacttgtccaaattaaaaatctttttattgtagtgtaattgtggtataatgcatatacagaaaaatacacatatcttaagtgtacagttccatgagttgaaagttggaaactctaaaagtgaatgtatccatctgatcacctctcagattaagaaaaaaagtattcccagttctccacaaacatcctgcatgggttacatttttattagatgtttgggcatcttcttttttggagttcctatgtctttgggtaatttttcatttgcattatatctgcctttttacaactggtttgtagggcttctttatacgttctagttgtgtgtctaatgttgattacaaatattgcaatagtcttctattttgtggtttttattttactctctcagtggtgtcctttgataaacagaagttcttaatttttaaatagtctggtttatccatctttttctatataattaataattttttgttccatttaagtaactctaaccccaaaggcgtaagatcctcttatgtttatgatctagaagcttttttgttctatctttaacgtgaggatacttggaacagacttttgtgtatgttaaggtaggggtctgattttcattttttccatacagatatcccacagacccagcaccatttattgagaagacaatctctttcccctgcacttcagtcattccattaaaaaaaactgactatcattttgaatggtgagtttgatgtgctaaattatttttgtaaaatacattaaagtacacatgtatttgtgaaaataaaacatgtttaatctgcattaaaccacctaaaatcatcttatgtaccacactttaggaaacctctcagtgggatgttgagataatagcctcagataagggaagaaattctcaaagtaaattcttaaaattcctttaagaattcattatataagaagttcatatttgttttagaaacaatagaaaatacagataactataaagaagtaaataaaaatcccctgtaaccctcttacccagaggtaaatgctcttaycattttggtatattcttttccagccattttttcccccacacacacactcacacacacacacacaacacacacacgttgtatcttataaaaaaggggtaatgaaatacatactatgttgtatccttaatttttacttaatatattgttaacacctcttcatgtcgataaatcatatttttacataataattttattagacatctaggcatgatatgccaactggctcccactttttccattcttttaaacatagattcttatttctttcttcctttctctaagccct

SEQ ID NO: 724108 - DNA, 1148 bp, Homo sapiens
tgtaagctatttttgtaaatccacagtgtgccttctaggttttttttctcttactctcaaaactgaaataggcttggtacagtggctcatgcctataatgccagcattttgggaggccaaggtgggaggactgtgtgaggtcaggagttcaaaagttcaagaccagcctggacaacaaagtgagattccccgtctctacaaaaaattaaaaaattagccaggcatggtggtgtgtgcctatagacccagttactcaggagactgaggtgagaagataatttgagtccaggaggtaaagtctgcagtgagctatggtctcgccactgcattccagcctgggcaacagagcaagtccctattaaaaaagaaaaacagaaacctgaaacagatgatcaaagttgcatgtataaacgttattaaaaaagattcatcatttgaatatttagttactatttactaaagctgcatgtttaagagtttctttaggtgacttcacatatattattgtcatattcattaggctatggtaggaagtccagttagatttaaactgatacttgttctactcagaataatttatgtcacctgaagagargctgatggctatattcttatttcagcatatttggatatgggaaaattaattaaactaaaattctcatatgactttggaaatgactattgaaaacacactggcgactgggcacagtggcttacacctgtaatcctagctagccctttgggaggctggggcagtaggattgcttaggcaaggagttcaagaccagcctgggcaacatagcaagaccccatctctacaaaatatacaaaaatttaccatgtgtggtggcatgtgcttgtggtcccagctacttgaggggctgaggtgtcaggatcacttgagcctgggaggtgcagtcgggtgagatggtgccactgcactccagcatgggtgacagaacaagaccctgtctcaaaaaaagaaaaaacacattgggaagtagaaaagctactcatgagccatctaagtgacatgtagtccaaacatctgtaatatgctgtagaactggaacaaaatgatattaaggataattttagaagcatcttcgtgaatagttactgatgtaggccagttcttggcaaaatta

SEQ ID NO: 724109 - DNA, 1117 bp, Homo sapiens
caattaatgctattctaggattagaactctttttaccaaactacactacttccagtgtttataagagggtatatgtagatcaccaccataacagtacatgattatgttactggttatgaggctggcttgcctgaagtaatggtcttagctgggtaagatatagatggtcgcataacagaatctcttaggattctttttacaaaatacatataccaacccctctttgaaatcygcttggctgaagagactgtcagtttaagagcatctttaatcagtaagcataggcccccctggcaacaaaaataggcaaaatattcttgtgctttggaaataggtgtctagaaaatatgtagcttagtaacctaattaatgcacatagcattgcagatgtgtaccataaagctatcctttccactgttcactaacaaaagacatttgactcagttaccatatatgttctgaaaaactattagtaaaaaacttagacttgtgagacctcttattttttcatattattatttttatggatgtacaaattctccttgtcaagaattgtgaagggtctgagattttattgcaggctaataaattagcctactacaggatagtaattatggataactgaaggtaaaaagacatgagtatcagcatgttttgcaccagtttcctgagctctagctaccatagaatgacatgaagtgggctggatgatatctgcacatgcatgggatgcagacaggaaccttaagttgagggagcccacatttttgctccagagggagacatactttctttatcttccaaggtttttgctaagtgaccacccttgaaaagatagtctgaagcaaagagcatgtttgcagcttgcaggacaggcagaaatgtgagagagcaatggagaattgtctcctaataggcattatattatattagaccaatgagaccattatttattctcaatgtaaatgaaatatgttcagaaattcttagtgtgttaggaatgtgacctctgtgcactttgtttttaattccagaaaaatatctgttgtttgcgtattacttgcccttgtttagtatagtaacatgaaagttaacttgctttagttttgatgaaggg

SEQ ID NO: 724110 - DNA, 1117 bp, Homo sapiens
caattaatgctattctaggattagaactctttttaccaaactacactacttccagtgtttataagagggtatatgtagatcaccaccataacagtacatgattatgttactggttatgaggctggcttgcctgaagtaatggtcttagctgggtaagatatagatggtcgcataacagaatctcttaggattctttttacaaaatacatataccaacccctctttgaaatccgcttggctgaagagactgtcagtttaagagcatctttaatcagtaagcataggcccccctggcaacaaaaataggcaaaatattcttgtgctttggaaataggtgtctagaaaatatgtagcttagtaacctaattaatgcacatagcattgcagatgtgtaccataaagctatcctttccactgttcactaacaaaagacatttgactcagttaccatatatgttctgaaaaactattagtaaaaaacttagacttgtgagacctcttattttttcatattattatttttatggatgtacaaattctccttgtcaagaattgtgaagggtctgagattttattgcaggctaataaattagcctactacaggatagtaattatggataactgaaggtaaaaagacatgagtatcagcatgttttgcaccagtttcctgagctctagctaccatagaatgacatgaagtgggctggatgatatctgcacatgcatgggatgcagacaggaaccttaagttgagggagcccacatttttgctccagagggagacatactttctttatcttccaaggtttttgctaagtgaccacccttgaaaagatagtctgaagcaaagagcatgtttgcagcttgcaggacaggcagaaatgtgagagascaatggagaattgtctcctaataggcattatattatattagaccaatgagaccattatttattctcaatgtaaatgaaatatgttcagaaattcttagtgtgttaggaatgtgacctctgtgcactttgtttttaattccagaaaaatatctgttgtttgcgtattacttgcccttgtttagtatagtaacatgaaagttaacttgctttagttttgatgaaggg

SEQ ID NO: 724111 - DNA, 767 bp, Homo sapiens
gacttaatgactgaatctttcctatttttttgtttcacttatttggtaagattgaataaatatcccaaactagcaccagctgaggttgctccagttgttccagcccattatgtccttcccaaacagcaccttgttgttcaaaatagactgagaaagagtgccctgtaacaggggagccccaaacatgagacttttgggggaaaaccttgcttgtgatcaagcatatacaatacatacttgaagataatttttaagagggaaggctgcctggtttcttcatgctttctgtaagtgctgtctaagctttgagatttggaataaaatgmccaactctactaccattttccttttgaaatcacgggcagatagggaactgccaagactttatcttaataaaaaataaaagtaaaataaaataaaaataaaagtctttctttttaattttgaaataaggtcttgctctgtcaccgaggctggagtgcagtggcacaatcacagctcactgcagccttgactgagctcaaagatcttcctgagtcagcctcctcagcagctggggctacaggcatgcccaccatcacacctggttagttaaaaaaaaaatttttttttgtagagacggagtctcactacgctgcccaggttgatctcaaactcctgtgctcaagtgatcctccgaaagtgctgggattatcggcatgagccaccacacctggccctactttaaacataatactatactactataggcacaatctttccaagga

SEQ ID NO: 724112 - DNA, 647 bp, Homo sapiens
tcgatctcctgacctcgtgatccacccgccttggcctcccaaagtgctgggattacaggtgtgagccaccgtgcctggccagtgattaacttctatgtgactgttccattgaaactattttgacctagtagggattttcttttttttttttttttttttttttttttttttttgagacggagtcttgctctgttgcccaggctggagtgcagtggcacgatctcagctcactgctgcaagctccgcctcccgggttcacgccattctcctgcctcagcctcccgagtagctgggaccacaggcgcctgccaccatgcccggctaattttttttgtatttttagtagagatggggtttcaccgtgttagccaggatggtctcgatctcctgacctcrtgatccaccctcctcagtcccccagagtgctgggattacaggcgtgagccaccgcgcccagccgggattttcttaatggatgatttttctcattctagtttttattttatttttaactggattataacatctttaagagcaaagagcacatgattttacttctatcttccctgtagtagacaacaatgtcagcaagcaaacaactcttagtaaaaatcaaatcatgaatttagaaagaatattttggccag

SEQ ID NO: 724113 - DNA, 921 bp, Homo sapiens
tttcagctggttatttttacattttattaaaaaacttttttttaagacatggtcttgtgctgtctctcaagctggagtgcagtggtgtcatcatggctcacggctggctcaacctcccaggcttaagtgatcctcccagctcagcctcccaagtagctgggggcacagtagtgagccaccacgccctgctattttttaaaaaatttttgtagagatagggtctcactatgttgcccaggctggtcttgaactcctgggctcaagtaatcctgccttggcttcccgaagtgctgggattataggtgtgagccaccatgcgtggcctcagctggttaaacacttccgcaccttatacacattttagagatttatcattgtggttcagagtaacagaatattctgaagtttctttctttttttttttttttgagacggaatctcgctgttgcccatgctggagtgcagtggcacgatctcggctcactgcaacctccgcctcccrggttccagtgattctcctgcctcagcctcccaagtagctgggattacaggcatgcgtcaccaagtgggtccagctaattttttaatattagtagacacagggtttcaccatgttggccaggctggtctcgaactcctgacctcaggtgatccgcccgcctcggcctccaaagtgctgggattacaggcgtgagccaccacacatggcctgaagtttctttttgccatatattgtttaggtctattcttactgccaggtcctgatcctgtttgttgctgctagtttattgggcagagagaagcaagagtctcgtaactttggctgggaacatttagttactcctaaccacagttccgtctttacctggtactgcaggaatgaaggcagacaacagagtagggataaaagcaggagctctg

SEQ ID NO: 724114 - DNA, 657 bp, Homo sapiens
cacacacaaaacctttccaaatcatcctgtcagagatgtactttcacttcagagaataattctgtccaacttagagattttgttgtttctggtaatataccacagcatctcacctaagagtttgcttattacagatcagaacacatttgaactctaggctttacgtgcagaacacacggaaggtgatgccatcaggctactaccaaaggacccttcttccagtgtctcaaatatatggattttataaataagaaacatttctgattaatcagcattgtaggttcaagtaaaaaaaaaaaaaactggcatagaattctagtcttcctacttaatttcctaatgattcttggtgtccttgtcagaaaattattatttttttcttttttttgagacagtctcgctctgtctcctaggctggagtgcagtgattcgatctcagctcactgcaacctccgcctcccaggttcaagcgattcttcttgcctcagacttctgagtagctgggattacaggtgccygccaccacgcccggctaatttttatatttttagtagagatgaggttttgccatgttggccaggctggtcttaaactcctgaccttgggtaatctgcctgccttggcctcccaaagtgctgggattacaagagtgagcca

SEQ ID NO: 724115 - DNA, 1615 bp, Homo sapiens
cgtcttcttcccagaaactatttagtagtcaagggacacaagtacctgtgtgtcccttctttaggatttttggatttagaaaccaaatttgatagtcagccctctcctgtgactgacagaacctggaacacagaagrcctgagggctatcagtggccctgttttcctccacatggaagaaataggtctgccatgagaggctggggccaccccagagagagatgcggaggtgaggggcagggagatagtactggggaatctcgtgtctgtcgccgaagctgccctgggaactagtaaggtctttttgcctgaacgagttggattttggtcacttgactaaagccctgtccagcccccacatgccctttcccatccttcccaagataggaaggacaaagggcagcagcgccagggaaaagaaaagcctggaaggcagggaggtagagggaggcacccgttagactgtcccctgggtttcctccgacaagggcatcggcagtgacattgtttgtttctgggattgagatccctccccggataccaccaccccttggctggcagtcgggtgaggcagaggtaagaattggtggtggggcagttgccagtgtctttggaaacctggtgcctgtggaccacctttctcacacaacttcacacgggcagggagggaaagaggaagagatcagataggggacaagagaacagcttattctgtgctagagaacaagagagtgaccccaggcttgaatgaaaagggctaggagacttcagaagcaacctggatggttgatcactactcagacaccccagtgtggccttgtgcggccatttctcttttctttgcctcaagatctacaactctgaaacgagcaatgggagcagaacatactctgggctacagaccctgatccctcccaagtttggggaaaacttggcctcacacgtgatcccagataggctcctaaccttggcacctgccaagctcctatgaactctaattgctgtgacgtctgggaacccccccatggtaggccagcctacagggccttcctagacctgtccaacagccatggcctcaggtgccaggcttgctgagcctccactgttggtacagctgatgggaaaggacaggaagctgggacgtgggcagggagggtgagttactccaaatacaagatccagcccaatgctggtatcttgaggccagtttgatgtgcagagcagacagatttcagaattggggtttcaggaaacagacatgttcagagcaggagcccagtccagagcttaggagtacagacacccagccccattcctccaaggggagcagagggggatgctgacaaggctagtcagagtgtcaggaagcaaagcagggctgataaactgtataaactgggaatatgcagctgaggttggatggctttggtccaggggtgcccaggactcatgcacaccaggctgttggcaacaaagctaataattccagagcccagcagcccacgaaggctcagggagcagcctggttaagagtggtaggatcggtgcctgcagcagaggagggagagactacgagccacatgccacaactacaatctatgcttgggggatgagtc

SEQ ID NO: 724116 - DNA, 1615 bp, Homo sapiens
cgtcttcttcccagaaactatttagtagtcaagggacacaagtacctgtgtgtcccttctttaggatttttggatttagaaaccaaatttgatagtcagccctctcctgtgactgacagaacctggaacacagaaggcctgagggctatcagtggccctgttttcctccacatggaagaaataggtctgccatgagaggctggggccaccccagagagagatgcggaggtgaggggcagggagatagtactggggaatctcgtgtctgtcgccgaagctgccctgggaactagtaaggtctttttgcctgaacgagttggattttggtcacttgactaaagccctgtccagcccccacatgccctttcccatccttcccaagataggaaggacaaagggcagcagcgccagggaaaagaaaagcctggaaggcagggaggtagagggaggcacccgttagactgtcccctgggtttcctccgacaagggcatcggcagtgacattgtttgtttctgggattgagatccctccccggataccaccaccccttggctggcagtcgggtgaggcrgaggtaagaattggtggtggggcagttgccagtgtctttggaaacctggtgcctgtggaccacctttctcacacaacttcacacgggcagggagggaaagaggaagagatcagataggggacaagagaacagcttattctgtgctagagaacaagagagtgaccccaggcttgaatgaaaagggctaggagacttcagaagcaacctggatggttgatcactactcagacaccccagtgtggccttgtgcggccatttctcttttctttgcctcaagatctacaactctgaaacgagcaatgggagcagaacatactctgggctacagaccctgatccctcccaagtttggggaaaacttggcctcacacgtgatcccagataggctcctaaccttggcacctgccaagctcctatgaactctaattgctgtgacgtctgggaacccccccatggtaggccagcctacagggccttcctagacctgtccaacagccatggcctcaggtgccaggcttgctgagcctccactgttggtacagctgatgggaaaggacaggaagctgggacgtgggcagggagggtgagttactccaaatacaagatccagcccaatgctggtatcttgaggccagtttgatgtgcagagcagacagatttcagaattggggtttcaggaaacagacatgttcagagcaggagcccagtccagagcttaggagtacagacacccagccccattcctccaaggggagcagagggggatgctgacaaggctagtcagagtgtcaggaagcaaagcagggctgataaactgtataaactgggaatatgcagctgaggttggatggctttggtccaggggtgcccaggactcatgcacaccaggctgttggcaacaaagctaataattccagagcccagcagcccacgaaggctcagggagcagcctggttaagagtggtaggatcggtgcctgcagcagaggagggagagactacgagccacatgccacaactacaatctatgcttgggggatgagtc

SEQ ID NO: 724117 - DNA, 1615 bp, Homo sapiens
cgtcttcttcccagaaactatttagtagtcaagggacacaagtacctgtgtgtcccttctttaggatttttggatttagaaaccaaatttgatagtcagccctctcctgtgactgacagaacctggaacacagaaggcctgagggctatcagtggccctgttttcctccacatggaagaaataggtctgccatgagaggctggggccaccccagagagagatgcggaggtgaggggcagggagatagtactggggaatctcgtgtctgtcgccgaagctgccctgggaactagtaaggtctttttgcctgaacgagttggattttggtcacttgactaaagccctgtccagcccccacatgccctttcccatccttcccaagataggaaggacaaagggcagcagcgccagggaaaagaaaagcctggaaggcagggaggtagagggaggcacccgttagactgtcccctgggtttcctccgacaagggcatcggcagtgacattgtttgtttctgggattgagatccctccccggataccaccaccccttggctggcagtcgggtgaggcagaggtaagaattggtggtggggcagttgccagtgtctttggaaacctggtgcctgtggaccacctttctcacacaacttcacacrggcagggagggaaagaggaagagatcagataggggacaagagaacagcttattctgtgctagagaacaagagagtgaccccaggcttgaatgaaaagggctaggagacttcagaagcaacctggatggttgatcactactcagacaccccagtgtggccttgtgcggccatttctcttttctttgcctcaagatctacaactctgaaacgagcaatgggagcagaacatactctgggctacagaccctgatccctcccaagtttggggaaaacttggcctcacacgtgatcccagataggctcctaaccttggcacctgccaagctcctatgaactctaattgctgtgacgtctgggaacccccccatggtaggccagcctacagggccttcctagacctgtccaacagccatggcctcaggtgccaggcttgctgagcctccactgttggtacagctgatgggaaaggacaggaagctgggacgtgggcagggagggtgagttactccaaatacaagatccagcccaatgctggtatcttgaggccagtttgatgtgcagagcagacagatttcagaattggggtttcaggaaacagacatgttcagagcaggagcccagtccagagcttaggagtacagacacccagccccattcctccaaggggagcagagggggatgctgacaaggctagtcagagtgtcaggaagcaaagcagggctgataaactgtataaactgggaatatgcagctgaggttggatggctttggtccaggggtgcccaggactcatgcacaccaggctgttggcaacaaagctaataattccagagcccagcagcccacgaaggctcagggagcagcctggttaagagtggtaggatcggtgcctgcagcagaggagggagagactacgagccacatgccacaactacaatctatgcttgggggatgagtc

SEQ ID NO: 724118 - DNA, 1615 bp, Homo sapiens
cgtcttcttcccagaaactatttagtagtcaagggacacaagtacctgtgtgtcccttctttaggatttttggatttagaaaccaaatttgatagtcagccctctcctgtgactgacagaacctggaacacagaaggcctgagggctatcagtggccctgttttcctccacatggaagaaataggtctgccatgagaggctggggccaccccagagagagatgcggaggtgaggggcagggagatagtactggggaatctcgtgtctgtcgccgaagctgccctgggaactagtaaggtctttttgcctgaacgagttggattttggtcacttgactaaagccctgtccagcccccacatgccctttcccatccttcccaagataggaaggacaaagggcagcagcgccagggaaaagaaaagcctggaaggcagggaggtagagggaggcacccgttagactgtcccctgggtttcctccgacaagggcatcggcagtgacattgtttgtttctgggattgagatccctccccggataccaccaccccttggctggcagtcgggtgaggcagaggtaagaattggtggtggggcagttgccagtgtctttggaaacctggtgcctgtggaccacctttctcacacaacttcacacgggcagggagggaaagaggaagagatcagataggggacaagagaacagcttattctgtgctagagaacaagagagtgaccccaggcttgaatgaaaagggctaggagacttcagaagcaacctggatggttgatcactactcagacaccccagtgtggccttgtgcggccatttctcttttctttgcctcaagatctacaactctgaaacgagcaatgggagcagaacatactctgggctacagaccctgatccctcccaagtttggggaaaacttggcctcacacgtgatcccagataggctcctaaccttggcacctgccaagctcctatgaactctaattgctgtgacgtctgggaacccccccatrgtaggccagcctacagggccttcctagacctgtccaacagccatggcctcaggtgccaggcttgctgagcctccactgttggtacagctgatgggaaaggacaggaagctgggacgtgggcagggagggtgagttactccaaatacaagatccagcccaatgctggtatcttgaggccagtttgatgtgcagagcagacagatttcagaattggggtttcaggaaacagacatgttcagagcaggagcccagtccagagcttaggagtacagacacccagccccattcctccaaggggagcagagggggatgctgacaaggctagtcagagtgtcaggaagcaaagcagggctgataaactgtataaactgggaatatgcagctgaggttggatggctttggtccaggggtgcccaggactcatgcacaccaggctgttggcaacaaagctaataattccagagcccagcagcccacgaaggctcagggagcagcctggttaagagtggtaggatcggtgcctgcagcagaggagggagagactacgagccacatgccacaactacaatctatgcttgggggatgagtc

SEQ ID NO: 724119 - DNA, 612 bp, Homo sapiens
acctccatgggcaacggagcttaatcctgctggggactgatgggaaacagtagaaaaygacttcacagtcatctcaatcaaaggctgaggaggctggagaatttataccctaacttctatcagtcactggttgagggcttttcccagtggggcatcagttcactagcacttccagcctacctcatatgtagcagaggcccagaagcccagagagccccaggcagagtggcaggtgctggccattggacactggtcctgcctgctgtaaatcattgtgctgtactaggtcctcttaaccaccgaaaaggagtatgccaagaggatctggggcagatactgatagcacctgctacgtgtactgaccacttgatggaaccagatttaaaatgcagagctgtctggttactttcagtaagtcctgtggtgcccacactggaccatgactcagcagagattctgagcatccaggcaagagcccaacaggaaggtccttggccttggaactcttgttagcaaggggaaatgtggcagccagtggccaaagcttcaagaactgctcatgagccctcaatcctctaaaagagaggccccaaatggaactgagacaacccg

SEQ ID NO: 724120 - DNA, 1136 bp, Homo sapiens
gatgagggccagaggcctggtatgtgcaccctcattgcggagcctgggtcgggaactccctccttcgggtcgggacccggagtgaaaaaccggctctgctgcgagctgttgagaacggcgccaccagggggcgctcgaacgcgccgcgctttggtggaaaatgtggggatttgaccttgtsggaacaggagcacctggggcttcaggtcacgggatccgtggcggattctgagcgccatcgcgttcggagccacgcggtcgtcagcactctgggcgcgggggtgcgggggcggacactggggtgttgggatggttcggcgccccagctcagcgacgccctctgccccgcaggaggagaagaaggtccctccgccgataccaaagaagcccctgcggggccggggcgtgccggtgaaggagcgctccctggactccgtggaccggcagcggcaggaagcgcgcaagcggctcctggcggccaagcgcgccgcttccttccgccacagctcggccaccgagagcgccgacagcatcgagatctacatccccgaggcccagaccaggctgtgaccggtccggcccgcccagcccggcccgggcccgcggttctccacccgtactgtacacccagcgtcgaggtcactgtgaacgcgggccgccccgtgcgcccgccccaccggcaccggacgccccggcccccgggcccgtcacactctcgtgggttttttaccttcctgatcccacgcgaaggcgcccgggctgggcagggggccgtgcctctccgccctgcgcccctcacctggatcccctgcccacctggtccgacgctttgtccccacctcctccccatgggcaccatctctgccattctttcccccacgggccaggccgggccgggtccctcatctgggctctgcgtccccccctcccccaccccgcggggctgggcttcgtggggatcaagcttcgtggctttttatgaagaatcccgaaccctgcctaggagcccgccccaccctcccaggggctccatcctcagccctctgcccactgggcccagggaccacagtggctggaccaacccaggaccagggcgcctgggcctctcccctttcccagcggctggggaggggaga

SEQ ID NO: 724121 - DNA, 880 bp, Homo sapiens
tccttcattcttccatctccttagccactttcttctctctatctcccctttaatcactggtcctctcatttgtctcaatttccatgaagagatgaggccaatcaatataagtttggggacttcaatgatgacatagttattaagcaaccaacaaaaacacagtcaaaagaaacactgtcaggggcatcagggacagaattgagcggragcaggtgaggaggttgctgtgggtcaacagtgtggggaggggaagctatctcctctggacctggatgtatcacagcatgattagagtaatacacaacatcaagatgacttctttcttacagaggaaatttacagatcattaatcagttgaatttgattaccacaaaggaattagtttcagtgttcatcctgtagagtaaaggaaaccatattctggcccagatgaacaggtttccaccatcgtcaaaaccacaagggacagatgatcagcactagcatcagggggtgtggccccaggcagtggggtaacgtggaaaatggaacacccatccttccccggccactgcacaaaatgcaagagccagcatctgtccagctcttgaaaggcatgcacaccatccgtatgttaatgtcaaatagaatgggaagaaaaggagagtggtggaatctgaggaaagagcccttccccctggtttttcagccttgcgaaaccccacgcctataaaaccaccagggcacttttcacagggaaggtaaagaaaaggacatattttcaacgggcagcaagggttgcttaaagaaagagacgagggaatcggatgggccaggattctcaactgaacaagcaataaggccttgttgtgttgtggccaacaaaatgtgccatcacttc

SEQ ID NO: 724122 - DNA, 880 bp, Homo sapiens
tccttcattcttccatctccttagccactttcttctctctatctcccctttaatcactggtcctctcatttgtctcaatttccatgaagagatgaggccaatcaatataagtttggggacttcaatgatgacatagttattaagcaaccaacaaaaacacagtcaaaagaaacactgtcaggggcatcagggacagaattgagcggaagcaggtgaggaggttgctgtgggtcaacagtgtggggaggggaagctatctcctctggacctggatgtatcacagcatgattagagtaatacacaacatcaagatgacttctttcttacagaggaaatttacagatcattaatcagttgaatttgattaccacaaaggaattagtttcagtgttcatcctgtagagtaaaggaaaccatattctggcccagatgaacaggtttccaccatcgtcaaaaccacaagggacagatgatcagcactagcatcagggggtgtggccccaggcagtggggtaacgtggaaaatggaacacccatccttccccggccactgcacaaaatgcaagagccagcatctgtccagctcttgaaaggcatgcacaccatccgtatgttaatgtcaaatagaatgggaagaaaaggagagtggtggaatctgaggaaagagcccttccccctggtttttcagccttgcgaaaccccacgcctataaaaccaccagggcamttttcacagggaaggtaaagaaaaggacatattttcaacgggcagcaagggttgcttaaagaaagagacgagggaatcggatgggccaggattctcaactgaacaagcaataaggccttgttgtgttgtggccaacaaaatgtgccatcacttc

SEQ ID NO: 724123 - DNA, 1033 bp, Homo sapiens
tattgtttatttgaatactttcaaaacgtctgaaatatcttagaattatgaattgcctaagaactaaatggtttcatatatactatgctttttatcgtaatatcagtgagataactatggttcttagtagaaatataagacataatcttatatccctgtatcttatgtcagaaacatgatgaattttcattttcaataaatatcaagtatgtttttgaaaaatttttggaggctgctaattctggagtgaaagcagagacctcttatgtgaactaataattactgagtcctttagcttgtatacatctaatttatcaaacgtttttggcttaaagtatggtatgaccatatggttttgctgttttcttattataaaattaacagagttttaaaactagttgagactagatgttttcatctaaccttcttttacagatgagaaaacagatccagaaacattaagtactcacataaattaattttaaggccaaatgtgatttatatctttatttcattttagtagaaaatgaataattattttgtgatcgtaaaactctacaatctgctttcagggaactaattaatatagttagttgaaaaaataatgaagtgtttgtaacaccaatatgatggattttttttaacactttgaatgttaccagctttagatgtaaaattggccatcattaaataaaatttctttgctrtgaaagcattttgctaatagatacatatattgaggaaatatggagactaaaacagtacttctgttttcactgtaagctaaggaacatagcaaatacaaattaggaagcatttacttgtcatggaattttcaggacatttgtaggtttatggttttttttgagacacagagtctcgctctgtcgcccaggctggagtgcagtggtgcaatctcggctgactgcaacctccacctccgggttcaagtgattcttgtgtctcagccacctaagtagccgggactacaagtgtgcatcaccacacccagtgaatttttgtattttcagta

SEQ ID NO: 724124 - DNA, 1087 bp, Homo sapiens
gttcccctatcccttccattcccctacccctaagcaaacactaatctactttctatctctccagattttatgctttctcttttatgtcatgaaatgtcttttaatgtattactaaatgactgaaataattcatgtcataacagcagcaataatttttcttttgggaatattttgctagtctgtagtgttagccattctaaaagaatatgaagtagtatcttattgtagttttagttcacattcctctaacaactaatgatgttgagcattttttcatttgcttattggccatttgtatatcttcttttatgaacatctctttaaaagttttgtaccatttttaaggtcaggttatttatttatcatcagttgtagcagttctttatgtattctggaaccaagtctattggattccaaatacggtattttctttgtatatatggtaaatagaatactttctcttttaagtcataagatatattttaagatattaaatgactaaaattatttaggtcataagttaaatatttttttcctgtggtggtattttttaatcccttctttccacctastcactttttggaatatctgtagcaataatagtaggaacagtagatgtgcctttggagtgaaaataaatagccatttaaaacataggcctttatcaacatttagttctttcaattaggaaatggagaatgaatgtttgagtttttaaggggaattaattgaatgatattttatcatttaagatgaaatcataacactagacacatagttgtatgttttaggaggaaatttagtttttctatctgtgcttctcatgaataggagcacttcttgagtactctggggtgatttaagccctttcccaccaactgtagtccgtttgctttattaatatttatttatttatttttgagacagagtctcactttttcacccaggctggactgcagcggcacaatcatggctcactgtaacctcagcctccagggttctagaggttgtcatgtctcagccacctgagtagctgggattacagacgtgcgccaccacgcccgggctaatttttaaaaatattttt

SEQ ID NO: 724125 - DNA, 704 bp, Homo sapiens
ccagtgatatgggaggacactgaagcccagggagaccagtataaaagccacacagctcggtagcatccaggctgagatcagaacccaggactactgactcaagtcttagaggccttccctccctaccccacaacctcatggagaagacatagcatactctaggcagggttcctcagagcaggacctatggaccagtcggcttcagaatcctctgggaaactgtttagaactcaggtttctaaggtcaatttcagaccaactagatcagaactgatgaggtgggggtccaggaaaccacttcttatctaccactttcttggagaaccattggagcatatgtcacaagtagtggtgagtggtgttgcaaataattggttactaataatacttaaagcatccaatttggggagtgatttactttttgaatagaacagatataatagcctggctctcacacacttgaataatgatcagcttctttgaccagaaaagggaatkgcacgtgccccaaagtctgacttttcagtgcacctgtaaatgtgtcttgccagtgacctgatactttatttgtgtttaggcctcccttaagtgactatttagtgggagaaacttgagtgcaccagctttggagacaggcaaatctgggtttggatccaagctctaccattcacaatctgttgatcaaatctcttgacttctctcag

SEQ ID NO: 724126 - DNA, 1714 bp, Homo sapiens
tgagatttgggaggggacacaaattcaaacagtatcactaccaaaattgacccaaacacaacactctactactagttacacactcaatagaaatgcatctatttaaaaaaatgcatatatatttatatcgacttcacttggaatggtgctaaaccaaagataacccatcaacacaggatgaataaacaaataatataatattcacacaagggagcattatatattaatgagaaagagcaaactacggctaacacaacaacatgggtgaatcttataagcagtgaatgagagaagccagtcagagaaagtaaatactgtctgaatgcatttacactaagttcagaagcagtattgaacttagtattgaatatgtaatactagagagctggataatggtttccttcaggggaccagatgagcaactgtggaaatctagcatgctggtgatattctgtttattggcaaaattgccagataaataggtgagttcacttggaaactgttctctgcctctgtgcactatgctttgtgcacattatactttgtaaaaagtttgtttcagaattccctttgggattttacaactgtactgaatgtaacattcatgtgacattcatgcacaacatgaataagccagagtctatcccagcacagtgcccagccatcgtccagatggcccatcacacctgtggctagaatgtagtgatgaatcctttgatgaagttgttgcattagcttctcccaggaattttgcttctatttggattctcctgtctaccatgaatagcaaggatagttattcaagacacactggtttttgtccttcactggctcattttctgtccatttttacccactggggagccagttaacatggtgaaaataccacagtggccaaggaagccacatcacccagggttgtgcaggagcaatggaggaacaggaggcaggagggctgaaggcatctcgtttctgagtcctctaactgacttacatgagtgcctggttgcagctaaccctgagacaaatgcctgccttaggggatattaatattttccaaatctgtagctgattcactcactgagattttaatttacgccccaggcactctattgttcctccacttttccctcccaatatcccccaccctttcaggtggcctgagggtttttgaagggcwacgtgcagaagctgtttgagggtagccctcatcttctttttctgaaagcctgagttttccaggtgtcctctaggagatggaaagcttaatcctagagagtgacttctaggaaagtggagagagggtagagatggatagagtgaaggagagaggtagagggcttaccgagatctgggagatggcaggagggaggtggctcatgggagggacctaggtcctaccacagaggcgggataaagccacaggggcccaggctaggccctcccagctctgcagagatttattatgctacacttccagtagattagaaaagccaataacccttcagatatcacacactcacacagccaggggaacagatggctcggtgataaccaaaactgggtagaccaaaatggcagtgacgtctccaatgtctgcagaactgggtcccagttccgggtaaatgtaggctgctgatagtgcagactgattttcctacccactcgatgtgtcggtggcttgatgtgagagtcaataggattaagagaaaat

SEQ ID NO: 724127 - DNA, 1714 bp, Homo sapiens
tgagatttgggaggggacacaaattcaaacagtatcactaccaaaattgacccaaacacaacactctactactagttacacactcaatagaaatgcatctatttaaaaaaatgcatatatatttatatcgacttcacttggaatggtgctaaaccaaagataacccatcaacacaggatgaataaacaaataatataatattcacacaagggagcattatatattaatgagaaagagcaaactacggctaacacaacaacatgggtgaatcttataagcagtgaatgagagaagccagtcagagaaagtaaatactgtctgaatgcatttacactaagttcagaagcagtattgaacttagtattgaatatgtaatactagagagctggataatggtttccttcaggggaccagatgagcaactgtggaaatctagcatgctggtgatattctgtttattggcaaaattgccagataaataggtgagttcacttggaaactgttctctgcctctgtgcactatgctttgtgcacattatactttgtaaaaagtttgtttcagaattccctttgggattttacaactgtactgaatgtaacattcatgtgacattcatgcacaacatgaataagccagagtctatcccagcacagtgcccagccatcgtccagatggcccatcacacctgtggctagaatgtagtgatgaatcctttgatgaagttgttgcattagcttctcccaggaattttgcttctatttggattctcctgtctaccatgaatagcaaggatagttattcaagacacactggtttttgtccttcactggctcattttctgtccatttttacccactggggagccagttaacatggtgaaaataccacagtggccaaggaagccacatcacccagggttgtgcaggagcaatggaggaacaggaggcaggagggctgaaggcatctcgtttctgagtcctctaactgacttacatgagtgcctggttgcagctaaccctgagacaaatgcctgccttaggggatattaatattttccaaatctgtagctgattcactcactgagattttaatttacgccccaggcactctattgttcctccacttttccctcccaatatcccccaccctttcaggtggcctgagggtttttgaagggctacgtgcagaagctgtttgagggtagccctcatcttctttttctgaaagcctgagttttccaggtgtcctctaggagatggaaagcttaatcctagagagtgacttctaggaaagtggagagagggtagagatggatagagtgaaggagagaggtagagggcttaccgagatctgggagatggcaggagggaggtggctcatgggagggacctaggtcctaccacagaggcgggataaagccacaggggcccaggctaggccctcccagctctgcagagatttattatgctacacttccagtagattagaaaagccaataacccttcagatatcacacactcacacagccaggggaacagatggctcggtgataaccaaaactgggtagaccaaaatggcagtgacgtctccaatgtctgcagaactsggtcccagttccgggtaaatgtaggctgctgatagtgcagactgattttcctacccactcgatgtgtcggtggcttgatgtgagagtcaataggattaagagaaaat

SEQ ID NO: 724128 - DNA, 1714 bp, Homo sapiens
tgagatttgggaggggacacaaattcaaacagtatcactaccaaaattgacccaaacacaacactctactactagttacacactcaatagaaatgcatctatttaaaaaaatgcatatatatttatatcgacttcacttggaatggtgctaaaccaaagataacccatcaacacaggatgaataaacaaataatataatattcacacaagggagcattatatattaatgagaaagagcaaactacggctaacacaacaacatgggtgaatcttataagcagtgaatgagagaagccagtcagagaaagtaaatactgtctgaatgcatttacactaagttcagaagcagtattgaacttagtattgaatatgtaatactagagagctggataatggtttccttcaggggaccagatgagcaactgtggaaatctagcatgctggtgatattctgtttattggcaaaattgccagataaataggtgagttcacttggaaactgttctctgcctctgtgcactatgctttgtgcacattatactttgtaaaaagtttgtttcagaattccctttgggattttacaactgtactgaatgtaacattcatgtgacattcatgcacaacatgaataagccagagtctatcccagcacagtgcccagccatcgtccagatggcccatcacacctgtggctagaatgtagtgatgaatcctttgatgaagttgttgcattagcttctcccaggaattttgcttctatttggattctcctgtctaccatgaatagcaaggatagttattcaagacacactggtttttgtccttcactggctcattttctgtccatttttacccactggggagccagttaacatggtgaaaataccacagtggccaaggaagccacatcacccagggttgtgcaggagcaatggaggaacaggaggcaggagggctgaaggcatctcgtttctgagtcctctaactgacttacatgagtgcctggttgcagctaaccctgagacaaatgcctgccttaggggatattaatattttccaaatctgtagctgattcactcactgagattttaatttacgccccaggcactctattgttcctccacttttccctcccaatatcccccaccctttcaggtggcctgagggtttttgaagggctacgtgcagaagctgtttgagggtagccctcatcttctttttctgaaagcctgagttttccaggtgtcctctaggagatggaaagcttaatcctagagagtgacttctaggaaagtggagagagggtagagatggatagagtgaaggagagaggtagagggcttaccgagatctgggagatggcaggagggaggtggctcatgggagggacctaggtcctaccacagaggcgggataaagccacaggggcccaggctaggccctcccagctctgcagagatttattatgctacacttccagtagattagaaaagccaataacccttcagatatcacacactcacacagccaggggaacagatggctcggtgataaccaaaactgggtagaccaaaatggcagtgacgtctccaatgtctgcagaactgggtcccagttccgggtaaatgtagsctgctgatagtgcagactgattttcctacccactcgatgtgtcggtggcttgatgtgagagtcaataggattaagagaaaat

SEQ ID NO: 724129 - DNA, 1714 bp, Homo sapiens
tgagatttgggaggggacacaaattcaaacagtatcactaccaaaattgacccaaacacaacactctactactagttacacactcaatagaaatgcatctatttaaaaaaatgcatatatatttatatcgacttcacttggaatggtgctaaaccaaagataacccatcaacacaggatgaataaacaaataatataatattcacacaagggagcattatatattaatgagaaagagcaaactacggctaacacaacaacatgggtgaatcttataagcagtgaatgagagaagccagtcagagaaagtaaatactgtctgaatgcatttacactaagttcagaagcagtattgaacttagtattgaatatgtaatactagagagctggataatggtttccttcaggggaccagatgagcaactgtggaaatctagcatgctggtgatattctgtttattggcaaaattgccagataaataggtgagttcacttggaaactgttctctgcctctgtgcactatgctttgtgcacattatactttgtaaaaagtttgtttcagaattccctttgggattttacaactgtactgaatgtaacattcatgtgacattcatgcacaacatgaataagccagagtctatcccagcacagtgcccagccatcgtccagatggcccatcacacctgtggctagaatgtagtgatgaatcctttgatgaagttgttgcattagcttctcccaggaattttgcttctatttggattctcctgtctaccatgaatagcaaggatagttattcaagacacactggtttttgtccttcactggctcattttctgtccatttttacccactggggagccagttaacatggtgaaaataccacagtggccaaggaagccacatcacccagggttgtgcaggagcaatggaggaacaggaggcaggagggctgaaggcatctcgtttctgagtcctctaactgacttacatgagtgcctggttgcagctaaccctgagacaaatgcctgccttaggggatattaatattttccaaatctgtagctgattcactcactgagattttaatttacgccccaggcactctattgttcctccacttttccctcccaatatcccccaccctttcaggtggcctgagggtttttgaagggctacgtgcagaagctgtttgagggtagccctcatcttctttttctgaaagcctgagttttccaggtgtcctctaggagatggaaagcttaatcctagagagtgacttctaggaaagtggagagagggtagagatggatagagtgaaggagagaggtagagggcttaccgagatctgggagatggcaggagggaggtggctcatgggagggacctaggtcctaccacagaggcgggataaagccacaggggcccaggctaggccctcccagctctgcagagatttattatgctacacttccagtagattagaaaagccaataacccttcagatatcacacactcacacagccaggggaacagatggctcggtgataaccaaaactgggtagaccaaaatggcagtgacgtctccaatgtctgcagaactgggtcccagttccgggtaaatgtaggctgctgatagtgcagactgattttcctacccactcgatgtgtcrgtggcttgatgtgagagtcaataggattaagagaaaat

SEQ ID NO: 724130 - DNA, 1714 bp, Homo sapiens
tgagatttgggaggggacacaaattcaaacagtatcactaccaaaattgacccaaacacaacactctactactagttacacactcaatagaaatgcatctatttaaaaaaatgcatatatatttatatcgacttcacttggaatggtgctaaaccaaagataacccatcaacacaggatgaataaacaaataatataatattcacacaagggagcattatatattaatgagaaagagcaaactacggctaacacaacaacatgggtgaatcttataagcagtgaatgagagaagccagtcagagaaagtaaatactgtctgaatgcatttacactaagttcagaagcagtattgaacttagtattgaatatgtaatactagagagctggataatggtttccttcaggggaccagatgagcaactgtggaaatctagcatgctggtgatattctgtttattggcaaaattgccagataaataggtgagttcacttggaaactgttctctgcctctgtgcactatgctttgtgcacattatactttgtaaaaagtttgtttcagaattccctttgggattttacaactgtactgaatgtaacattcatgtgacattcatgcacaacatgaataagccagagtctatcccagcacagtgcccagccatcgtccagatggcccatcacacctgtggctagaatgtagtgatgaatcctttgatgaagttgttgcattagcttctcccaggaattttgcttctatttggattctcctgtctaccatgaatagcaaggatagttattcaagacacactggtttttgtccttcactggctcattttctgtccatttttacccactggggagccagttaacatggtgaaaataccacagtggccaaggaagccacatcacccagggttgtgcaggagcaatggaggaacaggaggcaggagggctgaaggcatctcgtttctgagtcctctaactgacttacatgagtgcctggttgcagctaaccctgagacaaatgcctgccttaggggatattaatattttccaaatctgtagctgattcactcactgagattttaatttacgccccaggcactctattgttcctccacttttccctcccaatatcccccaccctttcaggtggcctgagggtttttgaagggctacgtgcagaagctgtttgagggtagccctcatcttctttttctgaaagcctgagttttccaggtgtcctctaggagatggaaagcttaatcctagagagtgacttctaggaaagtggagagagggtagagatggatagagtgaaggagagaggtagagggcttaccgagatctgggagatggcaggagggaggtggctcatgggagggacctaggtcctaccacagaggcgggataaagccacaggggcccaggctaggccctcccagctctgcagagatttattatgctacacttccagtagattagaaaagccaataacccttcagatatcacacactcacacagccaggggaacagatggctcggtgataaccaaaactgggtagaccaaaatggcagtgacgtctccaatgtctgcagaactgggtcccagttccgggtaaatgtaggctgctgatagtgcagactgattttcctacccactcgatgtgtcggtggcttgrtgtgagagtcaataggattaagagaaaat

SEQ ID NO: 724131 - DNA, 2337 bp, Homo sapiens
agacatcaataggtatttcaatagtccatagtcagaggacttcaatagtcaatagttcaaaggaattcatagctagataaggcattcaataattttcccccacatatttttggggtgtataaagttttatttccaccaaactaaatagctacaattacctttaataaataaccgctgttttaacaagatatatgctctttaacatttttttcataagtttatgtttcttttacatacttttaaaaatgtacgtgaaaaatgagtgtgatttttggaagtcttagaacaaattaaaatatttatcactaaaataaatgatactagccctttcactcaaactgtttctcttttaactggagcaaattaaataggtgggtacaggtgcacaaagaaggttttgcccaacatccttatgatggaagagctccgaccacgccatgtgagcacgaacgcagctgtccatgaaaacagataaagggattcacgtatgcatcagccacaagtgtgggcaccactgtaggcaccaaaacttcaattgggaggactcggaagttgagaatgtatttaactattgtcctctaggaagcaagttagtctttcagctgcagtgtttggaatgaactcygccttgctcagtcgctgagtacaaaataagaatataaaatgtcaatatgataccagtaaaacaaaaggaatctaagctcatctgcactgctactgttgtataggcagacaaagccacatggaccttcaatgcactgtcaccaagctgagccagacgttatcttgtctcatgagacaaggcacacagtctttctccaaatgcaaaacctgcaacagggacaagcacctgaggactctacccaccagtcctctcctgttccactcacttggcccttaatccttccctgcagacaaatatctctcgaattgtttggctcatttttcatgcatgtagagctcttcaaccagacagaaagcttcttgaggaggaggacttggatttactatcttcatactccataaagtaacagggatcatattccagaaatcaacatgaggaaagacgtttttgtgtgtatgagtttacttacttgggtaataaggcagaatgtttgaaatgagaactgtttcaggaaataccaagagcaacacagttccatatgcaatgaatatttcttcagtggccttaaaagtagtatgagctcctccctccaatcgaatctgtttgagaatgtttttattctcttagttaagacgccttctcaaatcctgcttctaatttaggacaggaagataaagaggcatgtcttcagagctgtatagggagcaattccaacccagccaaaagttcataatccagtggatctaatttagaagagggaagaatggcttctagggttcccaggtacacactgttgtttttttgagcacttttgtattcagtacagctctttgacaaactgtccaagtaaagcccaaaagcaggttaaggttttgccactcctgcagtagtgggacaaacgtttgtgaagactggcgaggttggaagaatggaataaaatcccagtaggcccatactcagaaactgatttctcaagaactccaaatgaaggaaagccattctctcccctcaaactttcagtcttctcctgtgttgcataaatgcagtaatgctggtctcagagaaggaaagtgaatcataagttcttgtcttgccacctacattgatccagcccccatttctcaacctgcaagatgagaggaccagactaagctttcttccccatccaacattttcatcagcaaattaaaccaagagtgagaatctttcctccagatcttcttccaacctctgaatacagcaactttgattgttgttaattacccaaacccctgcctagctgaaggatggatggctctgtgtttacaacttgaatgtcttcaaacataacgtattcaaccagggacagaacaatgccaccgcagactggaaagcaaagatattgtttatacaggtaagatgtcttgaaccagctgtctctccagacattttttgctttgtagaaaacaatgaggaacaccgttatagacataaatgaaagctcccaagatggttacagggagccaaaggatctgggagaggcacggctgggctgctgctaattggacaggtggctcttcctgccagctgtcctcattcaacaggcattttttaatgagaaatatttctctgcaattgaagtaatggtcctaatagaatattatggccttgcataaggaaaagaacacaaaggagtttagatacactctgcatgcatcattagagtgctctct

SEQ ID NO: 724132 - DNA, 1177 bp, Homo sapiens
tgggagggcatatgcagaatttgctgtaactcctgctatccagagaggtgtaagatattcagtgggtgccttacagcaaagagaggactggggaaaggtatgttattgctgcatctgtatcagtcattggcttgtaaacgcctttatattctgcatagatcattcaacatttgagttggaaacttaacccaattgtctatggagctgtttctgatttgccctggttgagaggggtaagcaggttatatctgaattttttgatcatcctaattatgactgggagagacacatagcagatggaacccacagcacaaaagctggactcctgggttctgccaatagcttgtatgtggcctgcttttatctcaaagtgcccatttgtaaaaaagggggcaacaataacctccaaaggatactgccctaaatgttgatgagatcacatttgagaacccacagactttggaaagaagacgggaaatagagcaatgaagtgattaagggactatcttaagtgaccacaagtggctaagagcacagactcgggagccaatctctgggctgtcacttattacctttgcctttgaacaaacaatctctcagtgcctgagtttttcatctgcaaatcagagatgtaatagtgtctacttcctgggtaccaataaatgggattgcatatgttaaatgcctagagtagtgtctgacaacatataaaattagcatatcattttcatacttaaagctgaaaaagacatcacaaattatctaatcattctcagaaaataccctttcacacatagaatactgaagtccagagaggtcaaaataaattgataggaacaatttgcgtatcccagtcagctcaccagcagagacaatgatgattatgagcaactactctcagaaagtaccgtaagggtcatcactggatgctcgtaatgctagattaggtccagaagtaagactgcccttctcgtatagtcttgggggacaaattaggcctcactcattggttcttagctgccatatgggctcttcttctgagaggcacagaaaatgtgagagcatttggctggtggtactcagtgccatcaaacttccaagatggtcagcctgaaattgcagttgccttgaaggagtgcyggaagggaagagagtgctagggggtgtaaggcgaaaa

SEQ ID NO: 724133 - DNA, 617 bp, Homo sapiens
tgctttcatattttacttccctaaccagatttcaatgtcctagagagccaagcgtcatggatgtcttgggatatcccaaatatgcaagatggtataggagcctagggaaaacctccccttcaacctctgagtgtttactgaaaatcaactgacaaaaggcaggttaataggaaaaaaggcatacaaaaatagtaatatgcacgcatgtgcacaggagttataaaaaataagaaaaactcaaagaaagggtcagatagttgaagttttcatcctgaggttrcagaaggaatagaggcttagagtctggcaagaccagttatgggtggaagagaagaaaagcatggctagcaaaggcagtcttgtaatgcagatgaaacctcacaggtagcagccctccaaaagagtaagtttctattagatccccagaggtgtcaaactctcagtctctctctcccaggagcccatctgtcctagatccagacaagtcacagcacagaaaggctggctgtttatttcagcaatgtagattttctctacagatgtaaatctcccccacaaaaggtagttttttacagggctattcctgtctgcaggttctctgaatagccatctcaaat

SEQ ID NO: 724134 - DNA, 617 bp, Homo sapiens
tgctttcatattttacttccctaaccagatttcaatgtcctagagagccaagcgtcatggatgtcttgggatatcccaaatatgcaagatggtataggagcctagggaaaacctccccttcaacctctgagtgtttactgaaaatcaactgacaaaaggcaggttaataggaaaaaaggcatacaaaaatagtaatatgcacgcatgtgcacaggagttataaaaaataagaaaaactcaaagaaagggtcagatagttgaagttttcatcctgaggttacagaaggaatagaggcttagagtctggcaagaccagttatgggtggaagagaagaaaagcatggctagcaaaggcagtcttgtaatgcagatgaaacctcacaggtagcagccctccaaaagagtaagtttctattagatccccagaggtgtcaaactctcagtcyctctctcccaggagcccatctgtcctagatccagacaagtcacagcacagaaaggctggctgtttatttcagcaatgtagattttctctacagatgtaaatctcccccacaaaaggtagttttttacagggctattcctgtctgcaggttctctgaatagccatctcaaat

SEQ ID NO: 724135 - DNA, 653 bp, Homo sapiens
caaagcaagagaagaagcagaggctgttggcccaggccaagaagaaagctaccagcaaagggacatccccactaagagaccacctgtccttcgagcaggagttaacatggtcaccaccttggtggagaacaagaaagctcagctggtgatgactgcacacgatgtcgatcccatcgagctggctgtcttctgcctgcctgccccrtgttgtaaaaagggggtcccttactgcattatcaaggggaaggcaagactgggacatctagtccacaggaagacctgcaccactgttgtcttcacaaaggttaactcggaagacaaaggagctttggctaagctggtggaagctatcaggaccaactacgacagatacgatgagatccactgtcactggggaggcaatgtcctgggtctcaagtctgtagctcacattatcaagctcgaaaaggcaaaggttaaagaactttgccactgaactgggttaaatgtacactgttgagttttctgtccataaaaataattaaaataatacaaaatttccttcaaaaaagaaaaaaaatatggcaagcataaagatacactttgagatagctaaatagcctccaaacttaacctacacatgggtgggcccttggcagccatgtttaagccat

SEQ ID NO: 724136 - DNA, 1812 bp, Homo sapiens
tggccatcttctttactgttatggctgaatggatgaaaaggcaacccatgaacacaattactaggtgtgaaagataaaatgggtcaattagatcataaagtcaagtgtcagtgtcatggaaaggcaagacagagatgagataaatgaagagaataacctaagtttcaaccttcccaatacccatgtgatctggctgtcttttasttcctatttatacatagtcatgataatctcaattgtatccttacaaaagagcttagtggataaaaatgtacctctggagccagtctccctaggtggaaatcctgactctgccactaattgtgtagccttctaagccccagttccttcatctacaaaatgggataattaatacagttgtccctcagtatctgcaggggaataattccagggcccgctgcagacaccaaaatccatggatgctcaagtcctttatataaaatggcactgtatttgcatgtaacctacacacatcctcctggatactttaaataatctctagattatttataatacctaatacagtgtaaatgctatgtagatagttgttatactgtactgtttagggaataatgacaaggaaaaaggtctgtgttcagtacagatgcaatcatccatttttcccctactattttttgattcatggttggttgaatctatggatgcagaactcatggataaggagggccaactgcactatcctcagagggtggttgtgaggactaaatgagataataaacatacgatgccaggcatacagtatatggtccataatgtgtgtattaatgtgccccccaggtgattctgatgtatgctaaaatttgagaaaatggaataaaggttttggtagagaaacacaaccactccatatcttcgactgaagaacagccctcctctatctggggaagatagaggagggctgttctttaattaaacatgcagttttggaagggatagatatcagaaactagttcggaactcaactggaccctccttgggctagactgccttgctagaccttgttacgatccttttccaaatcccagtaaacatcgcaaatgcattctgaagacgcttcatgccacattacaacacaaactaatcgttgggcaccacccctaaaatccagccattcttttcttctttatgatctctgacctagaggcctctcgcccttggtatagcattctctgcagtgatggaaaacaaggatctcttctcagagagtccttctaacttgaaggcctctgggatcacaccacctcttggcatcccattctctcggcttttggccctgtcgtcacctctctagctgaggcaactgacaaagatgccttggtgtttttgtccctccagctttcttgacattgagaccttaacagaaacagtgcagatttgagaaattagacagtaaattctagacggtaaaaagatttgagggtgaggggaaactacttttaaagctagcccaactcccacacaaactacctcaaggactgctccccaaagaaacctctctggctctcatctaacttgattgtaatgcatcttgtgcttcaaatgtgcctccttttgacaaactagcaccagcaaaacagagctcctgaccaagaagcacttcctggtggttgactttaatgttccctttctccttttgttctcccagctgaggttacattgccccctggcctccaggctgaaaatcctcaacacattcctctcccttttgggatttacagcttttctgacatttgcaggctgtgcccatctcctctcaactctagcctcccc

SEQ ID NO: 724137 - DNA, 1812 bp, Homo sapiens
tggccatcttctttactgttatggctgaatggatgaaaaggcaacccatgaacacaattactaggtgtgaaagataaaatgggtcaattagatcataaagtcaagtgtcagtgtcatggaaaggcaagacagagatgagataaatgaagagaataacctaagtttcaaccttcccaatacccatgtgatctggctgtcttttacttcctatttatacatagtcatgataatctcaattgtatccttacaaaagagcttagtggataaaaatgtacctctggagccagtctccctaggtggaaatcctgactctgccactaattgtgtagccttctaagccccagttccttcatctacaaaatgggataattaatacagttgtccctcagtatctgcaggggaataattccagggcccsctgcagacaccaaaatccatggatgctcaagtcctttatataaaatggcactgtatttgcatgtaacctacacacatcctcctggatactttaaataatctctagattatttataatacctaatacagtgtaaatgctatgtagatagttgttatactgtactgtttagggaataatgacaaggaaaaaggtctgtgttcagtacagatgcaatcatccatttttcccctactattttttgattcatggttggttgaatctatggatgcagaactcatggataaggagggccaactgcactatcctcagagggtggttgtgaggactaaatgagataataaacatacgatgccaggcatacagtatatggtccataatgtgtgtattaatgtgccccccaggtgattctgatgtatgctaaaatttgagaaaatggaataaaggttttggtagagaaacacaaccactccatatcttcgactgaagaacagccctcctctatctggggaagatagaggagggctgttctttaattaaacatgcagttttggaagggatagatatcagaaactagttcggaactcaactggaccctccttgggctagactgccttgctagaccttgttacgatccttttccaaatcccagtaaacatcgcaaatgcattctgaagacgcttcatgccacattacaacacaaactaatcgttgggcaccacccctaaaatccagccattcttttcttctttatgatctctgacctagaggcctctcgcccttggtatagcattctctgcagtgatggaaaacaaggatctcttctcagagagtccttctaacttgaaggcctctgggatcacaccacctcttggcatcccattctctcggcttttggccctgtcgtcacctctctagctgaggcaactgacaaagatgccttggtgtttttgtccctccagctttcttgacattgagaccttaacagaaacagtgcagatttgagaaattagacagtaaattctagacggtaaaaagatttgagggtgaggggaaactacttttaaagctagcccaactcccacacaaactacctcaaggactgctccccaaagaaacctctctggctctcatctaacttgattgtaatgcatcttgtgcttcaaatgtgcctccttttgacaaactagcaccagcaaaacagagctcctgaccaagaagcacttcctggtggttgactttaatgttccctttctccttttgttctcccagctgaggttacattgccccctggcctccaggctgaaaatcctcaacacattcctctcccttttgggatttacagcttttctgacatttgcaggctgtgcccatctcctctcaactctagcctcccc

SEQ ID NO: 724138 - DNA, 1874 bp, Homo sapiens
tagagtatttttgcaacattccttgtcatcagaataatggttaaagtttaaaactagaagcagcagaaaactagcttgtaaaatgtatccaagtaaagtgcaggctaggctgtcttggggaaataaacattaaaacttaaagcaatgttaaaaaaaagaaaaagaaagaaaagaaaatgtggcacatatacaccatgtaatactatgcagccatgaaaaaggatgagttcatgtcctttgcagggacatggatgaagctggaaaccatcattctcagcaaattaacacaggaacagaaaaccaaacaccacatgttctcactcataagtgagagttgaacaatgagaatacacagacacagggaggggaacatcacacaatggggcctatcagagggttgggggctagaggagggatggcattaagagaaatacttaatgtagatgatgggtcgacaggtgcagcaaacaaccatggcacgtgtaagctatgtaacaaacctgcacattctgtacatgtatcccagaactcaaagaataatttttaaaaaaatccttcaacaaaaaaacactatagaatcaatttaatgtggtttcatgtctgcaatatagagttcaaaaaccctatattgcttcagcacagagatgaggaaatagttggcttttctagacctataaatggattgctgagagagaagctaggtggacctgagattcctttgacaagcaagattctccatctggatggagtaaacggaacctctacaacagggcaggttagagccctgatgcaagggatctaagtattgagctgccaaaaaagagcattgatggcaagagcagatttttctcaagtcattctaacaaatggtgtttttgctgtgtaacactgtaaacctcagcaattaggtrgtggctattctcctctagtagagatttagtgggatcaacaggagctctacttcaaagtcacactaatttaaaattattctccagagcagcctaccaagtcccctggcttattcttttctatttaagggaggaaacccaacaggattagggagtttgactgcctgcctagagtttgacattttacacagccaagaaaataggtttgttactctaaaaagtctctcagactaaaattaatttgagaacaaagttgaaatctgcctccaacttactctttattgttacatttccactgaaaatttcatctccactttttatatgtccaatatattttctactttatttcttctcaagattcttaaggtcaaaaaccttaagagctagattataataaatgatgctgaaattatgttaaacctataaaaccaaagtctggctaaacctatggttttactaaaataaataagtggttttgttagcaaattgcactacatacttagaaagagtcaagccttctattctatttaacacggctttcatctctatcccaactgcctttcactctatcaactagaaaaaaacaccaagtatacttctagggctttcttgaggttcagcagtcattctcacagtcatgaaacagactttttcccaggagcccgcgtgtcctcagacttgaagatgtatctgttttcttttcatgccactttttcgttcatcttcacgaagagaaataacaaggaatagctttaagataataaacttgcccttttacctgtagattcactttgccaaaataagagacacagaacagactagccaggaagatccaacttctactcgttgccttgctaccataggtatttgatacccgatggctaggtggcactgcactcaaccaatattctaagatgttgaatgaggaaatcaacagcagacccaaggccttctatttttaattta

SEQ ID NO: 724139 - DNA, 585 bp, Homo sapiens
gattacaggtgtgagccattgcgcctggccaacaatgattatttttaattttattccatggttttctatattttccaaattcttctcaataacataaaaatgatttcatattgtattaattactacaatgcaacattgtaaggtcgggggacgctgatggtagtctacctcctgatcctctagtatgcagtatttcacccagggttttcacaagcagtttctcatttggtcctcagaggaccctatacctaggtgaggatggcggtgctgcttctgagaagtcgctgcctccccttctccctttagcctccctggcaaaataagacacttcgattgcggggccacagtcagttctgactctgatatcttacgacacctatcagggatcagcctggacctgttacctgagcggggtgtggcctcctttcctctgcgctttccccacacctgaaactcctgatcattcagccccttacctctcccaagctttcagcacragctctccttcttagccttctaaataaataaacaacacctgcacagaacactgccattttctgtaagcttttcttcccctttaaaaat

SEQ ID NO: 724140 - DNA, 585 bp, Homo sapiens
gattacaggtgtgagccattgcgcctggccaacaatgattatttttaattttattccatggttttctatattttccaaattcttctcaataacataaaaatgatttcatattgtattaattactacaatgcaacattgtaaggtcgggggacgctgatggtagtctacctcctgatcctctagtatgcagtatttcacccagggttttcacaagcagtttctcatttggtcctcagaggaccctatacctaggtgaggatggcggtgctgcttctgagaagtcgctgcctccccttctccctttagcctccctggcaaaataagacacttcgattgcggggccacagtcagttctgactctgatatcttacgacacctatcagggatcagcctggacctgttacctgagcggggtgtggcctcctttcctctgcgctttccccacacctgaaactcctgatcattcagccccttacctctcccaagctttcagcacgagcyctccttcttagccttctaaataaataaacaacacctgcacagaacactgccattttctgtaagcttttcttcccctttaaaaat

SEQ ID NO: 724141 - DNA, 585 bp, Homo sapiens
gattacaggtgtgagccattgcgcctggccaacaatgattatttttaattttattccatggttttctatattttccaaattcttctcaataacataaaaatgatttcatattgtattaattactacaatgcaacattgtaaggtcgggggacgctgatggtagtctacctcctgatcctctagtatgcagtatttcacccagggttttcacaagcagtttctcatttggtcctcagaggaccctatacctaggtgaggatggcggtgctgcttctgagaagtcgctgcctccccttctccctttagcctccctggcaaaataagacacttcgattgcggggccacagtcagttctgactctgatatcttacgacacctatcagggatcagcctggacctgttacctgagcggggtgtggcctcctttcctctgcgctttccccacacctgaaactcctgatcattcagccccttacctctcccaagctttcagcacgagctctcctycttagccttctaaataaataaacaacacctgcacagaacactgccattttctgtaagcttttcttcccctttaaaaat

SEQ ID NO: 724142 - DNA, 998 bp, Homo sapiens
agtagaaatggggtttcgccatgttggccaggatggtctcgaactcctgaccatgtgatctgcccgcctcagcctcccaaagtgctgggattacaggcgtgagccgctgcacctggcctgtcctgtctctttattcttggttaaattggaatagtttcttggcctttctttcttgttcatgttattgacatttgttaaaacaggccagttgttctgtggatttctcaattcaggtgtgtctaattgttctcttataattagatcagggttatgcaatctggcaggaatgctacaaaactcacggggtgtccttctcagcgcatctcatcaggagatccatgatgccactgtgtcccgttactgctgcagttaatgttgattgattgattcgagtgatatctgccaggtttctttacgtgactcttttaaaaagtaaatttacttagtaatatttccttaaattccaaaattattactattattaccaacaaaggcattatctttcatattcttagagttttaaagcatctacatattatttaattccattttggaataatggaatttttaattctgttgatatcaaattttaagttgatatccattttctcctaaatattttctctccaaaatcatttttgaaacagcatttttataactatgctwtatcccaggacaatattacaagaaggtattaggaggttaatctttttgtttgtttgttttgagatggaatttcgctcttgctgccaggctgaagtgcaatggcgcaatctcagctcaccacaacctccacggttcaagttccgcggttgaactcccaggttcaagcgattctcctgcctcagcctcccaaatagcggggattacagacatgcgccaccaccctcagctaattttgtatttttagtagagacaggtttctccatattggtcaggctggtcttgaactcctcacctcagggtgatcctcccacctcggcctcccaaagtgctgg

SEQ ID NO: 724143 - DNA, 998 bp, Homo sapiens
agtagaaatggggtttcgccatgttggccaggatggtctcgaactcctgaccatgtgatctgcccgcctcagcctcccaaagtgctgggattacaggcgtgagccgctgcacctggcctgtcctgtctctttattcttggttaaattggaatagtttcttggcctttctttcttgttcatgttattgacatttgttaaaacaggccagttgttctgtggatttctcaattcaggtgtgtctaattgttctcttataattagatcagggttatgcaatctggcaggaatgctacaaaactcacggggtgtccttctcagcgcatctcatcaggagatccatgatgccactgtgtcccgttactgctgcagttaatgttgattgattgattcgagtgatatctgccaggtttctttacgtgactcttttaaaaagtaaatttacttagtaatatttccttaaattccaaaattattactattattaccaacaaaggcattatctttcatattcttagagttttaaagcatctacatattatttaattccattttggaataatggaatttttaattctgttgatatcaaattttaagttgatatccattttctcctaaatattttctctccaaaatcatttttgaaacagcatttttataactatgctatatcccaggacaatattacaagaaggtattaggaggttaatctttttgtttgtttgttttgagatggaatttcgctcttgctgccaggctgaagtgcaatggcgcaatctcagctcaccacaacctccacggttcaagttccgcggttgaactcccaggttcaagcgattctcctgcctcagcctcccaaatagcggggattacagacatrcgccaccaccctcagctaattttgtatttttagtagagacaggtttctccatattggtcaggctggtcttgaactcctcacctcagggtgatcctcccacctcggcctcccaaagtgctgg

SEQ ID NO: 724144 - DNA, 1424 bp, Homo sapiens
tgccgttctctgagtttctctagtagtggggatgttcagtgatgttctgggatgttctgagttgttgggttcctgaagggcagtgacacttcagaacgaggactgacctggcttcccctcgagggagctgacagaagctgtgggaggctgcagagcactgcgggtgagtgactgccagtgttgggaccctggccttgccccctttagctgtgggactttgggcagttgctcagcctctctgtatctcaggatcctcgtctgtaaaaccgcagtcctagttgccatgaggctgctgtgaggtgaggtgggttaactcatgtgcctcccagcacattgtcagcatgcagtaaatgtcagctctcttgcccttatctgttcctgtgtcacctggctgtggaatctttcctaacctcggacaatttcagatatttaggttaaaatctggaatattataaacatactgtttcattaaaaatgttaaagaggccgggtgtggtggctcacacctgtaatcccagcattttgggaggatgaggtgggcggatcacctgatgtcaggagttcgagaccagcctggccaacaaggtgaaaccccgtctccactgaaaatacaaaaattagccaggcatggtggcaggagcctgtaataccagctactcgggagactgaggcaggagaatcgcatgaacctgggaggtggacgttgcagtgagccgagatcgcaccactgcactctagcctggggaacagagtgagactccatctcaaaaaaaaaaaaaaaaaaaaaaaaagtcaaagaatttcaggggaatgtttatgcagtaactttttcgggagaatttgcttttccctttcttgtgctgaagccagtggaacaacgttttgcctggtgtccccgtgtctggacttctctgttcactcctggtcgtttgaccttggtttgtttctgtgtgcttccggggcggtgctcattctgcctgacttgcctggttttctggggctagagaagtggcccttgctgagagcagcagcatgtgccaggcagtwcctaggagctttccaggtgttcctctgccctctagttccagacccagaggcggggccaagaaaatgggaataaatgaaagctatgtgcatcaaatatttgtttaatgttgtccttgttatatcagagtcacagggacacctacgaatagtctctgatagtttgttttccgaaggggaataacagataaactacccctaaaattgagcatataaaataatttaaccaaataaattacattagagcagatagaaatggcataggatggccttgattagtttatcttcagatgacggcattgtgccaacagtaaataaagttatccgccctgcaaggagcttctagtggtgcagtgatgggaataaagatgacttcaccc

SEQ ID NO: 724145 - DNA, 624 bp, Homo sapiens
cacgacactatgtgggaagtatttgcaaacccattatatacacaaggacacagaggctcagggaagctatgttatttatccaatggcacacagcaagaaagtggtagagctggtattcaaagtctgaccaaagtctgctttcaacttcactacagtgtctgtgtcatgcatccttgtgattgygtgtgtttgtgtgtatgtgtgtctttctagcttcatggacacagcttacagatgtggggagcagatatggtggaatctccaccaccaagagggcacaaggtctttgtgtaaacatggctcaaagggttgcccctgcagacacctactgtacctttatttggttttggaaattttgtatgtggcaccctttaaaaaatgccctttgaaagcactcttttgcactttacttgctaactttgtagaaactctgcatacagcaggaataaaatagttcaaagcactaagctgcatactctaccaaatggaacaggtgcatgtgttggtatgtgcatagatgcttccccaaatgagtcaaatcagtcacacagagggatcaaacataaccttgggctgggggtgggaaaattttctacataacccattccctgagacatttggcca

SEQ ID NO: 724146 - DNA, 624 bp, Homo sapiens
cacgacactatgtgggaagtatttgcaaacccattatatacacaaggacacagaggctcagggaagctatgttatttatccaatggcacacagcaagaaagtggtagagctggtattcaaagtctgaccaaagtctgctttcaacttcactacagtgtctgtgtcatgcatccttgtgattgcgtgtgtttgtgtgtatgtgtgtctttctagcttcatggacacagcttacagatgtggggagcagatatggtggaatctccaccaccaagagggcacaaggtctttgtgtaaacatggctcaaagggttgcccctgcagacacctactgtacmtttatttggttttggaaattttgtatgtggcaccctttaaaaaatgccctttgaaagcactcttttgcactttacttgctaactttgtagaaactctgcatacagcaggaataaaatagttcaaagcactaagctgcatactctaccaaatggaacaggtgcatgtgttggtatgtgcatagatgcttccccaaatgagtcaaatcagtcacacagagggatcaaacataaccttgggctgggggtgggaaaattttctacataacccattccctgagacatttggcca

SEQ ID NO: 724147 - DNA, 1151 bp, Homo sapiens
attactccaggtataatctttatcaacatcttttacttgaactacagagaatatgtctttgttagtttcccaaagagccaaacaaaaacagctagacttacaaactggtggaggttgagagagagtttkcacaggctatagataaccaaaaaagtcatcatctgtaattaagcaggatttggtaaatatgaacaggctagtaaacttttttgaggttggcaaattagggagatttctgtagttggccataaatattaaaggtttcatgactttaagcccaagtatcaccttacatcctgcagacatttatcatacacctcgtttggtatatttcagactttaataaactgcaagatttcttcactatgatttctacctaccttaatatacaattcatatttaaaatcacccattaaaccaattgttgtggctgcttgggattctaatttgcagaagtacattttggaaacctgaatgcaataagaatgatataatggactttggggactgcagggggagggtgggaggggggtgagggataaaagactacacattgggtacagtgtacactgcttgggtgacgggtgcaccaaaatctcagaaatcactactaaagaacttttccatgtaaccaaaacccatctgttccccaaaagctattgaaataaaataaaaataataaaaaaatttgcaagatattagacttcccattggattcagggcttctcaaatattgatgtcactttgcattttaaatttcatgagcaagagtttgtacagaccagaatttcagtcccagctctgccacctcatagtattgtgagtctgggaaaattacttcacttctctcttcctcaatttaacttcacagggttgatctgaggattaaagacacaacataagtaaggaagctggcacgtagtagatgcatatgtcagatttgctctccttattggtgggatgggtagagtaggagggggaggatgacatttttctatctccaggttcaggaaaaatttgaaccaagatataatattcaattccaaagtcagagtaaacattttttcattataaaatgacacattaatatatgtttgttgtaaaaaatgaagatcatatatgtagtaaaaagtatgaagactgccttcccc

SEQ ID NO: 724148 - DNA, 794 bp, Homo sapiens
ctttcaagaaccagcacccaatatgtccattctgccatttcctgtcttggcccagcagcctatctctgcccagtgctctcccactcctgttttgtgttgatttctggtctcctctgggctgtgctgcttcatctcttggtccctcagtcacctgtacaccagggtgtcctctctggctagaccttcttctgacatggcataatccctatatgcaacatttcaagccaaggaaaaccttatctttcaatcattatttttcagtcacttataaaatgcstttctaatctcatccacaaacatacataagaagttgagattatcaatttgcaatttatgttattgaagaaaataagtgtggtttaggatctcaaagaatagggaagtttggctagtgcagggcttgatattttaatcatgctccctttcaacttcatccagtcacagtacatcagaataagattataaagagggagaattcactatctcatgcagataaatataatacacttgtaatagtggtggttgcagttctaaaggcatataaaaaaatcagaaattgtgtgaatcgactaaatatcagatcattaggcatgtggtacattttaaaagtgaaagtagttttaaaacctccttaaaactgcaaatgctctctcaggcctatctgccagttgaataatttggagttagaattacatagatttcttttttccctgaagcttattgtactttacaaattatagctaataattattgagtacttgtgatgttccagacaccttatttaatcttcacaa

SEQ ID NO: 724149 - DNA, 868 bp, Homo sapiens
tcacaggccacagaagcgtcactgcttaaccatgagccttgagactcagccacagctcaggccaccaccctcaggatgcaaaacacttcctcccatacataaagctacacaaagtcattattgatgacactcagccacatgggtaaacttacgaaggagtacactttttctaattttcatgtaagtatcagagaaacaatcaggcagagagagcaatgaacacaaaatattttgatatgatcatttgacagggtcttagatagtargtatcagcttataatagaatttaaatcacctcccaacctcaggcttacacggttcacagtgcaatactccctgaaatcagtaatgtgagggtgcttgattctggctacgtatcagatttcctgtggaatttcacacatacccatacacacacacacacacacacacacacacaccaggctctcctcttggaaattccacaattccaaaaaactgcatagttcattctgatgtgaagcatgggttgagaattactgtgaccaaatgagacacaaaaataataggtcactcagtcccaggctgtgtcttttgctgttgctgctttttaatcaaaaaggctagagaggcatctcagtgggaacattagttctgcaagtgacaagacttataatatttcataactatagaaaacagcgggtggctatgatttcaacagcagaagtaaaacatttttccataagcacaaaccaaaatatgtaaaaccctacataccccaaagaagaggaaaaataaattcaagattgtgaaacttatattctgtttacattagaataccattaattaattatcgacaatagtttagttttaaaataaaaccagaatg

SEQ ID NO: 724150 - DNA, 1572 bp, Homo sapiens
cattaacatggaaatctctgctgggaagtgagtgctcttcagctcaagactatttttctgagctcatcaggtcaatgtcaggttgaagtcatcaaaataaataaataaataaacaaaacacccaagcctgttgtcaaattcaatataatctttgcttacaagtctattgctatttgcctacaactctgttacttaaatgcgtgattcacagcttcagcctctgttgtctagagaagatacttcccyggctgctccctgagcactggtagttcacaatacattcttagtgcttagccacagcaggctgcagtacaaaggaggtcccttccaatgctgatgggacattccaaatggaattgcttgccttcattcaattctatattttagccctcagtgattaaaaatgccttctttgttacagggttagggttagaggccacaagagaaagaccatattgatagtctgagaaatcaatgttgtcattgatataaagaaatcatgtgaggctgaattcatctgaatcctgattcatccttgaaaggcagctggtgtaactgcctcctacagaaagacttcatcttaagttacctagattcaaagggcaaatattctgtacccacaatttagctctgtcttccccaaaccaagatgttttcaagtgggatggcaagttactaactcatagtcttctgacagcaggaagaggggcttaagaatgtggaccacatagatgtcaataatccaacattaattttattcaataaactttttaaataaaatgcaaacatcagattactttctccctactaccaaaacttttattaaagagagaccaagagtaattttggagtttggagaaatttgtgggtgaacaggtcatggtaggatgtaggaagggcacctttgagaggactctgggtaactaaaaaaagtgagatcagccaggtgcggtgactcacgcctgtaatcccagcactttgggagtctgaggcaggtggatcacctgaggtcaggagtttgagaccagactgatcaacatggtgaaaccctgtctctactaaaatacaaaaattagccgggtatggtggcacatgcctgtaatcccagctacttgggaggctgaggcaagagaatcactcgaacccaggaggcagagattgcagtgaactgagatcatggtattgcacaccagcctgggcaacaagagcgaaacttggtctcaaaaaacagacaaacaaagtaggatcaatgcaaaggagtgggatgtcaacagagatcacctgcccacttggctgttataccaagcctgtctgtctcccatgcagcttctgaaacactgttgccggcctacatgaatattactattactactccattcagggtgtaatttggtacataaatatatgacactgatataaaaccttttattttacgaatttttcatcagagaaaatttaaataaggataaaacttaattcaattctgtgttgggtgatgtttatttcattgtattaggtgagactctgccttctcacacctcaattgtgatacagaaaacaagaatgcaaagt

SEQ ID NO: 724151 - DNA, 1398 bp, Homo sapiens
aaaacaaaaattggtgagtggagtgctgccacaaaacaaaaattaaaatatgtggcattggctttgggaccacatggtgggcagaggctgaaagagcagagaggaaattatttctggagtctggaaaaagggaaacccatatttttgaaacaatcagcaaaataatttcctgtggtaacttgtaaagcaaaaactgtacctgatacgcttatgggtctggctaatgctatttctacacaaaatgctaaaatagttttttgtttttatttttaacactgcctgataaggtatagaagaaagacggatgaattaaagaaggaatcatttagtttgcaagcacaacatagaggaaatgagcaggtcccaggacttgctggattagaatgtaagactgttcctcatttccattttctccagctggcaaaggattctcaaagtaaaaaatggtttcagggtaaagattaatctagagtgtggctatgaaatcctgtattaaggcctctaaaggactttaggaagttctgagtagactctcaactggatgaaagggcttctaagattcgtagaagcctcatcccaaaatatctctgggtaatatagagctgggctgcccaggatggtaaccactagtgatgtgtagctactgggcacttgaaatatggctagtccaaattgagatgttttgtaagtgtaaaatacatgctgggtttcaaacatgtagtatggaaaagtttaaaatatctcaataagggttatacagattacatgttgaaatgataatgttttagatacactgcatctaataatatattacaatttcatctgtttcttcttactcttttaaaatatgtggctattaggatttcaaaaaaacatatatatgactcacacatgtggcttgcattatatttctattgtaacattagtgtggagagagcattagtagagagaggcctgtcccagaaagaattatgggtatagattttgtctaatagagggaataataatatgatacatggaaaaccgataaagtttttaaaggagttgtatcagattgaagaacagtwttatataaataacagtttagatgataagagacctctgggctcccaactttctacaagcaagcaacaggctgagagagatacttggctgaaaacataggttgtttcttaaaaaaaaaaaaaaaaaagttatatcagaagatggaatcaagaacccagagcgttgagtcaggagtagagccagattctaatcaaggaattctgcctgcttgagtggaggaatctgaaaatatgtgcccagatacatatgtcagaattactatggaccaattactgctattgcctccattaccctcctttttgaatgaggatattaaggttaccatgtccctgt

SEQ ID NO: 724152 - DNA, 1398 bp, Homo sapiens
aaaacaaaaattggtgagtggagtgctgccacaaaacaaaaattaaaatatgtggcattggctttgggaccacatggtgggcagaggctgaaagagcagagaggaaattatttctggagtctggaaaaagggaaacccatatttttgaaacaatcagcaaaataatttcctgtggtaacttgtaaagcaaaaactgtacctgatacgcttatgggtctggctaatgctatttctacacaaaatgctaaaatagttttttgtttttatttttaacactgcctgataaggtatagaagaaagacggatgaattaaagaaggaatcatttagtttgcaagcacaacatagaggaaatgagcaggtcccaggacttgctggattagaatgtaagactgttcctcatttccattttctccagctggcaaaggattctcaaagtaaaaaatggtttcagggtaaagattaatctagagtgtggctatgaaatcctgtattaaggcctctaaaggactttaggaagttctgagtagactctcaactggatgaaagggcttctaagattcgtagaagcctcatcccaaaatatctctgggtaatatagagctgggctgcccaggatggtaaccactagtgatgtgtagctactgggcacttgaaatatggctagtccaaattgagatgttttgtaagtgtaaaatacatgctgggtttcaaacatgtagtatggaaaagtttaaaatatctcaataagggttatacagattacatgttgaaatgataatgttttagatacactgcatctaataatatattacaatttcatctgtttcttcttactcttttaaaatatgtggctattaggatttcaaaaaaacatatatatgactcacacatgtggcttgcattatatttctattgtaacattagtgtggagagagcattagtagagagaggcctgtcccagaaagaattatgggtatagattttgtctaatagagggaataataatatgatacatggaaaaccgataaagtttttaaaggagttgtatcagattgaagaacagtattatataaataacagtttagatgataagagacctctgggctcccaactttctacaagcaagcaacaggctgagagagatacttggctgaaaacataggttgtttcttaaaaaaaaaaaaaaaaaagttatwtcagaagatggaatcaagaacccagagcgttgagtcaggagtagagccagattctaatcaaggaattctgcctgcttgagtggaggaatctgaaaatatgtgcccagatacatatgtcagaattactatggaccaattactgctattgcctccattaccctcctttttgaatgaggatattaaggttaccatgtccctgt

SEQ ID NO: 724153 - DNA, 989 bp, Homo sapiens
gtgctgggggtcctggggggcccttctgggtgatctccggtgcgacctacctggccagcggaagatctccttcttactcttgctggcggtgtgctggaccacgcatttgtactcgccttggcgccactgctggaggggggtggagagctggctgcttgtcatgtagtagctgtcccgtctttgtatctcagggaaggttctctggggctggctctgtgtccccatgtaccaggtgacagtcacggacgttgggtggtacccagttatcaagcatgccaggaccacagggctgttatcctttgggtgtctgcaccctgatatgatggggaacacatccggagccttggtgggtgctggaagacagacacagtgggagtctgaggctggaggctctgaggacaaggggcagggcagggcagaggaccctggcagcagggtgacagggaaggcagggaaaaggggcccaggaggagtgcccagggtgagcggggctgaccaagtggcccgtgaacacgaatgcccctgctgccgctcctgtgttgtgagtyagaataaccgagtgggacctgtggctttgtggaccctgggctcttgttgccgagagctcctggaagggaggggtcttccctccagaggctttggtgcccctctgggcattcctgggacctccaccttccctgctgcccccaacctctctggaacccacttcccttgggcccctgaggggaggaggggcactcaagcctgggagcaacgggcctagggctgtatgaccctcctgcccaggctcccagccacgggtcctcagctgccctgcaggggccactggggtccctgtggagggccatgcgtctggccctctgagtggctccagaggagctggtgggattggatgctcctctccctgattcctggccccaggggctctgctgcctgggataaacccatgagctgacctggccccttgtaaggggtgttactcatggaca

SEQ ID NO: 724154 - DNA, 989 bp, Homo sapiens
gtgctgggggtcctggggggcccttctgggtgatctccggtgcgacctacctggccagcggaagatctccttcttactcttgctggcggtgtgctggaccacgcatttgtactcgccttggcgccactgctggaggggggtggagagctggctgcttgtcatgtagtagctgtcccgtctttgtatctcagggaaggttctctggggctggctctgtgtccccatgtaccaggtgacagtcacggacgttgggtggtacccagttatcaagcatgccaggaccacagggctgttatcctttgggtgtctgcaccctgatatgatggggaacacatccggagccttggtgggtgctggaagacagacacagtgggagtctgaggctggaggctctgaggacaaggggcagggcagggcagaggaccctggcagcagggtgacagggaaggcagggaaaaggggcccaggaggagtgcccagggtgagcggggctgaccaagtggcccgtgaacacgaatgcccctgctgccgctcctgtgttgtgagttagaataaccgagtgggacctgtggctttgtggaccctgggctcttgttgccgagagctcctggaagggaggggtcttccctccagaggctttggtgcccctctgggcattcctgggacctccaccttccctgctgcccccaacctctctggaacccacttcccttgggcccctgaggggaggaggggcactcaagcctgggagcaacgggcctagggctgtatgaccctcctgcccaggctcccagccacgggtcctcagctgccctgcaggggccactggggtccctgtggagggccatgcgtctggccctctgagtggctccrgaggagctggtgggattggatgctcctctccctgattcctggccccaggggctctgctgcctgggataaacccatgagctgacctggccccttgtaaggggtgttactcatggaca

SEQ ID NO: 724155 - DNA, 587 bp, Homo sapiens
cagtatttcagagctggaaggaccttaaaggtcatctagtttaaggtgtggcaaacaatggccttcaggccacatccagtcctccacctgcttgcccccacccagacctgtttttgtaaataaagttgcattgtaatacagccatgctcattcatttacgtattatctgtggctgcttccatgttacaacagcagctttgaccagttgcaacagagacctgtggcccacaaaacataaaatagttactacctggactttacagaaaaagtcggccaaccctgacctggtttgatattgtctttgtgcttctgtggcaaytaaggctatggcaagaagtgacttgcctctgtccattcatggcacagctgggactaaaaccaggtctcttgactcacaaaacagtgccttttcttttatgagattgacctactgattccaattgtaaaatgaccttttttctgacctaaggagctttagcaggagtcattttgtccaccaacccccaagatgctgccacttctaactatgagctactcagaagagaaggtatgtctaaaatcaatggaagaattgatcagagattcca

SEQ ID NO: 724156 - DNA, 587 bp, Homo sapiens
cagtatttcagagctggaaggaccttaaaggtcatctagtttaaggtgtggcaaacaatggccttcaggccacatccagtcctccacctgcttgcccccacccagacctgtttttgtaaataaagttgcattgtaatacagccatgctcattcatttacgtattatctgtggctgcttccatgttacaacagcagctttgaccagttgcaacagagacctgtggcccacaaaacataaaatagttactacctggactttacagaaaaagtcggccaaccctgacctggtttgatattgtctttgtgcttctgtggcaactaaggctatggcaagaagtgacttgcctctgtccattcatggcacagctgggactaaaaccaggtctcttgactcacaaaacagtgccttttcttttatgagattgacctactgattccaattgtaaaatgaccttttttctgacctaaggagctttagcaggagtcattttgtccaccaacccccargatgctgccacttctaactatgagctactcagaagagaaggtatgtctaaaatcaatggaagaattgatcagagattcca

SEQ ID NO: 724157 - DNA, 1604 bp, Homo sapiens
gctcctgactcagctggcgccgcccgggctgcgtgggaactccccagggggcctcccgaccccaggaggggggcgcccgcggggggcgaggatgtcacgcagccgctcccgggggggtggtggaatggggacgtgggtgaggcctcttcctgggagcccgcagtgctgccatcacgtaggggcgagggmgcttgcagcgtcagatggggggtgcaccctctggagtctgaaaagcagttcttctagcttcacagacaggaaccaactgatcctctggtcatcttcagggagcagtttctattgcgtcttgcatacctcctagaacaggagtatcaccacctgttctgcttggggccagccctggaatttagaagttctttcttggataaagtcagagacttcctctctatgacttctctctctcaggtttacttctgcccttgggagacactggccttttattttatttattattattattatttcactgtaggaaggtggagttctactatggagacagacctgccttcaaattctggctttcttccttaacagcactctgatggaccccatccatggggtctcatgtctctcagcctccaccttgtcacttataaaatggggatgagaaggactcctccttgtgctggtcataaggagtgagtgagaagacgaaaaacccctagtgcagagtttggcacatagtaggtgctcaagaaatagtgactattgttcacattgattctaatttctttcccacataacaatcccttaaagtatttacagttctccagtgccccctaaatctactccccaggttagatgcatttccctcaacatgcttggtttctggaacttccattttcctgtttttctcctctggaaagactcattttgttcatgtcattcattcattcattcatttgtcccacaaacatacgtgaatacctgacatgcctagtgccaccaagaagaaaatgacaccgagccaggcactgtggagcgtgcctgtaatcccagctactctggaggctgagtggggtggggaatcacttgagcccaagagtttgagaccagcctgggcaatagagcaagacctcatcctctgcatcccccaaaaagaagaaaatgacacagaccctgctcactgtctagaaaggaaaattgacatcaaaaattgaaagacaatatctaaagtataaaacaacagagtccagaagcatagctagaagcgggatgatggatctagagaaacatggccaggtgcttgatctcaaggcgcctataaggaagtgacctggtctgcaatgttccccacggtgaccacagagcaggggctcaaaatgtggcatgaatgtctaatggagcactgaccaggcagcaataaagaaaagatctagaccgggcacggtggctcatgcctgtaatcccagcactttgagaagctgaggcggacggatcatgaggtcaggagatcgagaccatcctggctaacacggtgaaaccccgtctctattaaaaatacaaaaaaatttgccgggcgtggtggtgggcgcctgtagtcccagctacttgggaggctgaggcaggagaatggcatgaac

SEQ ID NO: 724158 - DNA, 1722 bp, Homo sapiens
ccaagtgaaagggggttccccttataaaaccgtcagatctcatgagacttattcactaccaccagaacagtatggggggaactgcccccatgattcaatgatttcccactgggtccctcccacaacacatgggaactatgggagctataattgaagataagatttggatggggacacagccatatcctatcaccttgcaatcaacttttttctttccaaaaatccagtgcttcagtgttgggctttcccttgcacraggcaaaccagaccatttgttgcttgttgacactcccccaagcagcattcccaggttccctgctggcaagacccacccttcttccagttcctagggcaggccatttgtgccttttaaggcttgaactccagcctgcatggcattgcctccctacaggtctctaagccaattctggagggaggttatctgtgtgattccgctcctccagctgcacctccaattctttattggagtggacctttcttgagcttctatgtggcacttgaccagctgctctccaaagatcatctttaatgcccggagctctgtccgttttgcagatgtggtgatattgtgcaccgttcagatcccaggctttgaaatcagagtcctgggataagcctcatctccaggtggatgggcaagggcaggtggccttgcactggtcacagagcccgagtctcctcatctttggtggggcaacataagtgcccacttcctaggcactgtgagggctgagatgaggtgcctggcatacagaccacaggccatcagcagtaactatgactgttgtcgggaactggggctccgagtaggtggtgataaaggcatattcagcggatggattcatgactctgcagatgtgtcttagccttgagcaaacttcttgcagctggaaggaggtgggtgtcaggggaaacattttcctccctgagaaaacttgatgatactaattggaattcagatggtgctaagctgctaggcttgggggaggcaggcacgaagtcatccgccttcttgtttaaagtgagttgtaattctccaggggttgagaaaccaggcgcttcactccagcagggaaataggcacgtgggttggtggagccgggccagctgaacacccctgcctaattggtgtccctctgctaatcaatacctgtgagggaggtggacgggaccctgggggtccaggagttgctgctgggagcctggcacagtgctgggtccctggggaaaaacaggaacctctactcttggggctgtgaggaggacacatgaaccagccccctccagctccagttatgatcagagatgaacagaattctgcccagaggtgcccttctctccccagcagtaaagaatgaggatcctagtagctagcgcaattttgaaaatgcgtttgggcatgaggcgtgatgggaaaaggttaaccactttccagcacaatatggatgtgggggttgtgagtgaggggaggcgtgatccttcctaagaatgggaaacagtctttcctctaaaggattaaactaaactcaagatctgtcttggaacaggagggcttccctggtgggaccagccttgcctgggggacctcattcgtactcatgcctggcctgggccctccacccaccctcaggagcctgcatgatgctgcaggggccaataggccaggacccttctgctcatgggatgctgaaagcaagcccc

SEQ ID NO: 724159 - DNA, 985 bp, Homo sapiens
tggggctcgaacccaggaccacctggatatgaagcagatgagagatctccccaccaggcatgagagttgggggagcgggggggcggttattgctggggatgcaggtgaaattattccagtgattcattcatcctaattgacaaggttctattgaattccttaaaarccccaggctgtgcattttggaaaacatggctgcagtgcactgggaaatgtcctctgatatcatgcaggacagcagacactctttaaagacaaaagttgggccagggacagtggctcaagcctataatcccagcgcattgggaggctgaggcagtaggatcacttgagcccaggagttcaagactagcctgggcaacacagcgagacctcatctctaaagaaaacaataaaataaaataaatcaaccaggtgtggtggcgcatacctgtagtcccagctacctgggaggctgaggcaggaggatcactcgaacacaggaggttgagcctgcagtgaaccatgattacgccactgcactccagcctgggcaaccaagtgagatcttgtctcttaaaaaaataataataaaataaaaaaatgaaaaataaataaaaaggataaaagtttgttgaatttacccagtatacattccaattggggtgggatgctcaggagaatggggtgcaatttcctgaagaagagaatgagcttttcataaattaccaggaggaaaatagtgcatgtcagaataaactctgtcaagaaatacagcagggcagccggacagttaataattcagagctgttccatagcactcctcgggatttaaaaaatatttccttgggattgttgcttaaaaatactgttaatggccgggaaccttctcattgtcattaatgggccagctgggtggggctcctggtggtcccccaggaaaacaccagggacacccatctcattttcctcgcagagcccaggatgggcggtgaggactggcagg

SEQ ID NO: 724160 - DNA, 1953 bp, Homo sapiens
ggcaagaatcacaaaaacacgaggctcagaaaatttcagttgaaaatctctggaatrttctggttcaagcccccagaacctcaggagcacaatacagggcaaaggaaagaaccttcactaagatataggaaagtgctgaacagaagcaaacaaattaaacccccaacttctaatacacttgaactgaacctgggcatggtggcttatacctgtaatcctagcactttgggaggccaaggcaggaggacagcttgagctaggagtttgagactagcctgggtaacatagagagactctatctctacacacaaaaaacattagccaggcagggtggtgcacacctgtggtcccagctacttgggggttgaggcgggaggatcacttgagcctaggagtttgaggctgaagtgtgctatgattgcaccactgtattccagcttgggcaacagagcaagaccctgtcaaaaaaaaaaaaatgctccatttaaaaaaattattagattcaggccgggtacggtggctcacgcctgtaatcccagcactatgggaggctgaggcagacagatcatgaggtcaagggatcatgaccatcttggccaacatggtctctactaaaaataaaaaaattagctgggcgtggtggtgcgtgcctgtaatcccagctactcgggaagctgagtaggagaatcacttgaactcggatggcagaggttacagtgagctaagattgcaccactgcacttcagcctggcgacagagaaagattctgtctcaaaaaaaaaaaaaaaaaaagtattagattcaagggacattgtcaaattgctataaaaggttccaaatgcttattctcaatttctgtccttattatagagaggacaagaggacattctgaggacataacccaagatgcacactgaactttccagctgtgctgcaccacagcacactactattcaactatactatgttcacctgttacgtgggctccctccagagacagagtcccacccacgtctggctcattaccaaacgctctggcttggcccacggagcatgcttcaatgactccatggactaaaggaatgttcaagttaatgtctctggccacagctgctaagagaggttactcaccatttggaaccagaaggaggcttttcacgatgcttctgagggagccaagactgatctgattggtggtggcaaattcagagagctgagccagaaatctttccacctgcagagagagaacagtgaaaacccgggccttcactttctaagcatctcagggagcacggacccactccctaacacagaatgttttatttacctcttttggctcagttaggaagtggaaaagcacctctgtcagggctgagaactgctgtgaagaaaacaacacagaacatcagtacaatttctactactgggtcagcatgccccaccccaggcaactgcatagccttgagagggaagaacagtaacagccaggtgttatgcctgttctgatcatcctatagttacaaatgttcacaatacccaccaccagtgtcaatatacctgtgtcgctacatcatctgaaaaacacgtttattgggatacttagcagacatgtattgagagactgtaagcatatgcactcagatgcacacatatatctctaggacacagacacacacagacagacatacacacacacacacacacacacgcacgcacaagggggaaatcatcagaaaattaaaagcggttaccactttggatgatttttattttcttctgttttacctatccatattttctttcttttctttttttttctttccctgagacagggtctctctgtcacccaggctggaatgcagtgatgcaatctcggctcactgcaacctctgcctcctgggctcaagcaatcctcccacctcagcctccagagtagctgggactacaggcaca

SEQ ID NO: 724161 - DNA, 1953 bp, Homo sapiens
ggcaagaatcacaaaaacacgaggctcagaaaatttcagttgaaaatctctggaatattctggttcaagcccccagaacctcaggagcacaatacagggcaaaggaaagaaccttcactaagatataggaaagtgctgaacagaagcaaacaaattaaacccccaacttctaatacacttgaactgaasctgggcatggtggcttatacctgtaatcctagcactttgggaggccaaggcaggaggacagcttgagctaggagtttgagactagcctgggtaacatagagagactctatctctacacacaaaaaacattagccaggcagggtggtgcacacctgtggtcccagctacttgggggttgaggcgggaggatcacttgagcctaggagtttgaggctgaagtgtgctatgattgcaccactgtattccagcttgggcaacagagcaagaccctgtcaaaaaaaaaaaaatgctccatttaaaaaaattattagattcaggccgggtacggtggctcacgcctgtaatcccagcactatgggaggctgaggcagacagatcatgaggtcaagggatcatgaccatcttggccaacatggtctctactaaaaataaaaaaattagctgggcgtggtggtgcgtgcctgtaatcccagctactcgggaagctgagtaggagaatcacttgaactcggatggcagaggttacagtgagctaagattgcaccactgcacttcagcctggcgacagagaaagattctgtctcaaaaaaaaaaaaaaaaaaagtattagattcaagggacattgtcaaattgctataaaaggttccaaatgcttattctcaatttctgtccttattatagagaggacaagaggacattctgaggacataacccaagatgcacactgaactttccagctgtgctgcaccacagcacactactattcaactatactatgttcacctgttacgtgggctccctccagagacagagtcccacccacgtctggctcattaccaaacgctctggcttggcccacggagcatgcttcaatgactccatggactaaaggaatgttcaagttaatgtctctggccacagctgctaagagaggttactcaccatttggaaccagaaggaggcttttcacgatgcttctgagggagccaagactgatctgattggtggtggcaaattcagagagctgagccagaaatctttccacctgcagagagagaacagtgaaaacccgggccttcactttctaagcatctcagggagcacggacccactccctaacacagaatgttttatttacctcttttggctcagttaggaagtggaaaagcacctctgtcagggctgagaactgctgtgaagaaaacaacacagaacatcagtacaatttctactactgggtcagcatgccccaccccaggcaactgcatagccttgagagggaagaacagtaacagccaggtgttatgcctgttctgatcatcctatagttacaaatgttcacaatacccaccaccagtgtcaatatacctgtgtcgctacatcatctgaaaaacacgtttattgggatacttagcagacatgtattgagagactgtaagcatatgcactcagatgcacacatatatctctaggacacagacacacacagacagacatacacacacacacacacacacacgcacgcacaagggggaaatcatcagaaaattaaaagcggttaccactttggatgatttttattttcttctgttttacctatccatattttctttcttttctttttttttctttccctgagacagggtctctctgtcacccaggctggaatgcagtgatgcaatctcggctcactgcaacctctgcctcctgggctcaagcaatcctcccacctcagcctccagagtagctgggactacaggcaca

SEQ ID NO: 724162 - DNA, 1953 bp, Homo sapiens
ggcaagaatcacaaaaacacgaggctcagaaaatttcagttgaaaatctctggaatattctggttcaagcccccagaacctcaggagcacaatacagggcaaaggaaagaaccttcactaagatataggaaagtgctgaacagaagcaaacaaattaaacccccaacttctaatacacttgaactgaacctgggcatggtggcttatacctgtaatcctagcactttgggaggccaaggcaggaggacagcttgagctaggagtttgagactagcctgggtaacatagagagactctatctctacacacaaaaaacattagccaggcagggtggtgcacacctgtggtcccagctacttgggggttgaggcrggaggatcacttgagcctaggagtttgaggctgaagtgtgctatgattgcaccactgtattccagcttgggcaacagagcaagaccctgtcaaaaaaaaaaaaatgctccatttaaaaaaattattagattcaggccgggtacggtggctcacgcctgtaatcccagcactatgggaggctgaggcagacagatcatgaggtcaagggatcatgaccatcttggccaacatggtctctactaaaaataaaaaaattagctgggcgtggtggtgcgtgcctgtaatcccagctactcgggaagctgagtaggagaatcacttgaactcggatggcagaggttacagtgagctaagattgcaccactgcacttcagcctggcgacagagaaagattctgtctcaaaaaaaaaaaaaaaaaaagtattagattcaagggacattgtcaaattgctataaaaggttccaaatgcttattctcaatttctgtccttattatagagaggacaagaggacattctgaggacataacccaagatgcacactgaactttccagctgtgctgcaccacagcacactactattcaactatactatgttcacctgttacgtgggctccctccagagacagagtcccacccacgtctggctcattaccaaacgctctggcttggcccacggagcatgcttcaatgactccatggactaaaggaatgttcaagttaatgtctctggccacagctgctaagagaggttactcaccatttggaaccagaaggaggcttttcacgatgcttctgagggagccaagactgatctgattggtggtggcaaattcagagagctgagccagaaatctttccacctgcagagagagaacagtgaaaacccgggccttcactttctaagcatctcagggagcacggacccactccctaacacagaatgttttatttacctcttttggctcagttaggaagtggaaaagcacctctgtcagggctgagaactgctgtgaagaaaacaacacagaacatcagtacaatttctactactgggtcagcatgccccaccccaggcaactgcatagccttgagagggaagaacagtaacagccaggtgttatgcctgttctgatcatcctatagttacaaatgttcacaatacccaccaccagtgtcaatatacctgtgtcgctacatcatctgaaaaacacgtttattgggatacttagcagacatgtattgagagactgtaagcatatgcactcagatgcacacatatatctctaggacacagacacacacagacagacatacacacacacacacacacacacgcacgcacaagggggaaatcatcagaaaattaaaagcggttaccactttggatgatttttattttcttctgttttacctatccatattttctttcttttctttttttttctttccctgagacagggtctctctgtcacccaggctggaatgcagtgatgcaatctcggctcactgcaacctctgcctcctgggctcaagcaatcctcccacctcagcctccagagtagctgggactacaggcaca

SEQ ID NO: 724163 - DNA, 1953 bp, Homo sapiens
ggcaagaatcacaaaaacacgaggctcagaaaatttcagttgaaaatctctggaatattctggttcaagcccccagaacctcaggagcacaatacagggcaaaggaaagaaccttcactaagatataggaaagtgctgaacagaagcaaacaaattaaacccccaacttctaatacacttgaactgaacctgggcatggtggcttatacctgtaatcctagcactttgggaggccaaggcaggaggacagcttgagctaggagtttgagactagcctgggtaacatagagagactctatctctacacacaaaaaacattagccaggcagggtggtgcacacctgtggtcccagctacttgggggttgaggcgggaggatcacttgagcctaggagtttgaggctgaagtgtgctatgattgcaccactgtattccagcttgggcaacagagcaagaccctgtcaaaaaaaaaaaaatgctccatttaaaaaaattattagattcaggccgggtacggtggctcacgcctgtaatcccagcactatgggaggctgaggcagacagatcatgaggtcaagggatcatgaccatcttggccaacatggtctctactaaaaataaaaaaattagctgggcgtggtggtgcgtgcctgtaatcccagctactcgggaagctgagtaggagaatcacttgaactcggatggcagaggttacagtgagctaagattgcaccactgcacttcagcctggcgacagagaaagattctgtctcaaaaaaaaaaaaaaaaaaagtattagattcaagggacattgtcaaattgctataaaaggttccaaatgcttattctcaatttctgtccttattatagagaggacaagaggacattctgaggacataacccaagatgcacactgaactttccagctgtgctgcaccacagcacactactattcaactatactatgttcacctgttacgtgggctccctccagagacagagtcccacccacgtctggctcattaccaaacgctctggcttggcccacggagcatgcttcaatgactccatggactaaaggaatgttcaagttaatgtctctggccacagctgctaagagaggttactcaccatttggaaccagaaggaggcttttcacgatgcttctgagggagccaagactgatctgattggtggtggcaaattcagagagctgagccagaaatctttccacctgcagagagagaacagtgaaaacccgggccttcactttctaagcatctcagggagcacrgacccactccctaacacagaatgttttatttacctcttttggctcagttaggaagtggaaaagcacctctgtcagggctgagaactgctgtgaagaaaacaacacagaacatcagtacaatttctactactgggtcagcatgccccaccccaggcaactgcatagccttgagagggaagaacagtaacagccaggtgttatgcctgttctgatcatcctatagttacaaatgttcacaatacccaccaccagtgtcaatatacctgtgtcgctacatcatctgaaaaacacgtttattgggatacttagcagacatgtattgagagactgtaagcatatgcactcagatgcacacatatatctctaggacacagacacacacagacagacatacacacacacacacacacacacgcacgcacaagggggaaatcatcagaaaattaaaagcggttaccactttggatgatttttattttcttctgttttacctatccatattttctttcttttctttttttttctttccctgagacagggtctctctgtcacccaggctggaatgcagtgatgcaatctcggctcactgcaacctctgcctcctgggctcaagcaatcctcccacctcagcctccagagtagctgggactacaggcaca

SEQ ID NO: 724164 - DNA, 1953 bp, Homo sapiens
ggcaagaatcacaaaaacacgaggctcagaaaatttcagttgaaaatctctggaatattctggttcaagcccccagaacctcaggagcacaatacagggcaaaggaaagaaccttcactaagatataggaaagtgctgaacagaagcaaacaaattaaacccccaacttctaatacacttgaactgaacctgggcatggtggcttatacctgtaatcctagcactttgggaggccaaggcaggaggacagcttgagctaggagtttgagactagcctgggtaacatagagagactctatctctacacacaaaaaacattagccaggcagggtggtgcacacctgtggtcccagctacttgggggttgaggcgggaggatcacttgagcctaggagtttgaggctgaagtgtgctatgattgcaccactgtattccagcttgggcaacagagcaagaccctgtcaaaaaaaaaaaaatgctccatttaaaaaaattattagattcaggccgggtacggtggctcacgcctgtaatcccagcactatgggaggctgaggcagacagatcatgaggtcaagggatcatgaccatcttggccaacatggtctctactaaaaataaaaaaattagctgggcgtggtggtgcgtgcctgtaatcccagctactcgggaagctgagtaggagaatcacttgaactcggatggcagaggttacagtgagctaagattgcaccactgcacttcagcctggcgacagagaaagattctgtctcaaaaaaaaaaaaaaaaaaagtattagattcaagggacattgtcaaattgctataaaaggttccaaatgcttattctcaatttctgtccttattatagagaggacaagaggacattctgaggacataacccaagatgcacactgaactttccagctgtgctgcaccacagcacactactattcaactatactatgttcacctgttacgtgggctccctccagagacagagtcccacccacgtctggctcattaccaaacgctctggcttggcccacggagcatgcttcaatgactccatggactaaaggaatgttcaagttaatgtctctggccacagctgctaagagaggttactcaccatttggaaccagaaggaggcttttcacgatgcttctgagggagccaagactgatctgattggtggtggcaaattcagagagctgagccagaaatctttccacctgcagagagagaacagtgaaaacccgggccttcactttctaagcatctcagggagcacggaccyactccctaacacagaatgttttatttacctcttttggctcagttaggaagtggaaaagcacctctgtcagggctgagaactgctgtgaagaaaacaacacagaacatcagtacaatttctactactgggtcagcatgccccaccccaggcaactgcatagccttgagagggaagaacagtaacagccaggtgttatgcctgttctgatcatcctatagttacaaatgttcacaatacccaccaccagtgtcaatatacctgtgtcgctacatcatctgaaaaacacgtttattgggatacttagcagacatgtattgagagactgtaagcatatgcactcagatgcacacatatatctctaggacacagacacacacagacagacatacacacacacacacacacacacgcacgcacaagggggaaatcatcagaaaattaaaagcggttaccactttggatgatttttattttcttctgttttacctatccatattttctttcttttctttttttttctttccctgagacagggtctctctgtcacccaggctggaatgcagtgatgcaatctcggctcactgcaacctctgcctcctgggctcaagcaatcctcccacctcagcctccagagtagctgggactacaggcaca

SEQ ID NO: 724165 - DNA, 249 bp, Homo sapiens
tgtttttaagaagcatcaaacccaccccccaccccccatattcttccaccccagcaaagaaggagccaggaaggcactgcaagggggaagcgggggcggggggggggagggcagggaggatccctgagaaaaaaagatgaatatttgcatcttcacttgtgtgcctcatttgsggtgacccatgggtgcaaaggatgatgtattttatactgaacatggtactggcaattttgggtgcgcaatgaaaaa

SEQ ID NO: 724166 - DNA, 908 bp, Homo sapiens
aactttcctccaccagcccaaacagaattgccatcaaggtcacctcattcctcattacccccatagcctgcctatggaggggtggctctggaatgacaatattcagtcaggatcctggcaggaaacagatacaaactcaaacagggcaattagaggaaggacagtgtatcagtcagggttctttagagggacagaactaataggatagatgtatatatgaaagggagtttattaaggagtattaactcacatgatcacaagtgaagcccacaataggccatctgcaagctgaggagcaaggaagccagactgagtccccaaacctcaaaagtagggaagccgacaatgccttcattctgtggctaaaggttcgatagcccctggcaaataactggtgtaagtccaagagtccaaaactgaagaaattggagactgatgttcgagggcaggaaacatccagcatgagtggaagatgaaggctggaagactcagcaagtctgctctttctaccttcttctgcctgctttattctagccatgctracagctgatttagtggtgcccaccagattgaggttggttctctctctcccagcccactaactcaaatgttaatcatctttggcaacaccctcacagacacacccaggaacaatactttgcatccttcaatccatttaaattaacactcaatattaaccatcacaggtgagcagggtgtagggaagtccaaagaatttcaagcctttgagctggtagtagccggctgtgagagtgcaagggaagggagtgattcccaaaacatggagagagaggtggttgtgtggtgagggcagcctgacagcatctgtgttaagcagtggatgtctgcagtttgctatgatctttcagaggtgtagatatcaccac

SEQ ID NO: 724167 - DNA, 1430 bp, Homo sapiens
aaattcccaccctgaatttttctatcacatgagaatttggcccagtgtgtctattgaattaccaattattattatttataatactctctttctgttagtgttagaattccttgcaatgctgactatgctcatagctttttctgatgtggtggtttcagtcctgagagaacattttcatcatgtggagctttaaaaaagatcctcatcgctttcccagaccaatcaaatggagatctctggcattggatctggggcatgggtgtggtttttttgtttaaataaagctctcccaagattcaaacgtgcatctgaagttgaggaccactgatctcatgggttcctgtgatctcaactggagcttattgcaaagtgcatgcttgttggtgagcagctatattaatttttgccttactcagtaattacatctgcaggtccctttaatggaaattatatgagaagaaacttagaagaagagacaattagaatttgggattcatcctagggctccttcatgaccaaaacaaatgtagatgcaggttattagctgaaatcttggtaatgtcttcagctgaggttcatgctttatggaaattgttcatgcatttagaaaaatagcatgtccaagttcttgtttaacaagttacttatttactgttttttttttttttgaaaaataaggagtgaagggaagtattgccttataattgtatattaaacaaggttgttaacaaaaaaatcaccaaagtattggcttctattgtgcctcactgtggagatttcatatataactcttaattttctctcagtggttgtcagtggacaacgggtcagtacttgctgcaraattctatgtcctcttgccttccatctttataggtattggagaaatatttaatgagaatagaaaataaattccttcagagaaaaattagtcctttttttaaaaaaataatttaatattattttaagttccaggatacatgtgcaggatgtgcaagtttgttacataagacacaggtaaacatgtgccatggtggtttgctgtacttgtcaacttatctcctaggtattgagcccagcatgcatagctatgtttcctgatgctctccctcccccagctcccgtgaaaggtcctagtgtgtgttgttcccctccctgttctcatcattcagcttccacttataactgacaacatgcaatattcgttttcctgttcctgcgtttgtttgctgaggataatggcttccagctccatccatgtccatgcaaatgacatggtcttgttcttttttatggctgcataggattccatggtaaatatataccacattttctttatccagtctattattgatgggcatttgggttgattccatgtctttgctattgtgaatagtgctgcaatgaacatacgtgtgcatatatcttta

SEQ ID NO: 724168 - DNA, 628 bp, Homo sapiens
cctttcagtaggagagaggtgattccacaaaagcaatcagagaattttagaaaataatgtttggggatcaataatggcaggtgtttgtcaaaatcatgtagtgttaagtgtaaactcctgctgcatattattttcaaacatgaaggcacaacttggtacccacttattaaagaagattctggggaagtagagacactgaccccacctttagtgtgtcttgttttcagggtcgcatcggggctctgctgtgggtttttgagtaaataaaaaaactctaggttgtcatcctttcctcaataagatgaggttttatcaaatgatcccttttgtcttgtcaaggtccccttttctaggaatctaagagataaaatgtctccttcccaagaggtatttcccactgttactttaacttaaatataatawtctcccttggcaattctacctataactgctaccactgcccctaacacagggcgcattctgagaagccgtgtatctttcaccatgtaatatgacattttgatctgaaatttaaaatccttttaaaaggaaactggtctcttctttgtatctgttggctgaacccatagttgcagctccagtgcttccttgacagacttatgagata

SEQ ID NO: 724169 - DNA, 646 bp, Homo sapiens
tttttttttcgagacggagtctcgcccaggctggagtgcagtggcgcgatcttggctcactgcaagctccgcctcacgggttcgcgtcattctcctgcctcagcctcctgagtagctgggactacaggtgcccgccaccatgcccggctatttttttttgtatttttagtagagatggggtttcaccgtgttagccaggatggcctcgatcttctggcctcatgatccgcctgcctcggtctcccaaagtgctgggattacaggtgtgagccaccgcacccggccaattaatttctttatacccttcatctatatcaacagtatcaagatttgtcatgcctaaaaagtttactcmttttttgttgttgcagaaatattttgatgcaagttcagttacattttacctgtacatatttcagtattcatctcagaaaagaaaaaaaaatgacactttctgtaaactgatgccataatctcacatgttgaagttaacagtaattatttggtgccaaaactctgtccttgtcattgcctcaattttgtttcaagtgaaaattgtttaatttgggacccaaccaaattctgccttacatttagtcataacatattttaagtcttcttttgtctggagagtaatctcttcttt

SEQ ID NO: 724170 - DNA, 646 bp, Homo sapiens
tttttttttcgagacggagtctcgcccaggctggagtgcagtggcgcgatcttggctcactgcaagctccgcctcacgggttcgcgtcattctcctgcctcagcctcctgagtagctgggactacaggtgcccgccaccatgcccggctatttttttttgtatttttagtagagatggggtttcaccgtgttagccaggatggcctcgatcttctggcctcatgatccgcctgcctcggtctcccaaagtgctgggattacaggtgtgagccaccgcacccggccaattaatttctttatacccttcatctatatcaacagtatcaagatttgtcatgcctaaaaagtttactcattttttgttgttgcagaaatattttgatgcaagttcagttacattttacctgtacatatttcagtattcatctcagaaaagaaaaaaaaatgacactttctgtaaactgatgccataatctcacatgttraagttaacagtaattatttggtgccaaaactctgtccttgtcattgcctcaattttgtttcaagtgaaaattgtttaatttgggacccaaccaaattctgccttacatttagtcataacatattttaagtcttcttttgtctggagagtaatctcttcttt

SEQ ID NO: 724171 - DNA, 595 bp, Homo sapiens
ttttatttactgaagtcatcagtatttgacagaatagattatatgttttatatactaaattttggttgaaaaggcacaaactatacctgctttgtgtgtcctggtatctatttttaaattatacaagttattttttatattttagactttatgtrgatgatagaagtttggcaacttacttgattcaatatttagccatatgaatcttgtattttattatacccatagtgtatgggatttgaaaaagaatcagatgggaactttttattgaatatatttctgtattattgaatttaatgaaaatatactgcttgtgtaatcaaaaataaactgtcggtgtttcagttaaattaattttttggaacatttgtttagtttatttagagatgatcaccatttcataaaacagatacctcttatctctattggtgattttcaaagggccttcctcatactgtgaaaggccagaattgtgggcaggattattacttaattagcactcacttaataattttggaattcagaaataaattataggttatgaataattaaactttaaggaaatacttatttttcatcctttctcattataatt

SEQ ID NO: 724172 - DNA, 642 bp, Homo sapiens
tatcaaatgatttctgcttatttttataaattttgcagttatttttcaatataaattgaattcattgaaaattttaaatgtataagtttgcgtaaaagactactgatgccagaaacctcattatctttaattaatcttaactgaattaagcatttattactttaaaatttttctgtaattctgaaatttctatatgtcttgtgggtaaatgtgtgtgtgtatatatgtgtatataatctttctaatgtattttctgaagtgtgatctcgaatccttactgccactttgtagctattaatcaagtgtaaattgcttaacaactttaaggttgttttttaartctgttaattgggaatcatttcacctacctcacagggttgttgtgaggaaaaaacaataaaacatatgtgaaagagtgcttagcatataatagatgtgcagtgtatgaaaatgagtgttaccaaaccttcagtggcccccattgtcctcaggataaaatccaaattctgtgtcatggtgtgtgttctggctcacccttatgtcttcagccccatttctttccttgaaaactgcacatattgatttattgatactgtagtctttatagttcccaggatatatcatgctttcttttggccttta

SEQ ID NO: 724173 - DNA, 343 bp, Homo sapiens
ctgtgcatggtagagacagacgtagaaccacaaggctctgacttgaaatccagtgttcatccgccgcgtcacattccctcctcgatagcctattccaatagaaatatatcaggcaggccgggcacagtggctcacgcctgtaatcctagcactttgggrggacgagaggcgggggttgcctgagctcaagcgttcgagaccagcctgggcaacactgtgtgaaaccccgtctctattaaaatacaaaaaaaaaaattagccagggcttggcggcaggcaccggtaatcccagctgcttgggaggctgaggcacgagaatcgcttgaacccgggaggcggaggt

SEQ ID NO: 724174 - DNA, 651 bp, Homo sapiens
tgagtaacagatgagaagaaatgtaggaagtagactataaattataaaacactactgagatgcaaattatcatgattatttataaggacccaagggttgtcccaagacgtgttttttccgcatctcagttcttccatctcttctttgggacacctcatctccccctaaatgcctccctttgctgggatacagcctcccctgctggtctctaaattagcccatcctcctaacacttctccttgagaatttcaattcctttaatccagtgaaataagaagttcaggccatcatcttcaaagaataagaataaaatttggggaccaaaattatacccattgggactgcttctgtagaaatactttggaattccttttcatgccctattaaataattaaaatgtttcttttctgcattcaatgttagttatttaaatcttagtcctaagctccattagcaactttattagcacaaaactttctttgccagttggattagttttatagatttttgcatagaaggaatgtacgcagacaaatacaagtgcgtggctatggttaacatcctacaatcctaggaaataggttgaatttaagctgacctgaccaatctyactccacttaatagcttattagcttaatcggtgtcttccat

SEQ ID NO: 724175 - DNA, 627 bp, Homo sapiens
ttttctttagaaactaaaatcagctcatgagaagttaaagtaatgctgactttgtttcataagaaataaaaactcgactcaggaggaccccagccattatttgtggctcacattctctaaacttcatctgaaaagctgatattccagattccttacatctctccaagatggctagcatcttatacacacaaagatgggggggggttttactcagcaagaaaaatatttaytttcctttttttttttaggagaaaaatacttgtctcttcaacctcattaatttttatgatgcgtaaaattttttcattacattagccaaaaagactctggactgaataaagtatagcacccaaaccatttaaaatggcttcctgactgggaagacactgcagtcatctcagggaagtttctggccttgggaaaaacaaatggaactttggccgttcaagaagggaaactcaagaatccaggccttgcgtgctgctcttttttctctgaaagcttttggaagtggagccacactttatttaccgaatatgcacttcttgtttcttgtaaccatggtgctttagttgagtgtgtcttatgtcagactactactgagccaatatttatcattttagaaat

SEQ ID NO: 724176 - DNA, 3003 bp, Homo sapiens
taaatgtgtattgatgtttagttatgtaatatacataggctaactagttkcttgggcaaagaaacccagttctagaacatttgtagctatagttgcaccagatacacctatttttaaaagatgccttgtgttttttattttttttctatccaatccatgctcttgctgttttatctgctggaatttgttgcacaaattgctatttctcccctgaagggatgaggcacacagaacttcttgggaacacccagtctacccaatcaaagactacccttaacatctccatgctccccaggtaccatgcccaaccatgcccaggtaccattccccaagggcaaattctataatcctccatgattcgggaaaaaaaatctacttttgtttccaactaggacttgggagatgaaaaaataacaccagggcttgtttttgcattgaattgcttttgcctttactaaaatacatgtatacacaatatagaaataaacaagtctgttagaatatgagaaaaatctcaaaagcactttatttgagtagccccaatatatattacctttattttctattgcattttcaaatgttttctataattaaaagttacttttcttttctattgcatttttaatgtttcctataattaagagtcattgtaagagccatatgtattcagaattcaacaaattgttttagaataaaacttctgattctggaacttcttagtgagcatcccagagataatagagagataagtaaccctataaagagacagactaagaaggatgaagagcctaaaaaagatagacaacctggttctgttaatttgaccagagaaaattagaaaatactattagagttttcaactatctattacaccaggtcatgagcctaaaacagccatttcaaattatacatgtaagaaaacttaggaaatttgtcaagtattatcaggatgatggggggctccagaaatattccaaagtattggtcattaattagttcgttacactacacagatattcactgatgtccattaagcaccagacattgtttatggtgctgtagatatagcaagggagaggtaagtcaagatttctgctgtcttagaatttgtataattggaggtaagatattaaacaagtaagcaaggaaatgaccaaaataagtttacatagtaatatgtgttgttaaggcaaaaatattaaagtataacagaagatgaaaagaaaaactgctattaatcatgtggtcagcaagtcctctttaaggaggtgacataatgctaagccttgaatggattcttccaattaaatgaaccattaattctcattttctaaaagaaaaaccaatttgcctttcaatttaggtgcaaagtctgtataaaatataaatgtgtattgatgtttaattatgtaatatacataggctaactagttgcctgagctggccaccaaaatgacagggaacataaaggtcagatgagatgaattctgggactaactcagatacgcttttggaggccttatatagaattcagaaatctcaagtctctggccaaatgtcaaagattcaacaaagggtaataaaaaagataacctgaaagctgtaagtcaccaccaagagcaccttttaggcatgaccttcaccagcaggaaaaggaacaatgcatgtgctgtagatccacatggatagaagtggggaaaaggaggttgtattgcatatatttgtgtctgcagtttgagaatgggacggagttttagtacttcatcttggttgcacaagttgtttgattggatgtaattgttatctaccagtgtggttaatggtttggatagaaatatgacagatgacagattctacaagggcactgaatgggtaacatgcaataaagtgtgccagattgacttatggatgatattgtcccaggacttgatttatttccagcgttatgttcaaccttcatgcacaaatatgtgaaatggatcaattagctatttcataaagattttcctttttattcagggctgtgaatcagatcactactcctttaaacattttcccaggagctacatttgaattgaagaagatccattttaagagactcataactccttcacacttacagcttcagatgaaataataaaggagaggcacagtttaccattttcttcccattttgctttggtgctcttttattttcactttataactgtaggcaagacttgattgatgggcataataaaggatttgagtagcttaagaaaataaggcaagctaataggaataaaacaaaccatttttcattttcataagtcttgaaattgatttaggatgctactccagtggccccatgagcatggacagtttctttgcagttggttctagatgaatggactgttttgcttactaagaaaatatttataaagatacagtgagttttggccaggcacagtggctcacacctgtaatcccagcactttgggaggccaaggtgggcggatcacctgaggtcaggagttcgagaccagcctggccaacatggggaaaccccatctctactaaaaatacaaaattagccgggcatggtgctgcatgcctgtaatcccagctactcaggaggctgaggcaggagaatcacttgaacccaggaggcaaagttgcggtgagccaagattgcacgactgcacaccagcctgggcgacagagtgggactgcatctcaaaaaaaaaaaaaaaaaaaaaaagatacagtgaatttcatgcatggatacatcatgtttttgataggcatacctagcatgtatattgtatttaaagatagacaaatttgaaaaagactaattatttcctacattatcacttgattacacagtatcagtggtctactttaagtgacaagaaattttattgaagaaacactgccacttggaaatgccagtttaaaataaaatcaaatcaaattatataagattatgatgttaaatattaaaaaggagtgttcctgggg

SEQ ID NO: 724177 - DNA, 3003 bp, Homo sapiens
taaatgtgtattgatgtttagttatgtaatatacataggctaactagtttcttgggcaaagaaacccagttctagaacatttgtagctatagttgcaccagatacacctatttttaaaagatgccttgtgttttttattttttttctatccaatccatgctcttgctgttttatctgctggaatttgttgcacaaattgctatttctcccctgaagggatgaggcacacagaacttcttgggaacacccagtctacccaatcaaagactacccttaacatctccatgctccccaggtaccatgcccaaccatgcccaggtaccattccccaagggcaaattctataatcctccatgattcgggaaaaaaaatctacttttgtttccaactaggacttgggagatgaaaaaataacaccagggcttgtttttgcattgaattgcttttgcctttactaaaatacatgtatacacaatatagaaataaacaagtctgttagaatatgagaaaaatctcaaaagcactttatttgagtagccccaatatatattacctttattttctattgcattttcaaatgttttctataattaaaagttacttttcttttctattgcatttttaatgtttcctataattaagagtcattgtaagagccatatgtattcagaattcaacaaattgttttagaataaaacttctgattctggaacttcttagtgagcatcccagagataatagagagataagtaaccctataaagagacagactaagaaggatgaagagcctaaaaaagatagacaacctggttctgttaatttgaccagagaaaattagaaaatactattagagttttcaactatctattacaccaggtcatgagcctaaaacagccatttcaaattatacatgtaagaaaacttaggaaatttgtcaagtattatcaggatgatggggggctccagaaatattccaaagtattggtcattaattagttcgytacactacacagatattcactgatgtccattaagcaccagacattgtttatggtgctgtagatatagcaagggagaggtaagtcaagatttctgctgtcttagaatttgtataattggaggtaagatattaaacaagtaagcaaggaaatgaccaaaataagtttacatagtaatatgtgttgttaaggcaaaaatattaaagtataacagaagatgaaaagaaaaactgctattaatcatgtggtcagcaagtcctctttaaggaggtgacataatgctaagccttgaatggattcttccaattaaatgaaccattaattctcattttctaaaagaaaaaccaatttgcctttcaatttaggtgcaaagtctgtataaaatataaatgtgtattgatgtttaattatgtaatatacataggctaactagttgcctgagctggccaccaaaatgacagggaacataaaggtcagatgagatgaattctgggactaactcagatacgcttttggaggccttatatagaattcagaaatctcaagtctctggccaaatgtcaaagattcaacaaagggtaataaaaaagataacctgaaagctgtaagtcaccaccaagagcaccttttaggcatgaccttcaccagcaggaaaaggaacaatgcatgtgctgtagatccacatggatagaagtggggaaaaggaggttgtattgcatatatttgtgtctgcagtttgagaatgggacggagttttagtacttcatcttggttgcacaagttgtttgattggatgtaattgttatctaccagtgtggttaatggtttggatagaaatatgacagatgacagattctacaagggcactgaatgggtaacatgcaataaagtgtgccagattgacttatggatgatattgtcccaggacttgatttatttccagcgttatgttcaaccttcatgcacaaatatgtgaaatggatcaattagctatttcataaagattttcctttttattcagggctgtgaatcagatcactactcctttaaacattttcccaggagctacatttgaattgaagaagatccattttaagagactcataactccttcacacttacagcttcagatgaaataataaaggagaggcacagtttaccattttcttcccattttgctttggtgctcttttattttcactttataactgtaggcaagacttgattgatgggcataataaaggatttgagtagcttaagaaaataaggcaagctaataggaataaaacaaaccatttttcattttcataagtcttgaaattgatttaggatgctactccagtggccccatgagcatggacagtttctttgcagttggttctagatgaatggactgttttgcttactaagaaaatatttataaagatacagtgagttttggccaggcacagtggctcacacctgtaatcccagcactttgggaggccaaggtgggcggatcacctgaggtcaggagttcgagaccagcctggccaacatggggaaaccccatctctactaaaaatacaaaattagccgggcatggtgctgcatgcctgtaatcccagctactcaggaggctgaggcaggagaatcacttgaacccaggaggcaaagttgcggtgagccaagattgcacgactgcacaccagcctgggcgacagagtgggactgcatctcaaaaaaaaaaaaaaaaaaaaaaagatacagtgaatttcatgcatggatacatcatgtttttgataggcatacctagcatgtatattgtatttaaagatagacaaatttgaaaaagactaattatttcctacattatcacttgattacacagtatcagtggtctactttaagtgacaagaaattttattgaagaaacactgccacttggaaatgccagtttaaaataaaatcaaatcaaattatataagattatgatgttaaatattaaaaaggagtgttcctgggg

SEQ ID NO: 724178 - DNA, 3003 bp, Homo sapiens
taaatgtgtattgatgtttagttatgtaatatacataggctaactagtttcttgggcaaagaaacccagttctagaacatttgtagctatagttgcaccagatacacctatttttaaaagatgccttgtgttttttattttttttctatccaatccatgctcttgctgttttatctgctggaatttgttgcacaaattgctatttctcccctgaagggatgaggcacacagaacttcttgggaacacccagtctacccaatcaaagactacccttaacatctccatgctccccaggtaccatgcccaaccatgcccaggtaccattccccaagggcaaattctataatcctccatgattcgggaaaaaaaatctacttttgtttccaactaggacttgggagatgaaaaaataacaccagggcttgtttttgcattgaattgcttttgcctttactaaaatacatgtatacacaatatagaaataaacaagtctgttagaatatgagaaaaatctcaaaagcactttatttgagtagccccaatatatattacctttattttctattgcattttcaaatgttttctataattaaaagttacttttcttttctattgcatttttaatgtttcctataattaagagtcattgtaagagccatatgtattcagaattcaacaaattgttttagaataaaacttctgattctggaacttcttagtgagcatcccagagataatagagagataagtaaccctataaagagacagactaagaaggatgaagagcctaaaaaagatagacaacctggttctgttaatttgaccagagaaaattagaaaatactattagagttttcaactatctattacaccaggtcatgagcctaaaacagccatttcaaattatacatgtaagaaaacttaggaaatttgtcaagtattatcaggatgatggggggctccagaaatattccaaagtattggtcattaattagttcgttacactacacagatattcactgatgtccattaarcaccagacattgtttatggtgctgtagatatagcaagggagaggtaagtcaagatttctgctgtcttagaatttgtataattggaggtaagatattaaacaagtaagcaaggaaatgaccaaaataagtttacatagtaatatgtgttgttaaggcaaaaatattaaagtataacagaagatgaaaagaaaaactgctattaatcatgtggtcagcaagtcctctttaaggaggtgacataatgctaagccttgaatggattcttccaattaaatgaaccattaattctcattttctaaaagaaaaaccaatttgcctttcaatttaggtgcaaagtctgtataaaatataaatgtgtattgatgtttaattatgtaatatacataggctaactagttgcctgagctggccaccaaaatgacagggaacataaaggtcagatgagatgaattctgggactaactcagatacgcttttggaggccttatatagaattcagaaatctcaagtctctggccaaatgtcaaagattcaacaaagggtaataaaaaagataacctgaaagctgtaagtcaccaccaagagcaccttttaggcatgaccttcaccagcaggaaaaggaacaatgcatgtgctgtagatccacatggatagaagtggggaaaaggaggttgtattgcatatatttgtgtctgcagtttgagaatgggacggagttttagtacttcatcttggttgcacaagttgtttgattggatgtaattgttatctaccagtgtggttaatggtttggatagaaatatgacagatgacagattctacaagggcactgaatgggtaacatgcaataaagtgtgccagattgacttatggatgatattgtcccaggacttgatttatttccagcgttatgttcaaccttcatgcacaaatatgtgaaatggatcaattagctatttcataaagattttcctttttattcagggctgtgaatcagatcactactcctttaaacattttcccaggagctacatttgaattgaagaagatccattttaagagactcataactccttcacacttacagcttcagatgaaataataaaggagaggcacagtttaccattttcttcccattttgctttggtgctcttttattttcactttataactgtaggcaagacttgattgatgggcataataaaggatttgagtagcttaagaaaataaggcaagctaataggaataaaacaaaccatttttcattttcataagtcttgaaattgatttaggatgctactccagtggccccatgagcatggacagtttctttgcagttggttctagatgaatggactgttttgcttactaagaaaatatttataaagatacagtgagttttggccaggcacagtggctcacacctgtaatcccagcactttgggaggccaaggtgggcggatcacctgaggtcaggagttcgagaccagcctggccaacatggggaaaccccatctctactaaaaatacaaaattagccgggcatggtgctgcatgcctgtaatcccagctactcaggaggctgaggcaggagaatcacttgaacccaggaggcaaagttgcggtgagccaagattgcacgactgcacaccagcctgggcgacagagtgggactgcatctcaaaaaaaaaaaaaaaaaaaaaaagatacagtgaatttcatgcatggatacatcatgtttttgataggcatacctagcatgtatattgtatttaaagatagacaaatttgaaaaagactaattatttcctacattatcacttgattacacagtatcagtggtctactttaagtgacaagaaattttattgaagaaacactgccacttggaaatgccagtttaaaataaaatcaaatcaaattatataagattatgatgttaaatattaaaaaggagtgttcctgggg

SEQ ID NO: 724179 - DNA, 1206 bp, Homo sapiens
ttttcctaaattatacacagaataatgcctttttcagccaatgttattttagagttgatgaaatatgttgcatttttatattcttggtatgaagactattaactgtataataaaattatttaagttctgatgacgtagtgtcagatgatgttcagtgtagcaaaacgcgaggcacaattttttgtaaaaaggacaatatcttgcagtcagtacacactgagtacataaatgttgaccraatgaagagcacagaatggggctgcccacctggaggcagagccatgaattggtactgaggcaaacaaggagagctttgtgtgtgggtggaggcgcagggagggagcgccaggcttcatggaggcatgcgagggtctccagggtcaaacagacagaacctcagaactggtgtgaagcttagaaggggctgcaggaggctgtgctaaagcctcagtgtattgctatgggactggcaactaaacaagtaaactaaaggggtgaggtacttttccttaagtgaaaaaagtttccttaacttctttaaaatgtaagctctgttttcagcttaactcttgaaatgagaagcgtgaatccgtggtggtttcatgacctgcataatcacactacctgtttttctgtcacagattgccttctctcagcacagcaattttatggacctggtacagttcttcgtgactttcttcaggtaattttgcttatacagactctctctgttcttttgatttaggcactagatccattaatagagtatcagctcctaaaagataaaaagaataatcctgtgtttccaccacagattaaatttacttcatatgtgttcctgaaaagttagatgtcagttacagtaatataaactcaatctagcatgacaaagtgaaaacgtttggtttgtatgttctggcttccagcggggggctttgcatgtatcctgtattaattttgcatgcatcctatagataatttggctcttcatatggggagaatttgggactaaaacaacatttaattaataatggttactgatgtgagctacacatatgcttatgcttgttcaagagatgattctggtgattatccaaagttttaaagctgaaagtgattttttagtgccctgggattttcttttatttccatagtttttttcgtagtctaattttatctttatgaaaatactatagacaaataatt

SEQ ID NO: 724180 - DNA, 1206 bp, Homo sapiens
ttttcctaaattatacacagaataatgcctttttcagccaatgttattttagagttgatgaaatatgttgcatttttatattcttggtatgaagactattaactgtataataaaattatttaagttctgatgacgtagtgtcagatgatgttcagtgtagcaaaacgcgaggcacaattttttgtaaaaaggacaatatcttgcagtcagtacacactgagtacataaatgttgaccaaatgaagagcacagaatggggctgcccacctggaggcagagccatgaattggtactgaggcaaacaaggagagctttgtgtgtgggtggaggcgcagggagggagcgccaggcttcatggaggcatgcgagggtctccagggtcaaacagacagaacctcagaactggtgtgaagcttagaaggggctgcaggaggctgtgctaaagcctcagtgtattgctatgggactggcaactaaacaagtaaactaaaggggtgaggtacttttccttaagtgaaaaaagtttccttaacttctttaaaatgtaagctctgttttcagcttaactcttgaaatgagaagcgtgaatccgtggtggtttcatgacctgcataatcacactacctgtttttctgtcacagattgccttctctcagcacagcaattttatggacctggtacagttcttcgtgactttcttcaggtaattttgcttatacagactctctctgttcttttgatttaggcactagatccattaatagagtatcagctcctaaaagataaaaagaataatcctgtgtttccaccacagattaaatttacttcatatgtgttcctgaaaagttagatgtcagttacagtaatataaactcaatctagcatgacaaagtgaaaacgtttggtttgtatgttctggcttccagcggggggctttgcatgtatcctgtattaattttgcatgcatcctatagataatttggctcttcatatggggagaatttgggactaaaacaacatttaatyaataatggttactgatgtgagctacacatatgcttatgcttgttcaagagatgattctggtgattatccaaagttttaaagctgaaagtgattttttagtgccctgggattttcttttatttccatagtttttttcgtagtctaattttatctttatgaaaatactatagacaaataatt

SEQ ID NO: 724181 - DNA, 1357 bp, Homo sapiens
tgatattaatgaactgctttttttattctagtttccagccaaaaaacataatgagtactatagtcgaaagacttttcaaagttctgagcaggaaaagtaaacaacatagggaaatctctacctactccccagatcccaactccaaactctttggcatggcccttcagaatctgatctgatccaagaccagccaggagagaggcagcgttctagctgtgtgtcccttactctccctggggttcagtttcctcctaataatagggtggttgttaagatgaaagcagagcagcacatgacacatgttccacaggatactagtcaatacttagtagatgtgggcaattcttattacccttctaatgccattctccactactcctaagtaaaagttcttgctcagattaaaaggtatttggtgaaaatgttttccccactctttgtgaatagacttaatccgttagacagtaaccagagtacctaacagagtggtggagtgtacaaggcattgtgctgttacccactcaagacacaggtgcttttattatccccaagatcaagtaaactgcccagggtctcacagtgagatgtggccaagctaagaaccacgcccagtctgtgctgaccttaattacttggctggttgtgcttccagatgccatcatacccacatcagcagctgctatctagaagcatcacattttcctctgtgagatctacagggcctgagtacaatttgccttatttttcagagtcctaatccacggtagaaagcgtggtgtttatagaatactgcagatggcaccaagtctttgatgttttcttcttaaaattgtatagtccttaggtaacgatagtagccatgatttcttgaatgcttactgtgtttgagacatcatatacatatcatcacaaacacccctatgagataggtactgttgttatccccatcatatggacaaggaagctgaaactcagaaaggttaagtagcattyccagagtgacagaagagccaagtagaggacgctgaattcaaacccaggcagatggacgtaaggcctttgcttttcactatacattacacaccttcccccagtctcaacagagccaagtgtcagacactcatgattctgacttcagcatccattctgttaatctctgcactattctgttttatagttttctttgggtgattccaaaggatttatttttaaagcatacctctctccagctgaatgcctttcatttattcaccagcaaaacagggtataaagtgaaaaggtgttgaccaaaaaggctttcacttttttcaactggagtataatatttatcacggcttgtattacgttggatgataaa

SEQ ID NO: 724182 - DNA, 1051 bp, Homo sapiens
attaaaaccctgccatttcagcctgtgtatactccactcaccacctgtatcacaatggccaatcaccctcacggagctgtgcatccgttcctcaagaactatgccacacatcacccagaagattgggcagcttggcagcccactactgactaataccttccatacgactaactaaaacatctcttccacagtaactatggctcctcccagccattctttccaccgcctaccccggaattacaatcaggcctatagcataagctccaagtcaatctctggcatacaattcatggggcaaagacttggtatgaggtctctaaaaaaaatgcaactaactaaaggagatcctttataggtagaatggccttggttgctctgtgatatactttggatatttgtccccacccaaatctcatctagaattataatcctcaatgctggaggtgtggcctggtaggaggtatttggattatggaggtggatccctcatggcttggtgctatctctggaatagtgaggtctcaagagatctggtcatttaaaagtgtgtggcacctcccctctgcacacacactccctctcttgctgctgctttagccaggtgtgcacctgctccccctttgcctttcgccatgaggcctcactagaagccaagcagacgccagcaccatgcttcctgtacagccggtagaagcatgagccaattaaacctcctttcttgataaatgaccgagtctcaggtatttcttcataacaatgcaagaacagcctaatacactataccttttacatctaatctctctggctgtccagaagacttcaggatgtctctctgaggacatggatggctaaaaatggtcaaatgagagtgagagttcatcaactttcattgaggtggacaaacaaaacaacatctctgtttcttgtctatgttgagcttaccagaacccaggacttcccccattggtccccatagacacttctcaaagtggggtaagcagaatgttctgcaaagttgtcattttcagccatcaggcatatgtyataatta

SEQ ID NO: 724183 - DNA, 1110 bp, Homo sapiens
tcattccatgaaaaacctctattatagtttataaaaagaatataggcaaattttgaagacacagcagagaatgtatttgttttttcccagctgccttaagtgacccaccaagaaagccctgggctctagctcttaattaccccagagagtctcctctctatgggtaacagtttcagtaacaactttccctcacgctactagcacaacctactgacatgagagtcccaggagtgttcagttttgtttcataaaatggcctgtattgtcacaaccacatttaattaacttttatttactgtctcaaaggatctttgttacaaagaccggcactggcatgaaggatgcttcaagtgcaccaaatgcaatcactctttggtggaaaagccttttgctgccaaggatgagcgcctgctgtgcacggagtgctattctaaygagtgctcctccaagtgcttccactgcaagaggaccatcatgcctggtagggtctcaagggggctcctgtctctaactgaagctgtgatgcttttcattaagtcccagcacatgaggagtgcagcagctcccaaaaccctggttttgagaaagatatctttcttactctctcaatcttcttccgtgtactttagaaataaaaagattattcattcattatccttgaacaggtaaattacagtgttctgtgtattttcatatagtctaattcatagaaacatttcaaaccagaatcttacccataaaataaagacaaaatgtataccaataacactacattaaacacagtgccctaggcacaatcaatggcatcagaaagagtgattcatcataggcgattggggccaactgccattttgtagcttgacacaaactgttttgaggatcggttattgttattctctcttagggaagacagggttcatgtatatcattccacttttggcaaggactaattctttatattttgatcttctcaatctctatggtcagcagcataagaacataattcattctctgccactcttgctctctcattttcttattatggattcagagaatttctagaaggccataactgcacagtatagtctcagtagttgtgctctgggcatt

SEQ ID NO: 724184 - DNA, 1718 bp, Homo sapiens
ttaccaaattcaggaaatttaacattgatgcaatactttaatctgttgcccatatttcagtttttccaattatcccaataatgtcatttacagcattttttttcagttaagcatccaactgaggatcatttattgaattgagttgtcacttctgtttagagactccttcactctgaaatgtatccttagcttttgttgccttttaagacctttacgtttttagagcatgcaggccaatcatttttgtagagtgaccctcagtttaggtttgtctgatgctcctcacagtagattcatgttttgcacccgtggcaggaatgccccagagtgatgcggtggcctcctcagtcccagatatcaggaggcacatgtggcaggtttgttttattcctggtgacaccagctccaatagtttagttaagatggtggtgtccaccaagtttctctgcagtgggagaattttaagagttgtggtttgtctaaaactgagagatgaatcaaactgggagggtatttagactttgctggatgatggccccaaagctgctctgaaaatgctgtgcagctgggtgagccggcctgctctctgaactgcaaggcgttttcgtgggacaagaaagggcagcatcagcagcctgttctgtggctggggctgcaaaagccatcagtgtcgtcatgtctggcgtggggcatgctggtgcacaaagagccgaaccaagctccacagcaggaactgacaccaagccaggccccaaggaggcctgtgagtgtggccagttccctgctttggtgacgtgatatttatgcaccacggctcttctgaggtttctccaactttcccatataaaatgaagatggcctttcttctgagccagggctgcccaagtggcaggccacaaaccacgcatcgcctgacccaggctggggcagcagcgtctcggagaaaaacaggaaattgggacatacgcgctttccaccgcctggctacgttatgagtttcttagtggttccatgtggcttgagtaacagggtaattttccttaatgcagtaaaatacccaaaggaatgaagatgtattttattggacaacgttttattttagtaaattatttagtgtccagcactgtttgaagtactcttacagattcgctcctgaattcataccacacactttcactgggccaggaaacacgtgaaatgagcagggcaggtcttagggtttcatccgggttttatgatatgctgggcagaccgtgaacattcgacaacaggccgtgctccatcctgtaggggcacacagcctatgtgagataaacagacagctataatcatgatgttgtggaggctgtcagagggaccttggggacccagaaaggggaagggctgataatgggaataggtaatgaagggaagctagcacagagatgatctctracctaagtcttgagggataaaaaggtgttcactagctgggcatgctggctcacacctgtaatcccagcactttgagaggccaaggggggtggatcacctaaggtcaggagttcaagaccaacctggccaacatcgtgaaaccttgtctctactaaaaatacaaaaagttagctgggtgtggtggcatgtgcctctaattccagctactcgggaggcagagacaggagaattgcttgaaccgggaggtggaggttgcagttgagccgagatcacgccactgcact

SEQ ID NO: 724185 - DNA, 2697 bp, Homo sapiens
tttttctattcgtttggttttgggtttttttttttttttttgagacagagtttcgctcttgttgcccaggctggagtacagtggtgcaatctaagcttactgcaacctccgcctcctgggttcaagtgattctcctgcctcagactcccgagtagctgggattacaggcatgtgctaccatacctagctaatttttgtatttttagtagagatggggtctcgccatgttggccagactggtctccaactcctgacctcaggtgatctgcctgcctcggcctcccaaagtgctgggattacaggcgtgagccaccacaccccgcctttttctaattttctagtctaatagccctgcgaagtacataaggaatatggctaaactgacatagcttgtcttgggaaacccaaactggaccctgggcttgaccacgttttggctaagatacaccatcttgcaaagaattccaagagcaatcatctctcaaatggccctggagcccacagcttcatagctggagaagtctactgccttctctgtttttgaagccaaggaccaacattatctaccagctttgtccagccctctttaattctcctgagtgcttgaaggtgatcacaaataatctcacatgcatttaacttataaccatagtgtggcagtgagtcctccagattggaaaagaaaatgcctatagaagatccaggtacgcccttatgaccgccaaattgacttcaggatccagtcccgctttttaatgctggtctcctcttcctgtcttacagcctttaggtgttcagctgatgtaaattaattgctcccattgtcaaggactttagtaggtttgcttttctttttttctttttttttttttttgctgctagtcaaccacattgtgttccaaaagtacctttaaaaaggtattttatggttttatttagctttgttttatttgtaaaatacccttctcctgggctgtaggcttctaggcattattcacacagatccagcacactgtttggggtacacttaagcctctagagcccttacccatatttgcrtgctgcccagctgtgagttcattgcaaaggtgcagactcacctgcttgtgatacctctccctcttagctactgacttatttgtggtgtcagaaccccattttcaagaacttcccattctgtttgatgggaacgagggcactttttatagactccaactcacctttaaactttgtgaaatctctgtttgtaaaccacaaaatttatcagcacaactgagtttcccattcctagcttttgtgaacataaggatgacataagaatttcctcttacaatgcctctcacttccacttccccaatcagttcctccccgtgaatcggaagtaagttgagaatagcagctccacccacagctttctgatccttctgagggctgaatctgcccacaagttaggtcaagtgtgtgtcagaaatggtttttatcacagagacactatgagaatatgtgcggacagctgagtctgccacctgtctttctgcctgatttctgcagcaggaatgaatcactcacttcctgcgttgatggtggctgtggcatcctgtcatcacagtagcccttttattctattcctccattcatctccattatcttctaatatgaaaaccattatgtaggtgcatagatttatttgtccttgacttaacagagacagcttagtactctccaaaagaaaagaaaaaatatgtttcttatgaatggaacatgataaaatatgccatctcttggttgcattctaaccgagtgtcccattccctgtgatcttgctgactcctaggaagttctgcagagctgatcatttcctccaccatcctaggtccatttttgcttgttctgctctgtatgatcattgggatggtccaaccggctacgtcgtctgaggctccctttgctaactggcttcctgctaggcttggtttggctcatgtgaagccctggttgatagggtgggtggaaggaaaggaaaagccagggcatttcaccacgtttaatatactaatgattcaaatttgtgcctcagcaaacatgcagattacctgggatcctcagcagagaataatagctacctctggaaatagtaggctcatgaatgctaagaggctactgaaattgccacctatatgatgggacgctttgggtgagaggttcatggaggttctgattgattgggttcttgaagagtacatgagcattttcctggcagatctactcatgacagacatcccaggaagacagaagagaagatgagcagttatggaaacccaaagttgtatggcgtgcttgcaaattggattaacttattaatttgtaggactttgggggcatgataggagatgaagccaaaaaaagaaaaaaaaatggattgaatccagtatatgaaggaccctctgtaataactatgctttctcccaggggtgagttcacaggagcaacagagagctctagagtgaggagggtgggaagaacaattttgtatatcatctacgttgtatactgggcttctataggctgttgtgtttgatgaaagtgtgccggcttaaaaagttcaaaaatccactgttgtgactataggaaatgtattggtcagggtttttagatgcatactagagaatcgcctctagctggtttaggcagggaggg

SEQ ID NO: 724186 - DNA, 623 bp, Homo sapiens
gcaacctctgcctcccaggttcaagcgatccttgtgcctcaggctcccaagtaactgggactacagatgcccaccaccatgcccagctaattttttaatttttagtagagacagagtttcaccatgttggccaggctggtctcgggctcccaacctcaggtgatcctcctgccttggcctcagagagacttttgcttcagctgtttcctcaaatgccaaggtgccatattttgggagagcatatatccatcaagggatatatttaggaatgttctagcatggacrgcattatcttactttgttactcaatcctctaatgacaaaaaggaatgttcatgttgcctgaatttactcttacgtacacctgtttctttcttaacaccaaaaattagtggcaatctctctcaccttcaagtgcagtccatagaagtctaaagtgtgcaacaagataattattactgagataatctgtattttccccgtgccacagtatagtaatgtgataggactttacaggtgttcctgaaaggcctgtggggttgggactgatgagaactgagagaaacactcacataacccaatgaaagaggagtccaaatacagttcttatacaatcaaacaat

SEQ ID NO: 724187 - DNA, 623 bp, Homo sapiens
gcaacctctgcctcccaggttcaagcgatccttgtgcctcaggctcccaagtaactgggactacagatgcccaccaccatgcccagctaattttttaatttttagtagagacagagtttcaccatgttggccaggctggtctcgggctcccaacctcaggtgatcctcctgccttggcctcagagagacttttgcttcagctgtttcctcaaatgccaaggtgccatattttgggagagcatatatccatcaagggatatatttaggaatgttctagcatggacggcattatcttactttgttactcaatcctctaatgacaaaaaggaatgttcatgttgcctgaatttactcttacgtacacctgtttctttcttaacaccaaaaattagtggcaatctctctcaycttcaagtgcagtccatagaagtctaaagtgtgcaacaagataattattactgagataatctgtattttccccgtgccacagtatagtaatgtgataggactttacaggtgttcctgaaaggcctgtggggttgggactgatgagaactgagagaaacactcacataacccaatgaaagaggagtccaaatacagttcttatacaatcaaacaat

SEQ ID NO: 724188 - DNA, 2146 bp, Homo sapiens
tcaagaaaacattaaatattatcatttttgtagagccaaagtgcaaggtatggcaacaccaatgttttaagttgtagaataaagtaagttaaaactgagtggctagcctttgctagttattctggaaagtcaactaaaaaaaattgaccattaattgtaaactcgcaagcagatgcaataactaactaaggtcagcccacagaatgtagaccatatagaaaactttcacttaacaatgaggacacattccaagaaatgcatcgttaggcagttttgtcactgtgggaacatcatagcatgcacacacacaaacatagatgataatagcctactacatacctagactatatgggatagcctattgctcctaggcttgcatattactctacttaatactgtaggccattgtaacataatgataaatatttgtctatctaagcatagaaaatgtacagtaaaaatatagcattataatcttatgggaccatcagggtatatgtaatctgtgattggatgaaactttgttatgtggcacacgactatatcaaagaaatagtcttaaaagagtgcctatatttttttctgtcatcccatcacaatgataccaaataattaaarataatgtccactttaaagcaataattctaacaactcagtgaacttcatagtcttgcattctttaatagaaatagagatctcagcatttataattaacaagacttggttttctattcactattttggcaaaacaagattcacaataaggctgtacacaagtacttcctagaatttagttttgattggaacataatgggtcagacaattaaaggagaatgaaagtgaaataaatataagcatttctagaaatggatagtgagttaaaagaatagcataatttgaatgaattcaattatgtgtaaaatacagtgtttttcatgctcttatctgatatcatagagtattttttctttagaaactatcaatctcttcctataggcagaactgtgtgggaaacctaaattattattacaaagtcgcttggagacaggtaatcaaataaatgggatgaggttttatttaatatttaatggaagcaggaagatagcctgagctatccttcttagggaagaattggttttataaatggaaccagaatactggaggtcctttgagtattgctccctctgtcctagaagaagcttggaaaagttatgtttggctgcttgatccttctttctagttttgctttgttttgctttcacccatcccacatattctttgtttaggatgagctgcataatttaatcaacatgtaagtgtaatggccatttcgttccttcagttcactttacacgtttatattttggtccagttcatgctcatcttatagtttaaccctctggtcctttaactatgtatttcagtattatcttaggacctttaaatgaagattcctggacccccaagagttatacttttttagtggatcaggagtgactcccaggagaggacttagctgcaggagaccctgggatagataacactttgaaaaacactgctagagagtattttatttattttattttttgaggcagagtctcactctgttgcccagggtggagtgcagtggcatgatattggctcactgcaacctctgcctcccgagttcaagcaattcttctgcctcagcgacccgagtagctgggattacaggagcccatcaccacacctggctaatttttgaattttaatacagacaggggtttcaccatgttggccaggctggtcttgaactcctgacctcaagtgatccacctgcctcggcctcccagagtgctgggattacaggagtgagcccgtgcccggccctagagagtattttaaattaaatttttgactatataatatgtggttcaaaaataataatgccattctcaaagctgcctcatctctcacccctgtggcccactgaggtgcagccaccaaaatgggattagatgtgtatgtctgtaacctgtggaaggagagagaaggaaataggattggatagaagtgtcagactgcagcctagttccaagaaaggtcagctgggctaataatgatggggagtctcttataagagaagcttcctggtttgctgggatgg

SEQ ID NO: 724189 - DNA, 1725 bp, Homo sapiens
gggcttggctgttaaacttcagcacaggtatttctcttaattctacagccacaactgtaggaggcaaacttgatccctaattttttttttttttgagacggagtttctctcctgtcgcccaggctggagtgcaatggcgcgatctctgcccacggcaacctctgcttcctgggttcaagcaattctccagcttcagcctcccgagtagctgggattacaggtgcgccactaccaccacgcctggctaatttttttgtatttttagtagagacggggtttcgccatgttggccaggctgatttcaaactcctgacctcaggtgatccgcctgcctcagcctccccaaagtgctgggattacaggtgtgagccaccgtgcccggcctaaatctttttttagtggaattamagaagttacgaaagattaggtgggtgtcaactatgtgactggggaaaaaaagagtctggttggcattaacctgcaaatagctaatctagaagcttttgtatagatacatgcttctaaaaggtacaaagctataaactcatgcatttgaataaatagtgtggaagcaatatgatgtccagatctattatgcctctgcaacatttttttccctatcaagacagatacatgcagaagcaatacccctttctgcttctttcattgccactagcacaatgtcttgcacttaggttctctaacaactacgtatgttgaataaatgaatagttgaactagatgtgcttaatttggacataatggctatggcatcctagttctgaggcttcagtcatcttggtatatcattcttatttttaatacaatagctcaattctgacacaaaaaggtacaaaaagattattatgccacaattcattaaaacttttcattataaacactacaaagaaaaagggtacagtaggttatttagacaagaaccttatcaatgctatatgtaaactattaaaatatttttttgataaggcagatgtctgctaatataaaaaatttacatatacataaacataaattttgttatttatataaaatatataatacaatgagtgctgttcagctatatatagtagcatcttttattctaatagcatgataaaattctgggataaaacattcaaatggatacttttacatgaagtagaggctttctcaataaaatttaatgaagtttttaaaaatagaatttattatagaaaaaagagatacagtcagggttaatcatcttcaataaaatgtaggcattggcagacctcttgacataatttctgacatgatatttcaaatatcatgaaagaagtcacttcatgaaagtgtaatataactgtgaaataaataaaagtgtatataagtataaaatatcttgaaaggagtaagtcactttaaatatagactctgcctgatgggagtcactgtgattgaaaccctgaaaaacgtaaaaacagctgatggtccatcactcatccctactggcattgcttacctaaactgatcaattgaactagcagctttgcgaacttttccgtacattcctgccagattagtttctgtgtcattaaaaagaacaggaacatttcgcagacgagtgcctgtttaaataagaaaataaattagtgtactgacataaaaattaactaagacaattataattggaaatacactgtattacatgtggaaggaattttcaagggcaactttctaagcatc

SEQ ID NO: 724190 - DNA, 1725 bp, Homo sapiens
gggcttggctgttaaacttcagcacaggtatttctcttaattctacagccacaactgtaggaggcaaacttgatccctaattttttttttttttgagacggagtttctctcctgtcgcccaggctggagtgcaatggcgcgatctctgcccacggcaacctctgcttcctgggttcaagcaattctccagcttcagcctcccgagtagctgggattacaggtgcgccactaccaccacgcctggctaatttttttgtatttttagtagagacggggtttcgccatgttggccaggctgatttcaaactcctgacctcaggtgatccgcctgcctcagcctccccaaagtgctgggattacaggtgtgagccaccgtgcccggcctaaatctttttttagtggaattacagaagttacgaaagattaggtgggtgtcaactatgtgactggggaaaaaaagagtctggttggcattaacctgcaaatagctaatctagaagcttttgtatagatacatgcttctaaaaggtacaaagctataaactcatgcatttgaataaatagtgtggaagcaatatgatgtccagatctattatgcctctgcaacatttttttccctatcaagacagrtacatgcagaagcaatacccctttctgcttctttcattgccactagcacaatgtcttgcacttaggttctctaacaactacgtatgttgaataaatgaatagttgaactagatgtgcttaatttggacataatggctatggcatcctagttctgaggcttcagtcatcttggtatatcattcttatttttaatacaatagctcaattctgacacaaaaaggtacaaaaagattattatgccacaattcattaaaacttttcattataaacactacaaagaaaaagggtacagtaggttatttagacaagaaccttatcaatgctatatgtaaactattaaaatatttttttgataaggcagatgtctgctaatataaaaaatttacatatacataaacataaattttgttatttatataaaatatataatacaatgagtgctgttcagctatatatagtagcatcttttattctaatagcatgataaaattctgggataaaacattcaaatggatacttttacatgaagtagaggctttctcaataaaatttaatgaagtttttaaaaatagaatttattatagaaaaaagagatacagtcagggttaatcatcttcaataaaatgtaggcattggcagacctcttgacataatttctgacatgatatttcaaatatcatgaaagaagtcacttcatgaaagtgtaatataactgtgaaataaataaaagtgtatataagtataaaatatcttgaaaggagtaagtcactttaaatatagactctgcctgatgggagtcactgtgattgaaaccctgaaaaacgtaaaaacagctgatggtccatcactcatccctactggcattgcttacctaaactgatcaattgaactagcagctttgcgaacttttccgtacattcctgccagattagtttctgtgtcattaaaaagaacaggaacatttcgcagacgagtgcctgtttaaataagaaaataaattagtgtactgacataaaaattaactaagacaattataattggaaatacactgtattacatgtggaaggaattttcaagggcaactttctaagcatc

SEQ ID NO: 724191 - DNA, 1225 bp, Homo sapiens
ttacattatactgtattacataaatattttatttctattattcgctctcatgtttttgcttctttccaccccatctcacmcacacacctacttaggacaatttcttccaaacgctttcctgctaaagggcactgcttgctacttagcaggcatttaataaatattctttcagtgaatgattttttttttttgagacagggccttgctctgttgcccagggtggagtgcagtggcacaatcattgctcactgcagcctcaaaatccttggtccaagcaatcctcccacctcagcctcccaaatagctaagactagaggcgcacaccaccatgcctacctaatttttgttttattctttttgtagagacagggtcttgctatgttgcccagactagtctcaaactcctgagatcaagcaatcctcccactttggcctcccaaagtgctgagattgcaggtgtgagccactgtacccagccgtgtgaatgattttaagagaatcccctagactctataattccttctaaaaaattcccaaaaaagggccaagcattgtgggtcatgcctgtaatcccagcactttgggaggctgagttgggcagatcacttgaagtcaggaatttgagaccagcgtggccaacatggcaaaaccccatctctactaaaaatacaaaaattagcctggcgtggtggcgcatacctgtagtcccagctactcggaaggctgaggcaagggaattgcttgaacccaggaggcagaggttacagagagccaagatcgcaccactgtactccagactgggcgacagagcaagactccctcttaaataaataaattaatttaattaaatataaatataaatataaatttaaaaattcccaaaaagactttcatgaaagctatcatggaactgtgttacccaactacatgaccaaaaagacctaaagaatctaagcaactttaatttctggttttacagatgaagaaatggaaacccagaggcgttaactgacttatccaaaatcacacagatggttaacgacagaaccagaattagaatccaggtcttcgaacctctttacttttgtgtactattggtggtattggatttttggttttgttcttgctttgatttaattactttttgcattaatttgggggggtagtttatttctgattttaaaaatagtataggctcaccaaagaagatttggaaagtaaaaaa

SEQ ID NO: 724192 - DNA, 1225 bp, Homo sapiens
ttacattatactgtattacataaatattttatttctattattcgctctcatgtttttgcttctttccaccccatctcacccacacacctacttaggacaatttcttccaaacgctttcctgctaaagggcactgcttgctacttagcaggcatttaataaatattctttcagtgaatgattttttttttttgagacagggccttgctctgttgcccagggtggagtgcagtggcacaatcattgctcactgcagcctcaaaatccttggtccaagcaatcctcccamctcagcctcccaaatagctaagactagaggcgcacaccaccatgcctacctaatttttgttttattctttttgtagagacagggtcttgctatgttgcccagactagtctcaaactcctgagatcaagcaatcctcccactttggcctcccaaagtgctgagattgcaggtgtgagccactgtacccagccgtgtgaatgattttaagagaatcccctagactctataattccttctaaaaaattcccaaaaaagggccaagcattgtgggtcatgcctgtaatcccagcactttgggaggctgagttgggcagatcacttgaagtcaggaatttgagaccagcgtggccaacatggcaaaaccccatctctactaaaaatacaaaaattagcctggcgtggtggcgcatacctgtagtcccagctactcggaaggctgaggcaagggaattgcttgaacccaggaggcagaggttacagagagccaagatcgcaccactgtactccagactgggcgacagagcaagactccctcttaaataaataaattaatttaattaaatataaatataaatataaatttaaaaattcccaaaaagactttcatgaaagctatcatggaactgtgttacccaactacatgaccaaaaagacctaaagaatctaagcaactttaatttctggttttacagatgaagaaatggaaacccagaggcgttaactgacttatccaaaatcacacagatggttaacgacagaaccagaattagaatccaggtcttcgaacctctttacttttgtgtactattggtggtattggatttttggttttgttcttgctttgatttaattactttttgcattaatttgggggggtagtttatttctgattttaaaaatagtataggctcaccaaagaagatttggaaagtaaaaaa

SEQ ID NO: 724193 - DNA, 1225 bp, Homo sapiens
ttacattatactgtattacataaatattttatttctattattcgctctcatgtttttgcttctttccaccccatctcacccacacacctacttaggacaatttcttccaaacgctttcctgctaaagggcactgcttgctacttagcaggcatttaataaatattctttcagtgaatgattttttttttttgagacagggccttgctctgttgcccagggtggagtgcagtggcacaatcattgctcactgcagcctcaaaatccttggtccaagcaatcctcccacctcagcctcccaaatagctaagactagaggcgcacaccaccatgcctacctaatttttgttttattctttttgtagagacagggtcttgctatgttgcccagactagtctcaaactcstgagatcaagcaatcctcccactttggcctcccaaagtgctgagattgcaggtgtgagccactgtacccagccgtgtgaatgattttaagagaatcccctagactctataattccttctaaaaaattcccaaaaaagggccaagcattgtgggtcatgcctgtaatcccagcactttgggaggctgagttgggcagatcacttgaagtcaggaatttgagaccagcgtggccaacatggcaaaaccccatctctactaaaaatacaaaaattagcctggcgtggtggcgcatacctgtagtcccagctactcggaaggctgaggcaagggaattgcttgaacccaggaggcagaggttacagagagccaagatcgcaccactgtactccagactgggcgacagagcaagactccctcttaaataaataaattaatttaattaaatataaatataaatataaatttaaaaattcccaaaaagactttcatgaaagctatcatggaactgtgttacccaactacatgaccaaaaagacctaaagaatctaagcaactttaatttctggttttacagatgaagaaatggaaacccagaggcgttaactgacttatccaaaatcacacagatggttaacgacagaaccagaattagaatccaggtcttcgaacctctttacttttgtgtactattggtggtattggatttttggttttgttcttgctttgatttaattactttttgcattaatttgggggggtagtttatttctgattttaaaaatagtataggctcaccaaagaagatttggaaagtaaaaaa

SEQ ID NO: 724194 - DNA, 1225 bp, Homo sapiens
ttacattatactgtattacataaatattttatttctattattcgctctcatgtttttgcttctttccaccccatctcacccacacacctacttaggacaatttcttccaaacgctttcctgctaaagggcactgcttgctacttagcaggcatttaataaatattctttcagtgaatgattttttttttttgagacagggccttgctctgttgcccagggtggagtgcagtggcacaatcattgctcactgcagcctcaaaatccttggtccaagcaatcctcccacctcagcctcccaaatagctaagactagaggcgcacaccaccatgcctacctaatttttgttttattctttttgtagagacagggtcttgctatgttgcccagactagtctcaaactcctgagatcaagcaatcctcccactttggcctcccaaagtgctgagattgcaggtgtgagccactgtacccagccgtgtgaatgattttaagagaatcccctagactctataattccttctaaaaaattcccaaaaaagggccaagcattgtgggtcatgcctgtaatcccagcactttgggaggctgagttgggcagatcacttgaagtcaggaatttgagaccagcgtggccaacatggcaaaaccccatctctactaaaaatacaaaaattagcctggcgtggtggcgcatacctgtagtcccagctactcggaaggctgaggcaagggaattgcttgaacccaggaggcagaggttacagagagccaagatcgcaccactgtactccagactgggcgacagagcaagactccmtcttaaataaataaattaatttaattaaatataaatataaatataaatttaaaaattcccaaaaagactttcatgaaagctatcatggaactgtgttacccaactacatgaccaaaaagacctaaagaatctaagcaactttaatttctggttttacagatgaagaaatggaaacccagaggcgttaactgacttatccaaaatcacacagatggttaacgacagaaccagaattagaatccaggtcttcgaacctctttacttttgtgtactattggtggtattggatttttggttttgttcttgctttgatttaattactttttgcattaatttgggggggtagtttatttctgattttaaaaatagtataggctcaccaaagaagatttggaaagtaaaaaa

SEQ ID NO: 724195 - DNA, 1269 bp, Homo sapiens
tacaatggaaaaacaactgttaatataactatgcagaaatacgtttttgatttcattttagtctacatacttctgagcttttaaaaatgagtatatatatataaatgttatgtgtacatttttataaacaataacacattttagattctgttttatacatgaattttcactgagctgtgtctataccttttttgtctttacacagctaaatcataattttaatggctgtgcaataacctcattctatgatgtatcaccgtttatttaccaaatcacctgtgttgaacagtaggtcattttaatttttttgttattgtttacatttcctcagttgaccttacagaagacatattttgacacttgttcaatttctgcagaataaatggtaaggcttttgaaacagaatgccagatttcccttggaaagcttgtactagctgacagtcctgccagtagcacaggaagcctgcttccacacactccatgtcctcactgcccctggattttccagccagagtgtctttgactgcagctaatgagaaccacgaggtggtatgggttcaacattgacagtttggtttcaaatcttgattctgttacccactagctgtgtgacatggcaacttttctgggctttcatttcctcatccatattctaaggattaaatgagatgatagacataatgcatttagaattatccctggcacatatgaaacagtaaacaaacattagctgttttatttcttacataattaaaatgatatagtgatacattggtttgatgttgtcatattgctagtttgtatattgtttcttaattcagtccgaagcaaagatttttctgtttgattctaatcttaaaaataatactaaatcagttcatcttctaaattttgcaacagctccaaataatactattctgacctcagatatgaaatgtaacattaccttgcagtgactaatcttgcatactgtaggatgaacttctgagattaaacatctccaggaaagctcattaatttgggaaaagaagagcaggtgaggagaatttgcttttaaaaagttttaatagccataataataatttatttacagaatsaagtacaaactctaagacttcataactctaaatacattgcaatgcattttcgaataacgcaatgtggctgacaatggctgaggcgacgggcagactaatcaagtgcagaaattggtgattgttttcatagcacatgccagactgcatctccagctggaaattccataaaa

SEQ ID NO: 724196 - DNA, 1319 bp, Homo sapiens
attaaaaagaaaattgctgagctttctttgccaagtgttcatgccatttcccccctttcttgagctttctcagggtattctaagtgcctatgatttggtttctttttggagtaactcaagcagtctttcacaagccgtatttctgggactatggcagaccgacttcattggcttcttaacgaagaacagcctggcttaatgattaatttctaggtaaatggggctgaaccaagcctcacaggacctgtcttggaggggctggctaaacagtggctccctgagaggacaagcacatttcttcctgtaatcgacaactatagatttatttttcttagtgatgttaagcatcagaaggtacttcttttacttgcactaagcaggatagttttaattttgcctttaggccttatctattactgtttcccctggcaacgttatctataaacttttctctcttcatttttttwaatttccaagtagttcatgattatttcagaaaaattagaaaatacagaagataacaaaaattaaattaaaagcagctaaaaatcttgtcatttactagcatcctgagacattattcctaacctttcctccttcagatatgtgcatatagaacatgtatttacaaaattagaaacacaccgtgtgtgtgtgtgtgtattgatctgttgtgctaatgtcttatatttctttgatacaattatgtggtcttagcaagactggtataaagccatttcaaattatgaaacaataaaaatgatacgaattttctaagcaactcagggctccatataaaatacacataaagacatttaccagcctttatttcctatttggtaccctgcctatgtttcacagactataaaatgaaaattaatattctacactactgtccttctataaatagctatggccatgtggttagctgctgcccagcatggtggggggattagaaccaccatctaaacaaaggcctgccttgcactgatgtgcttgttgaaaagtacgccagcagagggcagtgtacttccaggacacaactcaacgctgccatgggctgtggaacaatcggtggaaagacttttaacactgctctaaatacaaaccaacacacaattttactagaatattattagtctgtttgtgacatgttttaagaatttgaagttctgacactagattatggaaactatatagcaaaagtgaaaatgtattcatttaataagcttatattggccacctacaaatgccatgctgtagtaatataaatattgaagacaaaaatccttgccacagatcagcaggagataaaagca

SEQ ID NO: 724197 - DNA, 1319 bp, Homo sapiens
attaaaaagaaaattgctgagctttctttgccaagtgttcatgccatttcccccctttcttgagctttctcagggtattctaagtgcctatgatttggtttctttttggagtaactcaagcagtctttcacaagccgtatttctgggactatggcagaccgacttcattggcttcttaacgaagaacagcctggcttaatgattaatttctaggtaaatggggctgaaccaagcctcacaggacctgtcttggaggggctggctaaacagtggctccctgagaggacaagcacatttcttcctgtaatcgacaactatagatttatttttcttagtgatgttaagcatcagaaggtacttcttttacttgcactaagcaggatagttttaattttgcctttaggccttatctattactgtttcccctggcaacgttatctataaacttttctctcttcattttttttaatttccaagtagttcatgattatttcagaaaaattagaaaatacagaagataacaaaaattaaattaaaagcagctaaaaatcttgtcatttactagcatcctgagacattattcctaacctttcctccttcagatatgtgcatatagaacatgtatttacaaaattagaaacacaccgtgtgtgtgtgtgtgtattgatctgttgtgctaatgtcttatatttctttgatacaattatgtggtcttagcaagactggtataaagccatttcaaattatgaaacaataaaaatgatacgaattttctaagcaactcagggctccatataaaatacacataaagacatttaccagcctttatttcctatttggtaccctgcctatgtttcacagactataaaatgaaaattaatattctacactactgtccttctataaatagctatggccatgtggttagctgctgcccagcatggtggggggattagaaccaccatctaaacaaaggcctgccttgyactgatgtgcttgttgaaaagtacgccagcagagggcagtgtacttccaggacacaactcaacgctgccatgggctgtggaacaatcggtggaaagacttttaacactgctctaaatacaaaccaacacacaattttactagaatattattagtctgtttgtgacatgttttaagaatttgaagttctgacactagattatggaaactatatagcaaaagtgaaaatgtattcatttaataagcttatattggccacctacaaatgccatgctgtagtaatataaatattgaagacaaaaatccttgccacagatcagcaggagataaaagca

SEQ ID NO: 724198 - DNA, 638 bp, Homo sapiens
tttaaaagtatcaagtcaaatcatgtcactcccttgttcaaagtctccaatagttctcatcatacttggagaaaatcttgtgcccttactgtggtttccagagccatgcatgaactggcccctggtcagccctctgaccccgttccctgtgtctcctccatgttctgtgctcttttttattattctacaagtgtatcaagcaggcttctgtcttggtgctttttcacttgttcttccctaagcatttgtgtgactcataccttctctgtattcacatctctgctcaaaatggcatctcctcagacagaccttcctgatatcctcttcaaaatagttcctggactctaccacccacagcattaatctggatttgtttatatctgtctcttctactagaatgtgcacccctggaaggcaggatatttttaccttccaggggtgcatagtctagtacgagagacagattgcctattttgcccattttgtttgcctattttgtttgctctcagctgtccctggaccatactaataagaataaaacagatatttgctgactgaatacagtcrataatgtgtattgatgatagtgatactgagttggaagattgaaggaatgacaataagaaaactttatatcc

SEQ ID NO: 724199 - DNA, 587 bp, Homo sapiens
tggactgggagctgcgtgggaggaagtgagcaagatgagtatgcagaggaagcaggtttaggagaaaggatgaagattttcagagacagagatctctgtagctcctgaagataaagagaatggcttagctcctggtggctttctggttctcaggtccaatctttcacagggactgattgcatatcctgtccatgagatttctctttaacatttcaggaaattggagctagcttgaatagctttctgctccttctcatcccccaccccgccgcccttttttttccatcaaaggaaccgtgactagaaagaggcaccacaggctgataatarttctcaccctccattctttatactcttcccagggtcctgccccttctcttctcctagggctgtcacagcaaaacgtgactactaaattcctaatgtggagaatcaagaatcaattgctcgaatgctgtcaaaaatgacattcaagtttgagtgacaatgatgtctctggtcctgtccctatccacttctctatttttagttctgttcctactatctgaaattacaatgcctggtgcttaagcaattgccaggagtta

SEQ ID NO: 724200 - DNA, 608 bp, Homo sapiens
ggtgaggcgggaggattgcttgagcccaggagtttgagaccagcctggtcaacttagcgagaccttgcttctactaaaaataaaaaaaagtagccagacgtggtggcgcacacctgtgatcccagctactcaggaggctgaggtgggagaactgcttgagcctgagaggttgagactgcagtgagctatgatcataccactgcactttggcctgggaaaccgagcaagactgtctcaaacagcaacaacaacaacaacaaaaaaacacaaattaaaagactttccttcttcaaacaaaatgtccacatttcttaaagataatcctaatttttagtaaacagagcatgcttatctaatacaactaccacagaggctgacatctcagaaacaaggctgagcagaggaagaagttacaggcagtgtgctgccgttyatggaagtctcgaagaaagatcacacaaagctgtgtgtgtgtgtacacaagtgtgtatagtgtgcacacacgcatatatatacaacacacacacataaacacagcaagcggataaaagtgttaagtagataccacccaattaatgagaggtgttaaccccaggaagggagaggac

SEQ ID NO: 724201 - DNA, 1274 bp, Homo sapiens
caaaaagccatgccagataaatttgcacagcatcaatgagaaccactagcttattacattactagagaataaagagtattatgaaaytggtctttagaaatgtgtaagttaagaaaaacacattcaaatgcttatctgtcaagtgtagttttgctttcttaaaatgattactgtgaccatcctacaaagcagcagtccctaacctttttggtttcatgaaagacaatttttccaccaactggggtgggagtgggggagcacagtttcaggatgaaattgttccacctcacagttaaccaaagggttcatgctcctaggagaatataatgctgctgctgatctgataggaggtagagctcaggcagtaataatgcctgcttgccagcagcttacctcctgctgtgcagcctggttcctaacaggctatggaccggtccgcggccaaggggttgaggacccctgctataacagatttgtagctgctgagaggtaagatgtagcttgactcaaatctctcacaggcttttagtacttttttttttttttaaatctctccaaatattatcatctcaagccaaaatactaggtaatgcatattcaattttctcaaacaattaaaatgaaaattctaattaaaaatacagaacctaccactctaataaattcaaacatctctattatggcagagttcatcagattgtagcgggatccattgttgagaaatgctttcactactggttcaaacaaaaaacttttcattatgtagcggttgtaaaactcatcttttaatccaataatctttcttttaaaacgaagggcacctgaaacacagaggcatggttgtttaaatcacataccactcttccatactttagacttaccaaacaaaaataaccatcaaaccaaaaaaaactgtttaacacatatcaataattatttatgatgtttgcacttccggaactgtgaacctaaagataaggattatgaaaatgttatcagaaaaatgtcttctaaaagtagtatatgtcatcatagaacacaagtcttagaaagccagaaaaatcctgaaaataaaccagttactaatgaccaaaatgtaatttacatctaaaataagagctaagacaaatgaatgaacctatcacactacttaagatgaaaaaattcaacatgaccttttatatccaccttaatagaaaaaaccagtgttttattagggcaatccactgtataatttgatcttcaatatttttggacactcttattattttgca

SEQ ID NO: 724202 - DNA, 1274 bp, Homo sapiens
caaaaagccatgccagataaatttgcacagcatcaatgagaaccactagcttattacattactagagaataaagagtattatgaaattggtctttagaaatgtgtaagttaagaaaaacacattcaaatgcttatctgtcaagtgtagttttgctttcttaaaatgattactgtgaccatcctacaaagcagcagtmcctaacctttttggtttcatgaaagacaatttttccaccaactggggtgggagtgggggagcacagtttcaggatgaaattgttccacctcacagttaaccaaagggttcatgctcctaggagaatataatgctgctgctgatctgataggaggtagagctcaggcagtaataatgcctgcttgccagcagcttacctcctgctgtgcagcctggttcctaacaggctatggaccggtccgcggccaaggggttgaggacccctgctataacagatttgtagctgctgagaggtaagatgtagcttgactcaaatctctcacaggcttttagtacttttttttttttttaaatctctccaaatattatcatctcaagccaaaatactaggtaatgcatattcaattttctcaaacaattaaaatgaaaattctaattaaaaatacagaacctaccactctaataaattcaaacatctctattatggcagagttcatcagattgtagcgggatccattgttgagaaatgctttcactactggttcaaacaaaaaacttttcattatgtagcggttgtaaaactcatcttttaatccaataatctttcttttaaaacgaagggcacctgaaacacagaggcatggttgtttaaatcacataccactcttccatactttagacttaccaaacaaaaataaccatcaaaccaaaaaaaactgtttaacacatatcaataattatttatgatgtttgcacttccggaactgtgaacctaaagataaggattatgaaaatgttatcagaaaaatgtcttctaaaagtagtatatgtcatcatagaacacaagtcttagaaagccagaaaaatcctgaaaataaaccagttactaatgaccaaaatgtaatttacatctaaaataagagctaagacaaatgaatgaacctatcacactacttaagatgaaaaaattcaacatgaccttttatatccaccttaatagaaaaaaccagtgttttattagggcaatccactgtataatttgatcttcaatatttttggacactcttattattttgca

SEQ ID NO: 724203 - DNA, 1274 bp, Homo sapiens
caaaaagccatgccagataaatttgcacagcatcaatgagaaccactagcttattacattactagagaataaagagtattatgaaattggtctttagaaatgtgtaagttaagaaaaacacattcaaatgcttatctgtcaagtgtagttttgctttcttaaaatgattactgtgaccatcctacaaagcagcagtccctaacctttttggtttcatgaaagacaatttttccaccaactggggtgggagtgggggagcacagtttcaggatgaaattgttccacctcacagttaaccaaagggttcatgctcctaggagaatataatgctgctgctgatctgataggaggtagagctcaggcagtaataatgcctgcttgccagcagcttacctcctgctgtgcagcctggttcctaacaggctatggacyggtccgcggccaaggggttgaggacccctgctataacagatttgtagctgctgagaggtaagatgtagcttgactcaaatctctcacaggcttttagtacttttttttttttttaaatctctccaaatattatcatctcaagccaaaatactaggtaatgcatattcaattttctcaaacaattaaaatgaaaattctaattaaaaatacagaacctaccactctaataaattcaaacatctctattatggcagagttcatcagattgtagcgggatccattgttgagaaatgctttcactactggttcaaacaaaaaacttttcattatgtagcggttgtaaaactcatcttttaatccaataatctttcttttaaaacgaagggcacctgaaacacagaggcatggttgtttaaatcacataccactcttccatactttagacttaccaaacaaaaataaccatcaaaccaaaaaaaactgtttaacacatatcaataattatttatgatgtttgcacttccggaactgtgaacctaaagataaggattatgaaaatgttatcagaaaaatgtcttctaaaagtagtatatgtcatcatagaacacaagtcttagaaagccagaaaaatcctgaaaataaaccagttactaatgaccaaaatgtaatttacatctaaaataagagctaagacaaatgaatgaacctatcacactacttaagatgaaaaaattcaacatgaccttttatatccaccttaatagaaaaaaccagtgttttattagggcaatccactgtataatttgatcttcaatatttttggacactcttattattttgca

SEQ ID NO: 724204 - DNA, 1274 bp, Homo sapiens
caaaaagccatgccagataaatttgcacagcatcaatgagaaccactagcttattacattactagagaataaagagtattatgaaattggtctttagaaatgtgtaagttaagaaaaacacattcaaatgcttatctgtcaagtgtagttttgctttcttaaaatgattactgtgaccatcctacaaagcagcagtccctaacctttttggtttcatgaaagacaatttttccaccaactggggtgggagtgggggagcacagtttcaggatgaaattgttccacctcacagttaaccaaagggttcatgctcctaggagaatataatgctgctgctgatctgataggaggtagagctcaggcagtaataatgcctgcttgccagcagcttacctcctgctgtgcagcctggttcctaacaggctatggaccggtccgcggccaaggggttgaggacccctgctataacagatttgtagctgctgagaggtaagatgtagcttgamtcaaatctctcacaggcttttagtacttttttttttttttaaatctctccaaatattatcatctcaagccaaaatactaggtaatgcatattcaattttctcaaacaattaaaatgaaaattctaattaaaaatacagaacctaccactctaataaattcaaacatctctattatggcagagttcatcagattgtagcgggatccattgttgagaaatgctttcactactggttcaaacaaaaaacttttcattatgtagcggttgtaaaactcatcttttaatccaataatctttcttttaaaacgaagggcacctgaaacacagaggcatggttgtttaaatcacataccactcttccatactttagacttaccaaacaaaaataaccatcaaaccaaaaaaaactgtttaacacatatcaataattatttatgatgtttgcacttccggaactgtgaacctaaagataaggattatgaaaatgttatcagaaaaatgtcttctaaaagtagtatatgtcatcatagaacacaagtcttagaaagccagaaaaatcctgaaaataaaccagttactaatgaccaaaatgtaatttacatctaaaataagagctaagacaaatgaatgaacctatcacactacttaagatgaaaaaattcaacatgaccttttatatccaccttaatagaaaaaaccagtgttttattagggcaatccactgtataatttgatcttcaatatttttggacactcttattattttgca

SEQ ID NO: 724205 - DNA, 1019 bp, Homo sapiens
tttccacatgaatgaaacacatgctaaattatttatagataattacatggctgtcctcttactaaaatattaagacacagttgtcccacaggaaacattgcaactgacacagggacatcacaaaatgaatagctgaggaagtaatgaagagaagttataagaaaagcccacaaaactagagatatgtttattaaaattaatttattttttagaatactacaggtacttttaaaaactgttttcatcctctaacctttctctttcaagaaaaatggctcgtcagctttttaaattagctttatgtaaaaatttctattagaaattagacaagaaatatattttgattaaatttataagcagtattctactcctcaatgatcatgactatagaaaagaggggcaccatgatctgtagtataactgaagtaagccagctttttatttaattataacatgattaatatctaaataaagtgcttcaggtcacactagttgacacaggagctgagtattttcacctaagactaatcacaaatgagaattttcggtactgctctcttcaggcactgtgggcacaaattaagcaaacttttgcacwgttaatctgcagttgccaattcacttgatgacattttggctaaagaaattgcccattaagtcacacatgtgacctaagtaacatcctcctctcaaatattaagttactatgggccaaataaaatgtatttaattacatgtgttcaacctattctttttatcctctactgccgactaataaaaatcattctggcttttgtctctgcacttcactccatgcctccatcatttaggaaaagttctgggccaaccagtctagttaaggagtttgtgtgatctagaatcaatagaatggagaaagatagatatcaatagatagagatacacaatggatatctctctatcaatagatagagatacacaatcatctaaactgggatatagaatattttttcatagatatggagagaaatgtgtcccca

SEQ ID NO: 724206 - DNA, 1380 bp, Homo sapiens
tcaaaggcataagaaatttataaggttttcccaaattttaaaccaagaggaaaagaataataagtttcaggagaggaattgaagggacaatgaaaatccagttaaagtcattcatttcttcactaccaagtccggcacattgaataaatcagtttcataggtttttacaaaatttaagaagatccctggtctccagtaatttgtgcttttcaaccaacaaaagctcttaaaaaacaataagagcttatctattttgcacacaagggagaagacatatttcaacaacaataactgcaacaataacaaaaggtcttgatgcattagcataaagtcaaaatttaaaatactaaaaatataactgtctgcgcttcaggactaaaatgtaaaccataaaaaccctttcatttattcttgaatgatttttcttttgtcaataccttttcatcttctttttccacatcttttaaaattattgttcatgttttcttggtttaaattatctaaatatagataaaggctatatttctctaataaggtgagagataggttaataacattacatgaatcatccttcaatatgatagcaagaaagagtaaataagttggcaaagtagctatgatacaaaccaattagaaacactkgccatgttttattaaatctgaaatcaaactgaagttgttaaaacaaagtatagtatagaatattttaataaaatacaaagtatatagtactaacatataaattgctaataagaaaattaaagttagttaatgaaaacactacctcagagctacattatatactatatgcgcaaaagtaataaaatcatggaaattttaatattcaagaatgtgttagaatgaacatttaaagaaacactgaagaaacattaagtttcttgaatatggttttgaagatatgaaaggtttgttgtattataaataaacatataagtgcacaggccacagttgagtaaaattgctgaggcaatataaaaatcgagaattccacaagcaaacataaaaaaaagtgttaaagattaaatgtgcattacaagaattccataagcaaacacaatacagcacaacaaatgtaataattatgtttccttataccaagaagtaacttatacctttatagcactttctaccagtattgaccatgttacttaataaggttaaagttttcttgattttctggagaagccacatttacaaagttactccagtgatttttaacatatgaattctctgtacaatgctaaaaagtggttatcaaatcttgcacatagttattcttttctacatgagccaagaaacatcattattacttcttaactaagatttatatgcctcaaactcctactctgttatagaaac

SEQ ID NO: 724207 - DNA, 642 bp, Homo sapiens
tgactgaattcaagaaagaagggtaaaagagaagtaagtagtggtcttatcattaaatgccacagagaggtaaagataaaaacaacatattgttttgggtttagtaatttaagggttaccaaattccgttttggaggaggaacagattccatgtccactagaatggaatgaacaagaaatggaggaggaaaataggtagtttttcaaaagttttcaaaaatatgaaaagaagaaatgaaatggtacttggaagagattgttgaaatgggagagactatggtggcttgtttagaagcagttgagatagatccaattgagatagagatattgastatataaacaaaagaatgacaaattaatagtgtaatggataacttgactttggcaaatattgtgaatttttgtgaaagtacaactaaaaggcaatgtcactccaataatcaccagagtaatcaatttgcttattgctgtccctttaaatatagttctctggtatcaactaacatgtttttaactaatgatgcttcttaaagaaaagggaaaagacctttttctttctttcagtcttcaatgattcactgcttcatctcgctccaccaaagataaatgaaatctacatctcttatacattaacaatgcatg

SEQ ID NO: 724208 - DNA, 669 bp, Homo sapiens
aaattattatattattcctttatatttttattaaaggaatttattattattattattaaaggaaattagccttatctcttattatattttttatgaccttcaaagtagtgtctctgcttaaaagtgtaccttggccgggcgtagtggctcacacctgtaattccagcactttgggaggccgaggcaggtggatcacgaggtcaggagatcgagaccatcctggctaacacggtgaaaccccgtctgtactaaaaatacaaaaaattagcagggcatagtggcgggcgcctgtagtcccagctactcgggaggctgaggcaggagaatggcgtgaacccaggagacggagcttgcggtgagctgagatcgcaccgctgcactccagcctcggcgacagagcaagactccgtctcaaaaaaaaaaaaaaaaatgtgtaccctgaagcwcacatcaagcgacatgtagagttcataaattctggccaaatggtcatacctcaaacctaatcagcactaaggctctttacttgcactgacaaatatgaatgctggggaatttggaaatgatatataatatataatattatatatataatagatatataatatataatattatatatataatagatatataatatataatatatataaaatagatatataatat

SEQ ID NO: 724209 - DNA, 622 bp, Homo sapiens
cgttgaagtgagtcaggaatgtatgattttggacaattgacacaatgcctgaggcatagtttcttcatatggaaattggagacaatgatcatatctaccttagcagattatataatgaattattttcctagggctcctgtaataaagtaccacaaactgggtaacttaagcaacagaaatttattgcctcacaattctagaggtgagaagtccagatcaagaagctggcagggctgggctgcctgaaaagatgctaaagaatgaactgttccagtcctctttctctccttccagtagttccttggcttgtgacagcacagtgtcaattctcatatggcatcctccccgtgtgcctgtctctatgtccaaatctcccttttatttaaggacagagtcacagtggattagaacacccctataacatgaagattgcaygaaattatgtacataaataattcaacaacatagcttccaaatagaaaacactcagcctttgtcatctcatcattatttgtttacacatttgtattattggtatagctctagtcttttgaaaggtgcagttactcatctttgtgttttccactcctttatagctaagtgtaaggtgcttttgcaaaat

SEQ ID NO: 724210 - DNA, 1466 bp, Homo sapiens
tgtgtgtgtgtgtgtgtgtgtgtgtstgtctgtctgtctgtcttttaatggaaaagaagtaaagcaaaagcattggtatagtaagcagcacatagtaagaatgcctatttatgaataagtgtattgggtcacaaagtaagatttattcctataaataagaattctcctggttgtgtttcaacattttggaaagccactacactaatgagtaacaagaatctcccaggaaacattagttgtctgcatttccccaacctacttgtcagagcacctgacatacatctgggaaatagttcaaagtaactttcctggaaattggagtctctctgagaactctgcctaatttcaaaatgttcttgctaataggcatatccaggcagaccaaaaaatgaccttctaaaccatttagaatgtcctggagacttagaataccataaaaaatgggactttcagcactccccacaaaagaggattgcttttctttcatgataatggttgcaacatctcctttttctgtcttcaaccttttcaacaaccccttacctttcatccccccaacttaacacgccatcaaaactaggcagaaaaatgaacacattccttccaatcagttcatccataaaatgaaaattaccttgaaaagaggccaaagagaagtgctttgatatttagttgtggattaggcatgatcccagcatttagatatatacggtctaatctctgaaacctgcaactaaaccaccaaacaagattgtgagttgcaagtaaaaacatcaggacaagattgtgtattctatctctagagtgactagattcaaggaggcctaagaaagacaaaaaatactttttaaattaataaattagccacagcaagctcagaagaatttatagcacattagagttacagcatttctttctcaacagtttttctttagctacagtaaacatttgagaattctttctttggtagtggcttcaaacagaatctgtggagtcatcgtggactttaagtaaaacctctgatcaataattccttccagctctgtcctctcaataaggaattgcagcaaccctctaactcttaaacccactctcctcatcttacaaagtctcttgcttttaaaaaaaaaaatccacatctcctctggttgacaagtaaaatttatatactattgatattcacctgacctgatctattaatgctgaaatctgaatgccaaaatatataataaaacagaagatccatgtggaaacctttcagtgttcatggacaagtcctatgcatcctaaaatgatgaaagttcgtaagaatacaatgagattataaaagatgaatgggggtaaggtaatcttgttgggctcccccctgaatacttgtcatggaagggatatgaaatgctgagttgaaaaagcattttcagttttaaacctatgtaagtcttcatctaagactcttcatctaagac

SEQ ID NO: 724211 - DNA, 1466 bp, Homo sapiens
tgtgtgtgtgtgtgtgtgtgtgtgtctgtstgtctgtctgtcttttaatggaaaagaagtaaagcaaaagcattggtatagtaagcagcacatagtaagaatgcctatttatgaataagtgtattgggtcacaaagtaagatttattcctataaataagaattctcctggttgtgtttcaacattttggaaagccactacactaatgagtaacaagaatctcccaggaaacattagttgtctgcatttccccaacctacttgtcagagcacctgacatacatctgggaaatagttcaaagtaactttcctggaaattggagtctctctgagaactctgcctaatttcaaaatgttcttgctaataggcatatccaggcagaccaaaaaatgaccttctaaaccatttagaatgtcctggagacttagaataccataaaaaatgggactttcagcactccccacaaaagaggattgcttttctttcatgataatggttgcaacatctcctttttctgtcttcaaccttttcaacaaccccttacctttcatccccccaacttaacacgccatcaaaactaggcagaaaaatgaacacattccttccaatcagttcatccataaaatgaaaattaccttgaaaagaggccaaagagaagtgctttgatatttagttgtggattaggcatgatcccagcatttagatatatacggtctaatctctgaaacctgcaactaaaccaccaaacaagattgtgagttgcaagtaaaaacatcaggacaagattgtgtattctatctctagagtgactagattcaaggaggcctaagaaagacaaaaaatactttttaaattaataaattagccacagcaagctcagaagaatttatagcacattagagttacagcatttctttctcaacagtttttctttagctacagtaaacatttgagaattctttctttggtagtggcttcaaacagaatctgtggagtcatcgtggactttaagtaaaacctctgatcaataattccttccagctctgtcctctcaataaggaattgcagcaaccctctaactcttaaacccactctcctcatcttacaaagtctcttgcttttaaaaaaaaaaatccacatctcctctggttgacaagtaaaatttatatactattgatattcacctgacctgatctattaatgctgaaatctgaatgccaaaatatataataaaacagaagatccatgtggaaacctttcagtgttcatggacaagtcctatgcatcctaaaatgatgaaagttcgtaagaatacaatgagattataaaagatgaatgggggtaaggtaatcttgttgggctcccccctgaatacttgtcatggaagggatatgaaatgctgagttgaaaaagcattttcagttttaaacctatgtaagtcttcatctaagactcttcatctaagac

SEQ ID NO: 724212 - DNA, 681 bp, Homo sapiens
tgaagagtttgatggtagcattctgatactgcttagaagctttgaagaattctaaatgtattagggtccatacagtatctctctacattttcctatttaatgagaggatcagataagaaattaagtcactacaggaacagtagggtaggtcttaatagctgagaaacagttcagtctgcaaataatgccacttgggtctaagagtcaaatttgggtttggattctgctagcagtatgatcttgggtaagttatttaatcgtttatacctctgtttcctcatctgcaagctggagataagtaaaaatatcagttaaattggttaactgtgaagattaaatgagataacaatcataaaacacttagggcagtggctggcacatagtacatactcagtcaatcttagctattattgttatcatctcaggtatcactattatttgcaaaagaaaaagagaacttttgcatgaaaataaaatcactcagctagatagaaggctcttaaagagatgagatttatgccaaagrttcttttttattattattattatactttaagttttagggtacttgaggtcatttcttgtccttcaaaacagaacagaaacctaaaaagtgtatcctcctgtgaacccaaaagtatctgagacaggtctcaattaatttagaaagttcattttgca

SEQ ID NO: 724213 - DNA, 1123 bp, Homo sapiens
ttgtttattacattattatttactacattatttttatatcatcctagggtttcagtaacacttttagtccttccagggtgcaaggggactggagagggtcgttagtcttaccagacccaaagacagaggacactttctcagacaagctgaggacctagaattgggttattggccaatttattcttgactagggcatggggcctgaatacaaaacgtaaggtgattcataacccaggtgccgatcaacagtggattggattttttaaaatatggtacatatacaccatggaatactatgcacccattaaaaaaaatgaaatcacgtcctctgaagccatgtggatacagctggaggccattatcctaagcaaattaacacagaaacagaaaaccaaatgccacatgttctcacttataagcagaagctaaacattgggtataaacggacacaaagatggaaacaataaacactgggggctccaaaaagggggaggaagggcggcagtggggggaccaagagctgaaaaactacctatggagtacgatgttcactacccgggcaatgagatcatcagcagcccaaacctcatcatcacatgatatacccatgtaacaaacctktacatgtaccccctaaatctaaatttaaaaaaaatgttaggtgattcaaacacgagtcctgggtctccaggctggatcacttcttataaaagtttttcttgtgatggcttgggaattttaagcatccatctttttctgtgaattttttttttttaagttttagaattctgtgtcgttcctgatatgatgtaaaaagaagggcactttgccgcaaggtcttcttcccccaaattcatccctctagtctaaggaaaacatcagacagatccacactgagggacattctacagaatatctgagcagtcctcctccaagccgtcaaagtcatgcaaagcaaggaaagactgagaaaccatcacagaccggaagagactaaggaggcatactgattaaatacaatgtggtatgcgggataggattctggaagcagaaaaagacgtccatagacaaagctgataaaacctgaataacatctggagtttaattcatagttaacataaga

SEQ ID NO: 724214 - DNA, 2261 bp, Homo sapiens
gcatccctgtgatccagtcacctcctgctaggcccatgtccaacactggggattataattcatcatgagattagagggaacacatatccaaactatatcacacctttatgccaataaacccaaacaacagagttctattttcataattttatattgtatttcttcttgaggtctgtggcatagccatctcctgacacaaagaatacacatttgattgctgaatgagtaaaattccataatgagaaataggagaaccctgaatatgtagaatgcaattactagtatttatagtgtctgggtcctactgattctactcctgttggagaaagaaaaaaggggaggggagagtacatatgagagaacacattaaaagattaatgaaatgtttcgcttatggtaaaaaagtgataagaataaattcactcatctagtcatgtaacatttactcagcacttggctgattcctttccttagggagctcacagtcaatagagggtgtcatatgtcaaaataaataaatacagtttaaaatatgtaaaatatcattgaacaaaaaatgaacaattatatgtaattttgtgaaaaactctctttattttcaggaactcaaaataggatggccggtggcagaagcaaagagtttgtctggcaaggacacttaggaccagatgacagcagggcttaaaaatactttaaaatattttccatttgtccaaaagtgttttgattggtttggttttatattgccaagtgtaaaacctacaaattattccttattaatgcttgataaagtaccagttccaaacgaaatcttcacccaagctttttaactattatctttatgaactgcaacattcaggctttgttcagctcttgcaaataaggatatcaatttcattggaaatcaataagtaccaccgacaaagaaagagaataggaggaaaaagggaagaatgaaacagatttcagtgatcctcaagcacatttgtggggtgtttcttcctcacactaagatgaaacagaaaccaagcaggaactggaggggacactgtttctttccatttgaattaattttaattttaaagccaaattttatggaacttacctgaaaagtttttgtaatccactaaatcaaacataacgatggcaacagctgaccacgtgattatcagggcaatgaccagaagccaggctgcaggggagctgaacgtcgtcactatgtcttctgtgactgtcctcttcagcacttttccgggggatttgggcacagatccatttttgctgtctatcacagttgtggttgtagatgcatttcctaatcaaacattcagaaaggaaaatataatttagagattcatggtaaatattgatgatgagaaacactgactatatgagtgctgaacctgtttatactgctttctagagcagcacaactccttagtggcaggacaaagcctccctgcccactarcacattatcttttcctcagcatttactattctccctaaaactcgtgcgctcatataatcagtgtttctcatctcctaagtcctctgagggagaatcaacacaagtgataaaatggttcaaatggataaaacttcttctgaatattttaacttaattgtataattgacccatctagtgaggtcatctaatgaggtcattcatgttttgtttgtttgtttgtttgtttgtttgtttgtaggggcacagaagatctaagataatgatgttagaaagtcttactatatccagtacctcttttattcctgattttaagagtccacatgttcatgagagaaaattcaaaaaatataaaaataaaataaatagataagcagatagttttaatctcaccacccagaaataaccactgttaatattttgcacgtatatttctgtacatacatataaatatataaatatggtttatctggttttgacaagtcattagcacattgtcttttacttttttttactaggcaatatatcagaagtgtgttttattgccattctgtatttctcaaaataccatttaagtggcttcatgacatgtaattttatggctgtgcgtaatttaatcaaaaacttttctaccttgggatagggcagaaattttctcagcacatattattatttatttctttaggagaaagtcctaaatatagaattcctgggacaaataacataatcacttttatagctttgagaatacatgcacgtatttgaaagttagtatcttttaaaaattgtgcatg

SEQ ID NO: 724215 - DNA, 1665 bp, Homo sapiens
tggagctatccaagcctgagagtggttcagtcagttggccaagagcagaggtagccgtgggagggctggggtttggttccagctcagtccaatgccaatgcctgtgctcttaattatgttgcctctgctatactcataactctgttaacagccataaatccagctctgtctgttagacccagtaaatttcaaagtagaaaatcatttttctaataaaactacgcatagaaaaaaagatattaatgctcatacattctaccctcattatgacatcaacctctgagccaaactattttgcacattataaagagctgtttttatgatgaatgggaattatattggcactttaattgagttagaaaccaaggtacatgaatgttagtgcacaagaaatgcgataaaaaaagctgctcaatgtggttggaatacatcagattaatttaataccaactttaaatccttacaatctatacccttaaatatgttttatcaaattattagatgaaatttttatactgtttttttttcttttaggtaggtacctattgcacattccccccacccctgcttttatttttttatttttttttaagacggagtcatgctctgtcacccaggctggagcgcaatggcacaatcttggctcactgcaaccttcgcctcctgggttcaagcgattctcctgcctcagcctcccaagtagctggaattacagatgtccactaccacgcccagctaatattttgtatttgtggtggagatgtggtttcaccatgttggcaaggctggtcttgaactcctgacctcatgtgatccacctgcctcagcctcccaaagtgytgggattacaggcatgagccaccgtgcctggccctgcattcttaacaaatctgctatatgataaatttagatttcaattttgtgatcaaaactctttttttgctataaaatgaaactattgccctcttagcttcaaatatggtaatgtaggaggttggcatatatttggataaaattatgtaaacttaaaaaaaaacactttccacaataggatgttttaatattggttcagtttcagccataattaatgatttattttatgtcttttgttttagttcaaattagttcatcattaaaaaaaaaaaactgactccattcacgtgcccatacaattagtacttgtgtttgcttgatttagcattctgcaaatgaaagagagtttgttttaatttagggcctgtgctttccttaaggtcaaatctccatttgagagaaagaatatggtatttaaataatttagtcaaattggaggccttgagacaagtcagagtccccaggctttctgaaaatgagatgtcccacgtttgcacttttccagcccaaccaaaaatgatagagttgtcagcataaaagttaatgtacaacatgtggatttttaaaacatgattgggatgagtgttttgagtaattaatttgctgaaattgtgttgtgctttagcgcactgtactacaatattagcattgtgaagcgtgcattaaatagttcctgtcaattatggttggctgtgaatgaatctgagggttccttttgttataaattactatttcctaaaatggttttgcagagaagcaatggaacacttttagatttggaatgtttaaaga

SEQ ID NO: 724216 - DNA, 817 bp, Homo sapiens
ttgagttcaccattacgtctggacacgaacttgaatttatggactgccagaggtttcacagaagaactagtccttgcaactagctcagctcaaaataggttaagaaatatgagcgcacggggcatatctggctaacttaatcatcaaaagaatttcttgtaaataagaaagaaaaataaaactgtagctttcattcaagtaaaggctacactttgcttcctcacaacaaatcaaaaacaaaaatagaagctttgtagaggaacaagcaaggtgtatgctggacagtacctcattctgaagcgctgttggtgttaactgccaaacagtgctaaaagaaatagaaagtagaatcttcaggctgcctttttctgccctatataaacatgtttattcaatggcagctgtctgcagataaactcaaaaaaagtcacagcaacacatgaattctgaacttgaattaaaggggagaaagtgaggattgtaatgactttttcagtgactaccaggagacaacaccaggataaatcattcaattaactataaragaaattcggcattattactgcagcttaaaaatagaactttgtttagaatatattaattttgaggatccaactcatcttaagtcaatgaaatttcactaaccactaaatcctttctgctctttaggatttgtctattcaacatataaccctgtttagttttattaaatatcttggagtcgaatttccaggaagtatatagaactaactagacacatatcaggagacctaaaggaaaaagaaactggcacaaacctcaatttttttcttttttt

SEQ ID NO: 724217 - DNA, 632 bp, Homo sapiens
tctctgttgcctaggctggagtgcaatggtgtgatctcagctyactgcaacctctgcctcctggggttcaagcgattctcctgcctcagcctcctgagtagctgatattacatcatgcgccaccaagccccgctaaatttttttgtatttttagtagagacggggtttcaccatgttggccaggctggttttgaacacctgacctcaggtgatccacccgccttggcgtccccgcttcccccttaagccacaagtgaggaccagaagaccagttggcaaggctcagggcgtgtccccagccagaggtcagaggtctgtggtacccgagaccaggtgtggaatcagaggtaggaaagtctaaatgaggtactgctcagggggcttctgccaaaagtgtgaggacgtctgctggtagaggctacatgggcaccatttcatgccaaagcttcaacctaggaggggccagggcgagcccaagtgcaagacaagggtggcagagaagcaagcagccaccttccccttcccactgtcagccagaggaggcccagacaggggaggagaggagctcaagtctgagtgacatttggagtttttggttttgatatacaactggatatgcatttttaatttta

SEQ ID NO: 724218 - DNA, 632 bp, Homo sapiens
tctctgttgcctaggctggagtgcaatggtgtgatctcagctcactgcaacctctgcctcctggggttcaagcgattctcctgcctcagcctcctgagtagctgatattacatcatgcgccaccaagcccygctaaatttttttgtatttttagtagagacggggtttcaccatgttggccaggctggttttgaacacctgacctcaggtgatccacccgccttggcgtccccgcttcccccttaagccacaagtgaggaccagaagaccagttggcaaggctcagggcgtgtccccagccagaggtcagaggtctgtggtacccgagaccaggtgtggaatcagaggtaggaaagtctaaatgaggtactgctcagggggcttctgccaaaagtgtgaggacgtctgctggtagaggctacatgggcaccatttcatgccaaagcttcaacctaggaggggccagggcgagcccaagtgcaagacaagggtggcagagaagcaagcagccaccttccccttcccactgtcagccagaggaggcccagacaggggaggagaggagctcaagtctgagtgacatttggagtttttggttttgatatacaactggatatgcatttttaatttta

SEQ ID NO: 724219 - DNA, 632 bp, Homo sapiens
tctctgttgcctaggctggagtgcaatggtgtgatctcagctcactgcaacctctgcctcctggggttcaagcgattctcctgcctcagcctcctgagtagctgatattacatcatgcgccaccaagccccgctaaatttttttgtatttttagtagagacggggtttcaccatgttggccaggctggttttgaacacctgacctcaggtgatccacccgccttggcgtccccgcttcccccttaagccacaagtgaggaccagaagaccagttggcaaggctcagggcrtgtccccagccagaggtcagaggtctgtggtacccgagaccaggtgtggaatcagaggtaggaaagtctaaatgaggtactgctcagggggcttctgccaaaagtgtgaggacgtctgctggtagaggctacatgggcaccatttcatgccaaagcttcaacctaggaggggccagggcgagcccaagtgcaagacaagggtggcagagaagcaagcagccaccttccccttcccactgtcagccagaggaggcccagacaggggaggagaggagctcaagtctgagtgacatttggagtttttggttttgatatacaactggatatgcatttttaatttta

SEQ ID NO: 724220 - DNA, 632 bp, Homo sapiens
tctctgttgcctaggctggagtgcaatggtgtgatctcagctcactgcaacctctgcctcctggggttcaagcgattctcctgcctcagcctcctgagtagctgatattacatcatgcgccaccaagccccgctaaatttttttgtatttttagtagagacggggtttcaccatgttggccaggctggttttgaacacctgacctcaggtgatccacccgccttggcgtccccgcttcccccttaagccacaagtgaggaccagaagaccagttggcaaggctcagggcgtgtccccagccagaggtcagaggtctgtggtacccgagaccaggtgtggaatcagaggtaggaaagtctaaatgaggtactgctcagggrgcttctgccaaaagtgtgaggacgtctgctggtagaggctacatgggcaccatttcatgccaaagcttcaacctaggaggggccagggcgagcccaagtgcaagacaagggtggcagagaagcaagcagccaccttccccttcccactgtcagccagaggaggcccagacaggggaggagaggagctcaagtctgagtgacatttggagtttttggttttgatatacaactggatatgcatttttaatttta

SEQ ID NO: 724221 - DNA, 632 bp, Homo sapiens
tctctgttgcctaggctggagtgcaatggtgtgatctcagctcactgcaacctctgcctcctggggttcaagcgattctcctgcctcagcctcctgagtagctgatattacatcatgcgccaccaagccccgctaaatttttttgtatttttagtagagacggggtttcaccatgttggccaggctggttttgaacacctgacctcaggtgatccacccgccttggcgtccccgcttcccccttaagccacaagtgaggaccagaagaccagttggcaaggctcagggcgtgtccccagccagaggtcagaggtctgtggtacccgagaccaggtgtggaatcagaggtaggaaagtctaaatgaggtactgctcagggggcttctgccaaaagtgtgaggacgtctgctggtagaggctacatgggcaccatttcatgccaaagcttcaacctaggaggggccagggcgagccyaagtgcaagacaagggtggcagagaagcaagcagccaccttccccttcccactgtcagccagaggaggcccagacaggggaggagaggagctcaagtctgagtgacatttggagtttttggttttgatatacaactggatatgcatttttaatttta

SEQ ID NO: 724222 - DNA, 632 bp, Homo sapiens
tctctgttgcctaggctggagtgcaatggtgtgatctcagctcactgcaacctctgcctcctggggttcaagcgattctcctgcctcagcctcctgagtagctgatattacatcatgcgccaccaagccccgctaaatttttttgtatttttagtagagacggggtttcaccatgttggccaggctggttttgaacacctgacctcaggtgatccacccgccttggcgtccccgcttcccccttaagccacaagtgaggaccagaagaccagttggcaaggctcagggcgtgtccccagccagaggtcagaggtctgtggtacccgagaccaggtgtggaatcagaggtaggaaagtctaaatgaggtactgctcagggggcttctgccaaaagtgtgaggacgtctgctggtagaggctacatgggcaccatttcatgccaaagcttcaacctaggaggggccagggcgagcccaagtgcaagacaagggtggcagagaagcaagcagccaccttccccttcccactgtcagccagaggaggcccagacaggggaggagaggagctcaartctgagtgacatttggagtttttggttttgatatacaactggatatgcatttttaatttta

SEQ ID NO: 724223 - DNA, 2096 bp, Homo sapiens
ttgacttagtagagatggactctcctgggatttctttggggtagctgggaacctgcaccgctgtaactacattcctggtcggcagggatgctctggggttgatggtgtgtgctcttagagtatacttctctctcatggtggctgatcaaccctacagcgtggactctcttgagtgcctgttactgtaccaaaggaccgaaacggtgaagttcattcgactcagcaacctttgctaagagcttactacaaggacacccaggtgaccaggacccagtccctgctaagagcttactaccaggacacccaggtgaccaggacccagtccctgctaagagcttactacaaggacaccaggtgaccaagacctggtccctgcttgtagaggggcagactacacaaagcagacccttgggacattcaggtcaaagtcattgtttttttttttgagacagagtctcgctctgtcgcccaggctgaagtgtagtagcacaatctctgctcactgcaacctctgcctcctggcctcaagtgattctcctgcttcagcctcccgagtagctgggattacaggcacccaccaccatggccaggtaatttttgaatttttagtagagatggggttttgccatgttggccaggctggtctcaaactcctgacctcaggtgatccacccgcctcggcttcccaaagtgctgggattacaggcgtgagacaacgcgcccggccaaaaaatgttttgctttctttacttttcacttcaaaagaacgaacagaataaattcctaacttatgactttctaagacgtaagtcatgttcaattactataaaaattaccacactgtgtttgcatattgtgacagtactacagagctcaagctatgccaattatttcagtggccttgaatgactgaacaagtacaattatttctcttcttttgtaaagaagactataaagttttttaatggtagaaagcctgttcctgattaaatttctattcgtttttaaaaatttacttaaaatattttcaacatagaagaaaaaagtcctccacttctaatactgcttccagaggtaacctctgcaaataatttttatgtaattattaaattacataaataaaaattactcacaggtaatttttgattcctatataaacaatgtgcttatctaatgtgtgtgtgtgtgtatatacatatataaatatatacatatatatatatatatwtttttttttttttttttctttgagatggagtctcactctgtcacccaggctggagtgcagtggcgcgatctcggctcactgcaagctccacctcccgggttcaagcgattctcctgcctcagcctcccgagtagctgggactacaggcacccgccaccacgcctggctaattttttgtatttttagtagagacggggtttcaccgtgtgttagccaggatggtctcgatctcctgacctcgtgatctgcccgcctcggcctcccaaagtgctgggattacaggcatgagccaccacgcccggcccgtctaatatatatttctatagttatatacagaaattgaatagttctacatgcacagttctggagtttgacttttagaaagattaatatttaaaatcagtaattaggccaggcacagtggcccacactcgcaatccccacactttgggaagccgaggtgggaggatcgcttggggccaggagttcaagaccaccctgggcaacatagaaagaccctgcctgtacttagaaagcttcccccagccccgaccccaggtattacattacttccatttcattcttcatgttttcagacaacgtcctgctccggtgcccggaagacacgcgtgccaggcttggctgagtcctgcagccccagccatttctctccacggtcattctcaggcttgctgacccatgtgagcagttccgggccaaatatccacatctcgtgtgatccagtgtaagacagaatgtcttctttggtagcacctttttcttttgtcttgattcttttatttatctattttcaaagtaataaattggtgccctggcaactccaacagtgacacttctgagggaggca

SEQ ID NO: 724224 - DNA, 2096 bp, Homo sapiens
ttgacttagtagagatggactctcctgggatttctttggggtagctgggaacctgcaccgctgtaactacattcctggtcggcagggatgctctggggttgatggtgtgtgctcttagagtatacttctctctcatggtggctgatcaaccctacagcgtggactctcttgagtgcctgttactgtaccaaaggaccgaaacggtgaagttcattcgactcagcaacctttgctaagagcttactacaaggacacccaggtgaccaggacccagtccctgctaagagcttactaccaggacacccaggtgaccaggacccagtccctgctaagagcttactacaaggacaccaggtgaccaagacctggtccctgcttgtagaggggcagactacacaaagcagacccttgggacattcaggtcaaagtcattgtttttttttttgagacagagtctcgctctgtcgcccaggctgaagtgtagtagcacaatctctgctcactgcaacctctgcctcctggcctcaagtgattctcctgcttcagcctcccgagtagctgggattacaggcacccaccaccatggccaggtaatttttgaatttttagtagagatggggttttgccatgttggccaggctggtctcaaactcctgacctcaggtgatccacccgcctcggcttcccaaagtgctgggattacaggcgtgagacaacgcgcccggccaaaaaatgttttgctttctttacttttcacttcaaaagaacgaacagaataaattcctaacttatgactttctaagacgtaagtcatgttcaattactataaaaattaccacactgtgtttgcatattgtgacagtactacagagctcaagctatgccaattatttcagtggccttgaatgactgaacaagtacaattatttctcttcttttgtaaagaagactataaagttttttaatggtagaaagcctgttcctgattaaatttctattcgtttttaaaaatttacttaaaatattttcaacatagaagaaaaaagtcctccacttctaatactgcttccagaggtaacctctgcaaataatttttatgtaattattaaattacataaataaaaattactcacaggtaatttttgattcctatataaacaatgtgcttatctaatgtgtgtgtgtgtgtatatacatatataaatatatacatatatatatatatatttwtttttttttttttttctttgagatggagtctcactctgtcacccaggctggagtgcagtggcgcgatctcggctcactgcaagctccacctcccgggttcaagcgattctcctgcctcagcctcccgagtagctgggactacaggcacccgccaccacgcctggctaattttttgtatttttagtagagacggggtttcaccgtgtgttagccaggatggtctcgatctcctgacctcgtgatctgcccgcctcggcctcccaaagtgctgggattacaggcatgagccaccacgcccggcccgtctaatatatatttctatagttatatacagaaattgaatagttctacatgcacagttctggagtttgacttttagaaagattaatatttaaaatcagtaattaggccaggcacagtggcccacactcgcaatccccacactttgggaagccgaggtgggaggatcgcttggggccaggagttcaagaccaccctgggcaacatagaaagaccctgcctgtacttagaaagcttcccccagccccgaccccaggtattacattacttccatttcattcttcatgttttcagacaacgtcctgctccggtgcccggaagacacgcgtgccaggcttggctgagtcctgcagccccagccatttctctccacggtcattctcaggcttgctgacccatgtgagcagttccgggccaaatatccacatctcgtgtgatccagtgtaagacagaatgtcttctttggtagcacctttttcttttgtcttgattcttttatttatctattttcaaagtaataaattggtgccctggcaactccaacagtgacacttctgagggaggca

SEQ ID NO: 724225 - DNA, 2096 bp, Homo sapiens
ttgacttagtagagatggactctcctgggatttctttggggtagctgggaacctgcaccgctgtaactacattcctggtcggcagggatgctctggggttgatggtgtgtgctcttagagtatacttctctctcatggtggctgatcaaccctacagcgtggactctcttgagtgcctgttactgtaccaaaggaccgaaacggtgaagttcattcgactcagcaacctttgctaagagcttactacaaggacacccaggtgaccaggacccagtccctgctaagagcttactaccaggacacccaggtgaccaggacccagtccctgctaagagcttactacaaggacaccaggtgaccaagacctggtccctgcttgtagaggggcagactacacaaagcagacccttgggacattcaggtcaaagtcattgtttttttttttgagacagagtctcgctctgtcgcccaggctgaagtgtagtagcacaatctctgctcactgcaacctctgcctcctggcctcaagtgattctcctgcttcagcctcccgagtagctgggattacaggcacccaccaccatggccaggtaatttttgaatttttagtagagatggggttttgccatgttggccaggctggtctcaaactcctgacctcaggtgatccacccgcctcggcttcccaaagtgctgggattacaggcgtgagacaacgcgcccggccaaaaaatgttttgctttctttacttttcacttcaaaagaacgaacagaataaattcctaacttatgactttctaagacgtaagtcatgttcaattactataaaaattaccacactgtgtttgcatattgtgacagtactacagagctcaagctatgccaattatttcagtggccttgaatgactgaacaagtacaattatttctcttcttttgtaaagaagactataaagttttttaatggtagaaagcctgttcctgattaaatttctattcgtttttaaaaatttacttaaaatattttcaacatagaagaaaaaagtcctccacttctaatactgcttccagaggtaacctctgcaaataatttttatgtaattattaaattacataaataaaaattactcacaggtaatttttgattcctatataaacaatgtgcttatctaatgtgtgtgtgtgtgtatatacatatataaatatatacatatatatatatatatttttwtttttttttttttctttgagatggagtctcactctgtcacccaggctggagtgcagtggcgcgatctcggctcactgcaagctccacctcccgggttcaagcgattctcctgcctcagcctcccgagtagctgggactacaggcacccgccaccacgcctggctaattttttgtatttttagtagagacggggtttcaccgtgtgttagccaggatggtctcgatctcctgacctcgtgatctgcccgcctcggcctcccaaagtgctgggattacaggcatgagccaccacgcccggcccgtctaatatatatttctatagttatatacagaaattgaatagttctacatgcacagttctggagtttgacttttagaaagattaatatttaaaatcagtaattaggccaggcacagtggcccacactcgcaatccccacactttgggaagccgaggtgggaggatcgcttggggccaggagttcaagaccaccctgggcaacatagaaagaccctgcctgtacttagaaagcttcccccagccccgaccccaggtattacattacttccatttcattcttcatgttttcagacaacgtcctgctccggtgcccggaagacacgcgtgccaggcttggctgagtcctgcagccccagccatttctctccacggtcattctcaggcttgctgacccatgtgagcagttccgggccaaatatccacatctcgtgtgatccagtgtaagacagaatgtcttctttggtagcacctttttcttttgtcttgattcttttatttatctattttcaaagtaataaattggtgccctggcaactccaacagtgacacttctgagggaggca

SEQ ID NO: 724226 - DNA, 2155 bp, Homo sapiens
ataataatagtaatgttacattgttttaggcaaaagtctatatagcttatataaataaaagttaaatcttggaaatggtctttttttttggtgacagttacttagctggcttctttgaccattattaacagaaagcatttaaataacacctcttgttagtaaggttccaacgttacattttcttttatttgtctggagactgttgactaatctataatctaaattatatctgaaatgttgatgtaatatttgtcctcacagtagctggcatttgtccttcagttaaatggtgagataataatcagcagtagaaactttaccgtgggaaaggtgaactcttatcatgtgaagtacagtgtggaatcagtaactttctcacgctggtatggtatcatgttcttgctaaccttgtttgagtattcaccattgtttgctatcccatggtggcagtataactaatgatattttgcaaaaataggagagaactttcagatcatgaaatatacaggaagttgtttacatattacaaggaaggcaatattttcaccaaaacaatagcttgggcattttagagtattttagtatgcctcaggcactgacattttagccaccttctaatgaatgggcttgaagcagaactgcttctactatcaggtaatggttgaggggggatgtctattacacatgtactttgttttgtgtaaagtatgttctggaaagttacattcttttggtgagtacatgtaagtatttgagggatattcatgatttaaggaggcctgaaatgaatctttttgattagggaaagaaatattttgcagtgtaaatgattaaccatttcttccagtttacctgtttggtgagttcataccataaatgttacgatgtttggttttataaaagagtacctgtaagtttttagtttctgtgtggaagattttttcagagagaatacagatagccttcttgtattagaattttgtcatatgtggtttgaaactgttcattggagctgaggaattttgttacgtttgttttaactagatatgattaacaaaatgaccatagcaagagcatgcattgaaatgagagaagttacgtgtgtttgtgtctagtttgggtaatatgattcattcttaagaattcttcaaactttattataatttttggaaataacaagtttgtcagttgattaaaccagtgtcttgttcataggcgaccttacgcaattatatagcagaccaaatgtttgtgttgttagtgttccttttccacccctaaattatagaaggactaagagtaacactccatacagaaactcagtaactaaataaccatattgcaactcagtaacaagataatgaattatgctgactttttagaatagttctgtcccaagaagaactctgaagatgattcagccttctgcatctggatctcttgttggaagagaaaatgaggtatgcactatatggctaaaatggggtactggtgatacagtgtctacatcgaaaacatttctactattttcttggtcagaaacacgtaaattgttgaaatttggaaataatttgggaatcacaattatatatttcccaaagaagtgattttggttttaattgttcaatttaagaagttcgtcgggtgcagtggctcacgcctgttatcccagcacttagggaggccgaggtgggtggatcgcctgaggtcaggagcttgagacaagcctggccaacgtggtgaaaccccatctctactaaaagtacaaaaaaattagccrggcgtggtggcacacacctataatctcagctgcttgggaggcttgaggcaggagaatcacttaaacctgggaggtggaggttgcagtgagccgaggtcacaccactgcactccagcttgggtgacagagcgagactctaaaataaaaataaaaataaaaaattttttaaaaaataaataaataatttcagctaagctcttgaccccagtctaatccaaaataattgttgcaaataaaattcctaaaatgttactatatgttttggtagaatttttaattgtataacttttttaaagatccagagatgtgaaaaagttagatatgcgtactctttttttaatacataaatgaaaaaccacctaatttcttgttaat

SEQ ID NO: 724227 - DNA, 1902 bp, Homo sapiens
tttaatgaaataacaccttatagagattctgtgcgagcctcctttctgaagaaacacaatgcaggccagcttgggcgggctcctgtgttaacttccaatctttaaagaaggacaacctcggataatcccagtctctgacatttatagcaagttaggaaatgatttctcaaacctgtgcttgtgtagcctaaataaatgacaataagataaacaataaagtatttaacaattggccttcacttttctaaaaagagccagccttttcttttacctttaaaacatacattgtctgtacacacatgctcttcttttacagaaatctagttttctcaacatgctcaagcatattagacttctcagggttctcaaacatcttgtcccttcattagtgctatgaaatttgtcagacatgggccttgaattttggccatatttatgattaacagttcaataagcatgataaacgtctacagcagaacaagtttatggttagactctacaggtcttgagaacaagttctattgctctacagtttgatcctgaaagcagccacaccaaggatcttgtctccagatttcaactctacagatttatcatctaagataattatgatattatgtgttaataaaatttcataatccaatggggattttcacaatatgtactctagcacatacagacctcgcatctacagcagagctgcatggttatgaaaccaaaagggtattaagaggagaaactatgtttgttttgagagctattcttaccctttttaggaggatcaggggatagcttggtagtttcttctttagtctcacccttatttcatgttagcccaaactatagaggtcagtgcttatttgcaggctgatcgttgaatatttattgaaggcctaaaacaagttgtaggcttgaaaaatgagatttgagccgggtgcagtgtctctagcctgtaatcccagcactttgggagacygaggcgggtggatcacctgaggtcaggcattccagaccagcctggacaacatggtgaaaccctgcctcttttaaaaatacaaaattagccaggtgtgatggtggactcctgtaatcccagctactcgggggcctgaggcaggagaatctcttgaacccaggaggcggaggttgcagtgagccgagatcgagccattgccctccagcctgggcaacaagagcaaaactccgtctcaaaataaaaaaaaagaaagaaaaagaaaaaagaaaaataagatttggccaggtagcagccattgtcctggagcttgggacagggttaagaaccagaggcattttcaagtgagtacgtctatcccaccatgtattttctttatttattaacttcttctttcccctgttccttttttttctctcgcctgcctttctttttttcttttccacttctcatgctttatgcccaccagcattatcagaaaatactaattagacaccttttgtttacactttgggttaaagctatacagattgctgtccaaacaaatctgctggtaccatttaataaggaatattttttacccattatctttgcctgttagtctcaatttgttatcaaacacacttctatttagttttccttaaccccgggctctcactgacttttgcttcttgactacttcctaatttcatttcaaatatttttctagattccagatgtcactcccacaattcaaaatgctcttactattccatttaacgtgtctaggaaggttatagtagataaattgaaaaagcaaccttctgacacttttgttagaactccatcatcatccttagaaagaaaatgttaaaatattatagagttcgtgccactcttcttaccctattcccacatacaaagaaggcaaatttgagcaattaacatat

SEQ ID NO: 724228 - DNA, 1902 bp, Homo sapiens
tttaatgaaataacaccttatagagattctgtgcgagcctcctttctgaagaaacacaatgcaggccagcttgggcgggctcctgtgttaacttccaatctttaaagaaggacaacctcggataatcccagtctctgacatttatagcaagttaggaaatgatttctcaaacctgtgcttgtgtagcctaaataaatgacaataagataaacaataaagtatttaacaattggccttcacttttctaaaaagagccagccttttcttttacctttaaaacatacattgtctgtacacacatgctcttcttttacagaaatctagttttctcaacatgctcaagcatattagacttctcagggttctcaaacatcttgtcccttcattagtgctatgaaatttgtcagacatgggccttgaattttggccatatttatgattaacagttcaataagcatgataaacgtctacagcagaacaagtttatggttagactctacaggtcttgagaacaagttctattgctctacagtttgatcctgaaagcagccacaccaaggatcttgtctccagatttcaactctacagatttatcatctaagataattatgatattatgtgttaataaaatttcataatccaatggggattttcacaatatgtactctagcacatacagacctcgcatctacagcagagctgcatggttatgaaaccaaaagggtattaagaggagaaactatgtttgttttgagagctattcttaccctttttaggaggatcaggggatagcttggtagtttcttctttagtctcacccttatttcatgttagcccaaactatagaggtcagtgcttatttgcaggctgatcgttgaatatttattgaaggcctaaaacaagttgtaggcttgaaaaatgagatttgagccgggtgcagtgtctctagcctgtaatcccagcactttgggagactgaggcrggtggatcacctgaggtcaggcattccagaccagcctggacaacatggtgaaaccctgcctcttttaaaaatacaaaattagccaggtgtgatggtggactcctgtaatcccagctactcgggggcctgaggcaggagaatctcttgaacccaggaggcggaggttgcagtgagccgagatcgagccattgccctccagcctgggcaacaagagcaaaactccgtctcaaaataaaaaaaaagaaagaaaaagaaaaaagaaaaataagatttggccaggtagcagccattgtcctggagcttgggacagggttaagaaccagaggcattttcaagtgagtacgtctatcccaccatgtattttctttatttattaacttcttctttcccctgttccttttttttctctcgcctgcctttctttttttcttttccacttctcatgctttatgcccaccagcattatcagaaaatactaattagacaccttttgtttacactttgggttaaagctatacagattgctgtccaaacaaatctgctggtaccatttaataaggaatattttttacccattatctttgcctgttagtctcaatttgttatcaaacacacttctatttagttttccttaaccccgggctctcactgacttttgcttcttgactacttcctaatttcatttcaaatatttttctagattccagatgtcactcccacaattcaaaatgctcttactattccatttaacgtgtctaggaaggttatagtagataaattgaaaaagcaaccttctgacacttttgttagaactccatcatcatccttagaaagaaaatgttaaaatattatagagttcgtgccactcttcttaccctattcccacatacaaagaaggcaaatttgagcaattaacatat

SEQ ID NO: 724229 - DNA, 642 bp, Homo sapiens
aagcttacaagcatcaaaaaaatcaatcaatgttgctgctaagaacatcaaatttaaacaatatgagacatcactttggaccaagtgattgtcagcaatttgggggaaagcatgctggttaaaatacggtaaaacaggtacttccataacctctctatcaagacctttaaaatatagaaaataccctcaataagcaactatagagaaaggtttakataaattatgccatgctataggaaaattatacagacattaaagatttcattatagattttttaaaccaaagtaaattctcacaatactggctgaaagaaaattcagaatataaattttttaacacactgtaatttaggttgtgttaaattatacatactcatttttgaaaagactgaaatcaatagtgcaaaggtgattgtttctggagtgtggacaatcttttcctattctttatatatgtctgtgttttccaaatattctacaatgatctgcatctctttggtatttaaaaagaaacaaaacatgccaataagaggagatattcttcccaaaatatataatctatgtctgcacagaatattgaagttttatgtaactattttacatgatctttttctcgatccatttcttacccagcttcattaa

SEQ ID NO: 724230 - DNA, 571 bp, Homo sapiens
attttgaatttgaatgcttttataaatcaaaaacgtgatttgcatttactaacatgaaaaattattgatacagtttygttctgtgtccctacccaaatctcatctcccataatccccattgcaatccccataatccctgccagtagagggagggagcaggtgggaggtaattagatcatgggagtggtttccaccatgcagttctcatgatagtgagttctcagagatatgatggttttttaaggggttcttccccttttgctcttagctctgtctttcctgatgccatgtgataaggtttgaacttgcttcccctttgccttccaccgtgattgcaagttttctgaggcctccccagtcaggtagcactgtgagtcaatcaaacctcttttctttataaattacccagtcttgggtatttctttatagcagtgtgaaaacagaccaatacaatgatatcatgattattaccagattcacaattttcaaaatactatgaaaagataaattgttcatcctagtattaaaaagtaaagatagaacacagaaatttaatttttaaagtatagta

SEQ ID NO: 724231 - DNA, 633 bp, Homo sapiens
aagcttagtttggtgggatatgaaattcttggctggaatttcttttctttaagaatgctgaaaattgacatctaatctctcctggcttataaggtttctgctgagaagtttgctgttaaactgatggggctcccattgtatgtgacctgacctttttctctagctgtcttcaagattttttctgtagcattgaccttggacagtctggtgactatatgtcttggtgatgttcattttgtgtagcatctcataggtgttctctggatttcttgtatctaggtgtctgcctctctagcaagattggggaaattttcttgaattattttctcaaatatgttttccaaggtattttctttttctccacttctctcaggaatgccagtaatttgtaagatctgtcagtttatttacataatcccatatttctcaaagactgttcatttttaaaattctttttttctttagttttgtgtgatggggttagtttgaaagactggtttttaagctctgaaattccttcttttgcttggttcagtctattgatgaaattttcaattgtattttgtaattcsttaagtgagttttctacttctagagttagaattagaaactcatgtaaggaatttgaaaata

SEQ ID NO: 724232 - DNA, 2190 bp, Homo sapiens
tggacaaatattgtctgtgtttcagtacaactttatttattggcaccaagatttgaatttcatgtaattttcatgtgccacaaaatttgatttttcttttgatttttcaaagccgttttaaaatgtaaagaacattcttagcccatagggccatacaaaagtctcgcaggctatagttttgctgaccaagttctacctggttaccagaattagctaagtaaaatataagtctgaacatttcattcgaatgcttaaacccatcaaaggtttgccaacagggactacaagaataaggcttaccttacttaaaatggcttattgattccctcatgatcacaggtccagcatcatagcttgccagttcatagcttgcactgcactcttcagaatgctgacctccttgcagtatcctgtccacactgagatacttctttttgaggccttgacctcccttcctggagtgtctcccatttacctttatttttctctttctttatctctcttcctttcttcttcttctttttttttttttaaatattgtattagaattgttggtttatttgcttcactaagaggtttccctagtgagacacggaacaaccatgtctcgttctattctgtgttcttatcatttcacttcctgcccagggccctgctaaagtaggctcttcataaatatttgctgaatgcatgtatacatgcatgcatgcatgaatgaatggacaaatgaataagtggaatggaatagttaaatgagccaattttgatattttgctaataaccctgaccaagctgttggtgagttcacaggttgaaaccagtacaggcagttcttaacataggaatgtgttgagttccaaaagtttgtttggaaattggttgttcagaacttggaacatgttttcccatataaagatgttataaactaaactatgcttaactattcagcttagtccacaaaaatattatttgaggcatcatgtcactgaaataaaattagaaaataactgaggtgtcaccttttcattttattaaaatattttaagcccacatttcatctcaagaaactctaaaagacattttctggcactgtgtaatgttataaatgaaacaaaactgaatgctggtaaaggcttagtgtgggtaaagcagggagataaagagattgtgaaaattttatgggaaactgagtgtttttaagagcatcaattctttactatttttgttctacttcagaaattatcgttttctttgccatgctcaatgtttatcacaagaactccttttgagatcattggaaagattatggcccttttttgagaatcaaatgtaaagatatatagacacattttagagacctcctccaaaaaaaatcttcaccattcacttccaacctcctttaacaaaattttggtttatctaatttgtttctcttgctttagaaatattaattaatatttaatattaatttttctttctctcttcattttcctttctgattcatcagtatttttcatatggtcttcaatttccttggaccttggtacaggaacaggtaggtaccagtagagccaatgattaaaccacgttcctcaattcattttcatttactaattgacttgtttgttaaatattccctttatttaacacatatttattaaaatgctttctaactgtaaggcagaaggccaggctctgtatcatttagggaaaagggttggaaaaacaaaatgaagttaataagaatgaaaggaagttagaagaggaagaataagacatggtattcagaaaccacagagatctaggtctttcttggtaataggatatgctcattgtaaaaactcctcaaattacagaaatgtttaatgtagacaagtaaattccatcttaaattcccctcttgcagatgaggtatttatgtccagattttatttcatgcatatgtggacattattatgataacgatttttatgaaactggaatcttatttcatcaactctaaaatgctcagttgaaaatacaccgttattttgtgtatcactaagaaagaagaaaactcctaaatacagcacactgatgggtcttgactcttcatacaatttgccagtctgtgtcttttaattggagcatttagtccatttacatttaaagttaatattgttatgtgtgaatttgatcctgtcatkatga

SEQ ID NO: 724233 - DNA, 2190 bp, Homo sapiens
tggacaaatattgtctgtgtttcagtacaactttatttattggcaccaagatttgaatttcatgtaattttcatgtgccacaaaatttgatttttcttttgatttttcaaagccgttttaaaatgtaaagaacattcttagcccatagggccatacaaaagtctcgcaggctatagttttgctgaccaagttctacctggttaccagaattagctaagtaaaatataagtctgaacatttcattcgaatgcttaaacccatcaaaggtttgccaacagggactacaagaataaggcttaccttacttaaaatggcttattgattccctcatgatcacaggtccagcatcatagcttgccagttcatagcttgcactgcactcttcagaatgctgacctccttgcagtatcctgtccacactgagatacttctttttgaggccttgacctcccttcctggagtgtctcccatttacctttatttttctctttctttatctctcttcctttcttcttcttctttttttttttttaaatattgtattagaattgttggtttatttgcttcactaagaggtttccctagtgagacacggaacaaccatgtctcgttctattctgtgttcttatcatttcacttcctgcccagggccctgctaaagtaggctcttcataaatatttgctgaatgcatgtatacatgcatgcatgcatgaatgaatggacaaatgaataagtggaatggaatagttaaatgagccaattttgatattttgctaataaccctgaccaagctgttggtgagttcacaggttgaaaccagtacaggcagttcttaacataggaatgtgttgagttccaaaagtttgtttggaaattggttgttcagaacttggaacatgttttcccatataaagatgttataaactaaactatgcttaactattcagcttagtccacaaaaatattatttgaggcatcatgtcactgaaataaaattagaaaataactgaggtgtcaccttttcattttattaaaatattttaagcccacatttcatctcaagaaactctaaaagacattttctggcactgtgtaatgttataaatgaaacaaaactgaatgctggtaaaggcttagtgtgggtaaagcagggagataaagagattgtgaaaattttatgggaaactgagtgtttttaagagcatcaattctttactatttttgttctacttcagaaattatcgttttctttgccatgctcaatgtttatcacaagaactccttttgagatcattggaaagattatggcccttttttgagaatcaaatgtaaagatatatagacacattttagagacctcctccaaaaaaaatcttcaccattcacttccaacctcctttaacaaaattttggtttatctaatttgtttctcttgctttagaaatattaattaatatttaatattaatttttctttctctcttcattttcctttctgattcatcagtatttttcatatggtcttcaatttccttggaccttggtacaggaacaggtaggtaccagtagagccaatgattaaaccacgttcctcaattcattttcatttactaattgacttgtttgttaaatattccctttatttaacacatatttattaaaatgctttctaactgtaaggcagaaggccaggctctgtatcatttagggaaaagggttggaaaaacaaaatgaagttaataagaatgaaaggaagttagaagaggaagaataagacatggtattcagaaaccacagagatctaggtctttcttggtaataggatatgctcattgtaaaaactcctcaaattacagaaatgtttaatgtagacaagtaaattccatcttaaattcccctcttgcagatgaggtatttatgtccagattttatttcatgcatatgtggacattattatgataacgatttttatgaaactggaatcttatttcatcaactctaaaatgctcagttgaaaatacaccrttattttgtgtatcactaagaaagaagaaaactcctaaatacagcacactgatgggtcttgactcttcatacaatttgccagtctgtgtcttttaattggagcatttagtccatttacatttaaagttaatattgttatgtgtgaatttgatcctgtcattatga

SEQ ID NO: 724234 - DNA, 2190 bp, Homo sapiens
tggacaaatattgtctgtgtttcagtacaactttatttattggcaccaagatttgaatttcatgtaattttcatgtgccacaaaatttgatttttcttttgatttttcaaagccgttttaaaatgtaaagaacattcttagcccatagggccatacaaaagtctcgcaggctatagttttgctgaccaagttctacctggttaccagaattagctaagtaaaatataagtctgaacatttcattcgaatgcttaaacccatcaaaggtttgccaacagggactacaagaataaggcttaccttacttaaaatggcttattgattccctcatgatcacaggtccagcatcatagcttgccagttcatagcttgcactgcactcttcagaatgctgacctccttgcagtatcctgtccacactgagatacttctttttgaggccttgacctcccttcctggagtgtctcccatttacctttatttttctctttctttatctctcttcctttcttcttcttctttttttttttttaaatattgtattagaattgttggtttatttgcttcactaagaggtttccctagtgagacacggaacaaccatgtctcgttctattctgtgttcttatcatttcacttcctgcccagggccctgctaaagtaggctcttcataaatatttgctgaatgcatgtatacatgcatgcatgcatgaatgaatggacaaatgaataagtggaatggaatagttaaatgagccaattttgatattttgctaataaccctgaccaagctgttggtgagttcacaggttgaaaccagtacaggcagttcttaacataggaatgtgttgagttccaaaagtttgtttggaaattggttgttcagaacttggaacatgttttcccatataaagatgttataaactaaactatgcttaactattcagcttagtccacaaaaatattatttgaggcatcatgtcactgaaataaaattagaaaataactgaggtgtcaccttttcattttattaaaatattttaagcccacatttcatctcaagaaactctaaaagacattttctggcactgtgtaatgttataaatgaaacaaaactgaatgctggtaaaggcttagtgtgggtaaagcagggagataaagagattgtgaaaattttatgggaaactgagtgtttttaagagcatcaattctttactatttttgttctacttcagaaattatcgttttctttgccatgctcaatgtttatcacaagaactccttttgagatcattggaaagattatggcccttttttgagaatcaaatgtaaagatatatagacacattttagagacctcctccaaaaaaaatcttcaccattcacttccaacctcctttaacaaaattttggtttatctaatttgtttctcttgctttagaaatattaattaatatttaatattaatttttctttctctcttcattttcctttctgattcatcagtatttttcatatggtcttcaatttccttggaccttggtacaggaacaggtaggtaccagtagagccaatgattaaaccacgttcctcaattcattttcatttactaattgacttgtttgttaaatattccctttatttaacacatatttattaaaatgctttctaactgtaaggcagaaggccaggctctgtatcatttagggaaaagggttggaaaaacaaaatgaagttaataagaatgaaaggaagttagaagaggaagaataagacatggtattcagaaaccacagagatctaggtctttcttggtaataggatatgctcattgtaaaaactcctcaaattacagaaatgtttaatgtagacaagtaaattccatcttaaattcccctcttgcagatgaggtatttatgtccagattttatttcatgcatatgtggacattattatgataacgatttttatgaaactggaatcttatttcatcaactctaaaatgctcagttgaaaatacaccgttattttgtgtatcactaagaaagaagaaaactcctaaatacagcacactgatgggtcttgactcttyatacaatttgccagtctgtgtcttttaattggagcatttagtccatttacatttaaagttaatattgttatgtgtgaatttgatcctgtcattatga

SEQ ID NO: 724235 - DNA, 2190 bp, Homo sapiens
tggacaaatattgtctgtgtttcagtacaactttatttattggcaccaagatttgaatttcatgtaattttcatgtgccacaaaatttgatttttcttttgatttttcaaagccgttttaaaatgtaaagaacattcttagcccatagggccatacaaaagtctcgcaggctatagttttgctgaccaagttctacctggttaccagaattagctaagtaaaatataagtctgaacatttcattcgaatgcttaaacccatcaaaggtttgccaacagggactacaagaataaggcttaccttacttaaaatggcttattgattccctcatgatcacaggtccagcatcatagcttgccagttcatagcttgcactgcactcttcagaatgctgacctccttgcagtatcctgtccacactgagatacttctttttgaggccttgacctcccttcctggagtgtctcccatttacctttatttttctctttctttatctctcttcctttcttcttcttctttttttttttttaaatattgtattagaattgttggtttatttgcttcactaagaggtttccctagtgagacacggaacaaccatgtctcgttctattctgtgttcttatcatttcacttcctgcccagggccctgctaaagtaggctcttcataaatatttgctgaatgcatgtatacatgcatgcatgcatgaatgaatggacaaatgaataagtggaatggaatagttaaatgagccaattttgatattttgctaataaccctgaccaagctgttggtgagttcacaggttgaaaccagtacaggcagttcttaacataggaatgtgttgagttccaaaagtttgtttggaaattggttgttcagaacttggaacatgttttcccatataaagatgttataaactaaactatgcttaactattcagcttagtccacaaaaatattatttgaggcatcatgtcactgaaataaaattagaaaataactgaggtgtcaccttttcattttattaaaatattttaagcccacatttcatctcaagaaactctaaaagacattttctggcactgtgtaatgttataaatgaaacaaaactgaatgctggtaaaggcttagtgtgggtaaagcagggagataaagagattgtgaaaattttatgggaaactgagtgtttttaagagcatcaattctttactatttttgttctacttcagaaattatcgttttctttgccatgctcaatgtttatcacaagaactccttttgagatcattggaaagattatggcccttttttgagaatcaaatgtaaagatatatagacacattttagagacctcctccaaaaaaaatcttcaccattcacttccaacctcctttaacaaaattttggtttatctaatttgtttctcttgctttagaaatattaattaatatttaatattaatttttctttctctcttcattttcctttctgattcatcagtatttttcatatggtcttcaatttccttggaccttggtacaggaacaggtaggtaccagtagagccaatgattaaaccacgttcctcaattcattttcatttactaattgacttgtttgttaaatattccctttatttaacacatatttattaaaatgctttctaactgtaaggcagaaggccaggctctgtatcatttagggaaaagggttggaaaaacaaaatgaagttaataagaatgaaaggaagttagaagaggaagaataagacatggtattcagaaaccacagagatctaggtctttcttggtaataggatatgctcattgtaaaaactcctcaaattacagaaatgtttaatgtagacaagtaaattccatcttaaattcccctcttgcagatgaggtatttatgtccagattttatttcatgcatatgtggacattattatgataacgatttttatgaaactggaatcttatttcatcaactctaaaatgctcagttgaaaatacaccgttattttgtgtatcactaagaaagaagaaaactcctaaatacagcacactgatgggtcttgactcttcatmcaatttgccagtctgtgtcttttaattggagcatttagtccatttacatttaaagttaatattgttatgtgtgaatttgatcctgtcattatga

SEQ ID NO: 724236 - DNA, 2190 bp, Homo sapiens
tggacaaatattgtctgtgtttcagtacaactttatttattggcaccaagatttgaatttcatgtaattttcatgtgccacaaaatttgatttttcttttgatttttcaaagccgttttaaaatgtaaagaacattcttagcccatagggccatacaaaagtctcgcaggctatagttttgctgaccaagttctacctggttaccagaattagctaagtaaaatataagtctgaacatttcattcgaatgcttaaacccatcaaaggtttgccaacagggactacaagaataaggcttaccttacttaaaatggcttattgattccctcatgatcacaggtccagcatcatagcttgccagttcatagcttgcactgcactcttcagaatgctgacctccttgcagtatcctgtccacactgagatacttctttttgaggccttgacctcccttcctggagtgtctcccatttacctttatttttctctttctttatctctcttcctttcttcttcttctttttttttttttaaatattgtattagaattgttggtttatttgcttcactaagaggtttccctagtgagacacggaacaaccatgtctcgttctattctgtgttcttatcatttcacttcctgcccagggccctgctaaagtaggctcttcataaatatttgctgaatgcatgtatacatgcatgcatgcatgaatgaatggacaaatgaataagtggaatggaatagttaaatgagccaattttgatattttgctaataaccctgaccaagctgttggtgagttcacaggttgaaaccagtacaggcagttcttaacataggaatgtgttgagttccaaaagtttgtttggaaattggttgttcagaacttggaacatgttttcccatataaagatgttataaactaaactatgcttaactattcagcttagtccacaaaaatattatttgaggcatcatgtcactgaaataaaattagaaaataactgaggtgtcaccttttcattttattaaaatattttaagcccacatttcatctcaagaaactctaaaagacattttctggcactgtgtaatgttataaatgaaacaaaactgaatgctggtaaaggcttagtgtgggtaaagcagggagataaagagattgtgaaaattttatgggaaactgagtgtttttaagagcatcaattctttactatttttgttctacttcagaaattatcgttttctttgccatgctcaatgtttatcacaagaactccttttgagatcattggaaagattatggcccttttttgagaatcaaatgtaaagatatatagacacattttagagacctcctccaaaaaaaatcttcaccattcacttccaacctcctttaacaaaattttggtttatctaatttgtttctcttgctttagaaatattaattaatatttaatattaatttttctttctctcttcattttcctttctgattcatcagtatttttcatatggtcttcaatttccttggaccttggtacaggaacaggtaggtaccagtagagccaatgattaaaccacgttcctcaattcattttcatttactaattgacttgtttgttaaatattccctttatttaacacatatttattaaaatgctttctaactgtaaggcagaaggccaggctctgtatcatttagggaaaagggttggaaaaacaaaatgaagttaataagaatgaaaggaagttagaagaggaagaataagacatggtattcagaaaccacagagatctaggtctttcttggtaataggatatgctcattgtaaaaactcctcaaattacagaaatgtttaatgtagacaagtaaattccatcttaaattcccctcttgcagatgaggtatttatgtccagattttatttcatgcatatgtggacattattatgataacgatttttatgaaactggaatcttatttcatcaactctaaaatgctcagttgaaaatacaccgttattttgtgtatcactaagaaagaagaaaactcctaaatacagcacactgatgggtcttgactcttcatacaatttgccagtctgtgtcttttaattggagcatttagtccatttacatttaaagttaatatkgttatgtgtgaatttgatcctgtcattatga

SEQ ID NO: 724237 - DNA, 2140 bp, Homo sapiens
tttatttcttgtttttgttctaatatggctaactccttatgattgtatagtgactcaggatccttcaatctaatggctctgcaatctgagtctagggtgaaagacatgttgttgaggattgtggagaggttttaggatccaggcatggaagtgacaggcttgacttctcttatcccattcggcagcactcagtcacatgacctcaactaactgcaagggcagttggaaaaagagtggtcttcctgtgtgtccaggaggacacttaaacaccgagtattggtgaacacagagtatagtatctgccacaaggaactagaagtgccccctgcttcttctctgacttacctcagttttctatatctccttgaaaagaaaacacatttcaatcttgatcttggagctttccatgagtggcgacctggtctcatcaaagagctttaaagaccatttattttttttctttccagtgctggctcctataacttgcttttcaacttattaaatctttcccagcccaaccattttttttcttattgactctccaaggattccattgccatacaatcaccactgctgggaaaatgctccctatctcaagtggattactcagtttttcccaccttgtccaaattacatgttcttggggcacaattccccgctgctcgtcatctttctaagccrtgagtgtgtgtgatgtcttcatgtcccacaggcacttacccttaagggagatctgctcattatcaagggcaaggttatagatgaatcactgagagttctaccattgtgcacagaaatttggtgtgaagggctattttactaagaccctgaaacacaatattccccatctgttcataaagtagcttatttgatacacacaatgtggtcataaatgctcttctattctctgaatgcttgcttttggtcatgaactggcacacactcaaggaaaaaatgacaatgtgcctctatggacacttttggtccatttccataaatatattcaaacaaaatgaaattgcctggctctttataatatgtcctttagtgtgtttaagcttgcaaaattacccccaaggatgacaaattgtaaacatcatgcaataccacagccctgggtcaaggcctgtctcagtgttctaccggcattcgcccttcttagaaacgtttaaagtgttttaggaaaatgaagctaggcaaacaagcttatcaggagcgacaataaaaaaaaatcattgattctaattaggaggcgtcacgtatacagaaacaaagctgcttttgtgtaatgaaaactctacctgttctctgaaacacatggagtgctttccagtggctttagataatcacgctgacaaagtttcagggccctgaccttttggcccatctcaagtgattcagcagtgcttgtcgaaacttgtctaaggtgttggtggaaggtgtactgggatacaagttgttataaaggtgtgacaatgggacaggtgccgtttgtttctgaaagctccaaactgcatcgtaaattgaggtgggaagtattcaggttcttgcggcatggattgagtttattgtaattatctctagttgtccctccctgtagcaagtatttcccccagcagcctagtgaattgacccactgctggtgaggactctaacttcttacagcttgggtcaccccgatcgtgttctattgtgtgtcctggaaaggccagatttagattgtgactctggttttgtgctgtgcccatagaatgaggctttatggtggaatcagtcaagaacagagctgtataatctgaataagggagaaatcactccaactgcttactctattgagatagtaaatcaaaacaaacaactgtgtcactatcacttttcaagaattcagaacttcggaaaaaatgaatgtcactagaccacagagtcaggaaaatagatcttggtaaatcaatgggcaatttagtttaaaattaagagtacatattgaccatttgcagtgtcaatgatttattttcaaggaggaatttcataaaaggcatttttagttgcctgattatacatttcctccaaagatggtttgctaattgccatcagtgagtaataggggttgccaaaaaggaaaaataaagtccattgtgtt

SEQ ID NO: 724238 - DNA, 965 bp, Homo sapiens
cataactttttcatgtgcttacttgtcatacttatatattctttggtgaattgttgttaatcttttgctcatatttattgttattttcaacataaactctcatccgcatccaaagtttgtcctggtttgttccccctctcttcagttatagaagatcccatttatgcaaagttcttgctttctttgcaacaggactcagaatttaccacttaaccctggaaggcacatctgttccttaaatcaattatgttaacttcactgactacaaatgaagggycttcttgtatttttctatttacaaatgcttgaattttttaatataaccatctttataagaagcatgtatgctaactatattttgatatatacttaaatctcaaaaaggagaaagttgccataactgtctctttagtatggcatactaagccaataaacattgttaaaattgtacagttcacatatttgtttttggtaatagagttcactgtacaaaccaagaagccaacttcatattaaatctttgtccatttcttggatgtttttaataacaactaatttctgatctaggtcaacagttctatcacgtaccttgctttatcctgcagcttttgtcttatcaaaaaaattgctttcatgagatgattatcataaattacacacaaatatagttaacaactgttttaatagcactagactgaatgaaagcaatacacttttcagaggtcattttatactacatgttttgataagacaaaaggaactgtgcataacttatacagctgcctaaacaaagtatttacatcccacatactcttgtattttttaacatcttatgtgcaagtatgtatttatcaaatattaggaagactgagaacccatattatttgtgcatttgtgcttccatgtgtgttttttttcttttacacatgatattctggtatattgaatgatatcacattttacta

SEQ ID NO: 724239 - DNA, 965 bp, Homo sapiens
cataactttttcatgtgcttacttgtcatacttatatattctttggtgaattgttgttaatcttttgctcatatttattgttattttcaacataaactctcatccgcatccaaagtttgtcctggtttgttccccctctcttcagttatagaagatcccatttatgcaaagttcttgctttctttgcaacaggactcagaatttaccacttaaccctggaaggcacatctgttccttaaatcaattatgttaacttcactgactacaaatgaagggccttcttgtatttttctatttacaaatgcttgaattttttaatataaccatctttataagaagcatgtatgctaactatattttgatatatacttaaatctcaaaaaggagaaagttgccataactgtctctttagtatggcatrctaagccaataaacattgttaaaattgtacagttcacatatttgtttttggtaatagagttcactgtacaaaccaagaagccaacttcatattaaatctttgtccatttcttggatgtttttaataacaactaatttctgatctaggtcaacagttctatcacgtaccttgctttatcctgcagcttttgtcttatcaaaaaaattgctttcatgagatgattatcataaattacacacaaatatagttaacaactgttttaatagcactagactgaatgaaagcaatacacttttcagaggtcattttatactacatgttttgataagacaaaaggaactgtgcataacttatacagctgcctaaacaaagtatttacatcccacatactcttgtattttttaacatcttatgtgcaagtatgtatttatcaaatattaggaagactgagaacccatattatttgtgcatttgtgcttccatgtgtgttttttttcttttacacatgatattctggtatattgaatgatatcacattttacta

SEQ ID NO: 724240 - DNA, 965 bp, Homo sapiens
cataactttttcatgtgcttacttgtcatacttatatattctttggtgaattgttgttaatcttttgctcatatttattgttattttcaacataaactctcatccgcatccaaagtttgtcctggtttgttccccctctcttcagttatagaagatcccatttatgcaaagttcttgctttctttgcaacaggactcagaatttaccacttaaccctggaaggcacatctgttccttaaatcaattatgttaacttcactgactacaaatgaagggccttcttgtatttttctatttacaaatgcttgaattttttaatataaccatctttataagaagcatgtatgctaactatattttgatatatacttaaatctcaaaaaggagaaagttgccataactgtctctttagtatggcatactaagccaataaacattgttaaaattgtacagttcacatatttgtttttggtaatagagttcactgtacaaaccaagaagccaacttcatattaaatctttgtccatttcttggatgtttttaataacaactaatttctgatctaggtcaacagttctatcacgtaccttgctttatcctgcagcttttgtcttatcaaaaaaattgctttcatgagatgattatcataaattacacacaaatatagttaacaactgttttaatagcactagactgaatgaaagcaatacacttttcagaggtcattttatactacatgttttgataagacaaaaggaactgtgcataacttatacagctgcctaaacwaagtatttacatcccacatactcttgtattttttaacatcttatgtgcaagtatgtatttatcaaatattaggaagactgagaacccatattatttgtgcatttgtgcttccatgtgtgttttttttcttttacacatgatattctggtatattgaatgatatcacattttacta

SEQ ID NO: 724241 - DNA, 965 bp, Homo sapiens
cataactttttcatgtgcttacttgtcatacttatatattctttggtgaattgttgttaatcttttgctcatatttattgttattttcaacataaactctcatccgcatccaaagtttgtcctggtttgttccccctctcttcagttatagaagatcccatttatgcaaagttcttgctttctttgcaacaggactcagaatttaccacttaaccctggaaggcacatctgttccttaaatcaattatgttaacttcactgactacaaatgaagggccttcttgtatttttctatttacaaatgcttgaattttttaatataaccatctttataagaagcatgtatgctaactatattttgatatatacttaaatctcaaaaaggagaaagttgccataactgtctctttagtatggcatactaagccaataaacattgttaaaattgtacagttcacatatttgtttttggtaatagagttcactgtacaaaccaagaagccaacttcatattaaatctttgtccatttcttggatgtttttaataacaactaatttctgatctaggtcaacagttctatcacgtaccttgctttatcctgcagcttttgtcttatcaaaaaaattgctttcatgagatgattatcataaattacacacaaatatagttaacaactgttttaatagcactagactgaatgaaagcaatacacttttcagaggtcattttatactacatgttttgataagacaaaaggaactgtgcataacttatacagctgcctaaacaaagtatttacatcccacatactcttgtattttttaacatcttatgtgcaagtatgtatttatcaaatattaggaagactgagaacccatattatttgtgcatttgtgcttccatgtgtgttttttttcttttacacatgatattctggtatattgaatgataycacattttacta

SEQ ID NO: 724242 - DNA, 2631 bp, Homo sapiens
aactgggattcccagtctctgaggttaagcaggagcaggtagcattaccctgtaagctgggagtcgcaataggcaattagttacctgactgtcccagggcttggcactgcctggtagccctgccttttcataaggaaaagattccgcacaaagcactttacctaggttttgtgagaggcggagccagagctggcatccgaggtgttctcacaatgctggactttgaggcacaggagagaattgcatttctcctctgagcagtggaaccagccctggtgcctcccttgcccagcctcaccctgggaccctgggtgtgagtagttagtcttgttatcagtgagagtaacccaggaatctccctgatggggaaatcccaggtaatttactgtgkctctgatattccggttacagcctctgctctagaaaggccagggaggggagaatctaaaagttctccatttctcgcttgagatggcatccccccatgctttccttaggcctccttgagtaaggtgtctgcaaatagcttctcagcatgacttcacccggaagctcatctgagtgactcacagcctgctttaggcacctcctccagggagacgctcttacccttgcccccaccccaacaggggaggggaggggagaagggaaaccccctaactgagccacggagaaggccttgccagagcactgtggaaaatacctgcagcccagcttggccctgcttcaggtgccctgggatgtatggtttctctagtcttctgagagggatcaagctgacaattcaaatttgagggagcgatgaccctggaaactgtgtaggtcttaaaaagaaatatatatccaaacacactgacctgaaaagatgtccacaaaatacaggattcagcattaggtgaaaaataatttcattatgttcctgtttctcaaattcggtttgtgattttaaaaaattgataggttagtacatgtatttgtacatgtactatttgtactaaaagcctatttgaagaaaaattataatatattaataatagttatctctgggaggtagtattaaaagaaactttattcattattcctttctgatttttaaaaaataatcataattacctttataataaaaaaaaaaaaggtgggccaggtacagtggttcatgcctataatcccagcactttgcaaggccaaggcagattgcttgagcccaggatttcaagaccagcctgagcaacatggtgagaccttgtctctacaaaacatttttagaaacttagctgggtgtggtggtgtacccctgtggtcccagctaattgggaggctgaggcaggaggattgcttgagcccaggagtttaacgctgcagtgacctgggaggcggaggctgcagtgagccaaggtcacaccactgcacttcagcctgggcaacaaggaggctctgtctcaaaaaaaaaaaaagctgcagtgagccatgatcatgccatttcccttctgcctgggtaatagagcaagaccctgtctcaaaaagaaagggttgtttttttgttttgctttgtcttcaaaaaaataaaaagaaaaatcctcatgcaccaagcccaggtgtcctaattgtgtcctcattattaaatgcctaacttcccgtggtggactgttagcaggaagcgactgggatggacttaacattcacttagcaaacagctacctccctagccactggaggaccaaaccactatgacagggtgtctcccttcagtggctcccagcatgatggagggggtagtatatgttttgcggggcatttggggttttggggggaggttagggggttttttgagacagagtctccttctgtcacccaggctggagtgcagtggtgtgattatggctcactgcagccctgacctcacaggctcaagagatcctcccacctcagcttcccaagaagctgggaccattacgcctggctaattttatttattattatgtatttttttttaagagacagagtcccactatgttgcccaaactggtctcagtgatcctcccaccttggtctcccaaagttctgagattacaagtgggagccaccatgccccctgaccaaccaccaccctgcacccaaggccaagggctcgataaatactttgcaaacaaatggatatgtaaatgagtagatactaagtggtctgtgagagaaggctacagattgtggtggggcttcagaaggtctcgagaggtcccttgctggggattaggttaggcctcgtgatggtgcttctgggatattccttttctctaggatttaaatgtctcatttaagaacaatttttttttttttttttgagacagagtctccctctattgcccaggctggagtgcagtggcgcgatctcagctcactgcagcctccgcttcccaggttcaagtgcttctcatgcctctgcctcccaagtagctggcgctacaggcgtgcaccactatgccctgctaattttttgtatttttagtagagatggggtttcaccatgttggccaggctggtcttgaactcctgacctcaaatgatccacccacctaggcctccccaagtgctgggattacaggcatgagccaccactcccagcataagaacaat

SEQ ID NO: 724243 - DNA, 2631 bp, Homo sapiens
aactgggattcccagtctctgaggttaagcaggagcaggtagcattaccctgtaagctgggagtcgcaataggcaattagttacctgactgtcccagggcttggcactgcctggtagccctgccttttcataaggaaaagattccgcacaaagcactttacctaggttttgtgagaggcggagccagagctggcatccgaggtgttctcacaatgctggactttgaggcacaggagagaattgcatttctcctctgagcagtggaaccagccctggtgcctcccttgcccagcctcaccctgggaccctgggtgtgagtagttagtcttgttatcagtgagagtaacccaggaatctccctgatggggaaatcccaggtaatttactgtgtctctgatattccggttacagcctctgctctagaaaggccagggaggggagaatctaaaagttctccatttctcgcttgagatggcatccccccatgctttccttaggcctccttgagtaaggtgtctgcaaatagcttctcagcatgacttcacccggaagctcmtctgagtgactcacagcctgctttaggcacctcctccagggagacgctcttacccttgcccccaccccaacaggggaggggaggggagaagggaaaccccctaactgagccacggagaaggccttgccagagcactgtggaaaatacctgcagcccagcttggccctgcttcaggtgccctgggatgtatggtttctctagtcttctgagagggatcaagctgacaattcaaatttgagggagcgatgaccctggaaactgtgtaggtcttaaaaagaaatatatatccaaacacactgacctgaaaagatgtccacaaaatacaggattcagcattaggtgaaaaataatttcattatgttcctgtttctcaaattcggtttgtgattttaaaaaattgataggttagtacatgtatttgtacatgtactatttgtactaaaagcctatttgaagaaaaattataatatattaataatagttatctctgggaggtagtattaaaagaaactttattcattattcctttctgatttttaaaaaataatcataattacctttataataaaaaaaaaaaaggtgggccaggtacagtggttcatgcctataatcccagcactttgcaaggccaaggcagattgcttgagcccaggatttcaagaccagcctgagcaacatggtgagaccttgtctctacaaaacatttttagaaacttagctgggtgtggtggtgtacccctgtggtcccagctaattgggaggctgaggcaggaggattgcttgagcccaggagtttaacgctgcagtgacctgggaggcggaggctgcagtgagccaaggtcacaccactgcacttcagcctgggcaacaaggaggctctgtctcaaaaaaaaaaaaagctgcagtgagccatgatcatgccatttcccttctgcctgggtaatagagcaagaccctgtctcaaaaagaaagggttgtttttttgttttgctttgtcttcaaaaaaataaaaagaaaaatcctcatgcaccaagcccaggtgtcctaattgtgtcctcattattaaatgcctaacttcccgtggtggactgttagcaggaagcgactgggatggacttaacattcacttagcaaacagctacctccctagccactggaggaccaaaccactatgacagggtgtctcccttcagtggctcccagcatgatggagggggtagtatatgttttgcggggcatttggggttttggggggaggttagggggttttttgagacagagtctccttctgtcacccaggctggagtgcagtggtgtgattatggctcactgcagccctgacctcacaggctcaagagatcctcccacctcagcttcccaagaagctgggaccattacgcctggctaattttatttattattatgtatttttttttaagagacagagtcccactatgttgcccaaactggtctcagtgatcctcccaccttggtctcccaaagttctgagattacaagtgggagccaccatgccccctgaccaaccaccaccctgcacccaaggccaagggctcgataaatactttgcaaacaaatggatatgtaaatgagtagatactaagtggtctgtgagagaaggctacagattgtggtggggcttcagaaggtctcgagaggtcccttgctggggattaggttaggcctcgtgatggtgcttctgggatattccttttctctaggatttaaatgtctcatttaagaacaatttttttttttttttttgagacagagtctccctctattgcccaggctggagtgcagtggcgcgatctcagctcactgcagcctccgcttcccaggttcaagtgcttctcatgcctctgcctcccaagtagctggcgctacaggcgtgcaccactatgccctgctaattttttgtatttttagtagagatggggtttcaccatgttggccaggctggtcttgaactcctgacctcaaatgatccacccacctaggcctccccaagtgctgggattacaggcatgagccaccactcccagcataagaacaat

SEQ ID NO: 724244 - DNA, 2631 bp, Homo sapiens
aactgggattcccagtctctgaggttaagcaggagcaggtagcattaccctgtaagctgggagtcgcaataggcaattagttacctgactgtcccagggcttggcactgcctggtagccctgccttttcataaggaaaagattccgcacaaagcactttacctaggttttgtgagaggcggagccagagctggcatccgaggtgttctcacaatgctggactttgaggcacaggagagaattgcatttctcctctgagcagtggaaccagccctggtgcctcccttgcccagcctcaccctgggaccctgggtgtgagtagttagtcttgttatcagtgagagtaacccaggaatctccctgatggggaaatcccaggtaatttactgtgtctctgatattccggttacagcctctgctctagaaaggccagggaggggagaatctaaaagttctccatttctcgcttgagatggcatccccccatgctttccttaggcctccttgagtaaggtgtctgcaaatagcttctcagcatgacttcacccggaagctcatctgagtgactcacagcctgctttaggcacctcctccagggagacgctcttacccttgcccccaccccaacaggggaggggaggggagaagggaaaccccctaactgagccacggagaaggccttgcyagagcactgtggaaaatacctgcagcccagcttggccctgcttcaggtgccctgggatgtatggtttctctagtcttctgagagggatcaagctgacaattcaaatttgagggagcgatgaccctggaaactgtgtaggtcttaaaaagaaatatatatccaaacacactgacctgaaaagatgtccacaaaatacaggattcagcattaggtgaaaaataatttcattatgttcctgtttctcaaattcggtttgtgattttaaaaaattgataggttagtacatgtatttgtacatgtactatttgtactaaaagcctatttgaagaaaaattataatatattaataatagttatctctgggaggtagtattaaaagaaactttattcattattcctttctgatttttaaaaaataatcataattacctttataataaaaaaaaaaaaggtgggccaggtacagtggttcatgcctataatcccagcactttgcaaggccaaggcagattgcttgagcccaggatttcaagaccagcctgagcaacatggtgagaccttgtctctacaaaacatttttagaaacttagctgggtgtggtggtgtacccctgtggtcccagctaattgggaggctgaggcaggaggattgcttgagcccaggagtttaacgctgcagtgacctgggaggcggaggctgcagtgagccaaggtcacaccactgcacttcagcctgggcaacaaggaggctctgtctcaaaaaaaaaaaaagctgcagtgagccatgatcatgccatttcccttctgcctgggtaatagagcaagaccctgtctcaaaaagaaagggttgtttttttgttttgctttgtcttcaaaaaaataaaaagaaaaatcctcatgcaccaagcccaggtgtcctaattgtgtcctcattattaaatgcctaacttcccgtggtggactgttagcaggaagcgactgggatggacttaacattcacttagcaaacagctacctccctagccactggaggaccaaaccactatgacagggtgtctcccttcagtggctcccagcatgatggagggggtagtatatgttttgcggggcatttggggttttggggggaggttagggggttttttgagacagagtctccttctgtcacccaggctggagtgcagtggtgtgattatggctcactgcagccctgacctcacaggctcaagagatcctcccacctcagcttcccaagaagctgggaccattacgcctggctaattttatttattattatgtatttttttttaagagacagagtcccactatgttgcccaaactggtctcagtgatcctcccaccttggtctcccaaagttctgagattacaagtgggagccaccatgccccctgaccaaccaccaccctgcacccaaggccaagggctcgataaatactttgcaaacaaatggatatgtaaatgagtagatactaagtggtctgtgagagaaggctacagattgtggtggggcttcagaaggtctcgagaggtcccttgctggggattaggttaggcctcgtgatggtgcttctgggatattccttttctctaggatttaaatgtctcatttaagaacaatttttttttttttttttgagacagagtctccctctattgcccaggctggagtgcagtggcgcgatctcagctcactgcagcctccgcttcccaggttcaagtgcttctcatgcctctgcctcccaagtagctggcgctacaggcgtgcaccactatgccctgctaattttttgtatttttagtagagatggggtttcaccatgttggccaggctggtcttgaactcctgacctcaaatgatccacccacctaggcctccccaagtgctgggattacaggcatgagccaccactcccagcataagaacaat

SEQ ID NO: 724245 - DNA, 2631 bp, Homo sapiens
aactgggattcccagtctctgaggttaagcaggagcaggtagcattaccctgtaagctgggagtcgcaataggcaattagttacctgactgtcccagggcttggcactgcctggtagccctgccttttcataaggaaaagattccgcacaaagcactttacctaggttttgtgagaggcggagccagagctggcatccgaggtgttctcacaatgctggactttgaggcacaggagagaattgcatttctcctctgagcagtggaaccagccctggtgcctcccttgcccagcctcaccctgggaccctgggtgtgagtagttagtcttgttatcagtgagagtaacccaggaatctccctgatggggaaatcccaggtaatttactgtgtctctgatattccggttacagcctctgctctagaaaggccagggaggggagaatctaaaagttctccatttctcgcttgagatggcatccccccatgctttccttaggcctccttgagtaaggtgtctgcaaatagcttctcagcatgacttcacccggaagctcatctgagtgactcacagcctgctttaggcacctcctccagggagacgctcttacccttgcccccaccccaacaggggaggggaggggagaagggaaaccccctaactgagccacggagaaggccttgccagagcactgtggaaaatacctgcagcccagcttggccctgcttcaggtgccctgggatgtatggtttctctagtcttctgagagggatcaagctgacaattcaaatttgagggagcgatgaccctggaaactgtgtaggtcttaaaaagaaatatatatccaaacacactgacctgaaaagatgtccacaaaatacaggattcagcattaggtgaaaaataatttcattatgttcctgtttctcaaattcggtttgtgattttaaaaaattgataggttagtacatgtatttgtacatgtactatttgtactaaaagcctatttgaagaaaaattatamtatattaataatagttatctctgggaggtagtattaaaagaaactttattcattattcctttctgatttttaaaaaataatcataattacctttataataaaaaaaaaaaaggtgggccaggtacagtggttcatgcctataatcccagcactttgcaaggccaaggcagattgcttgagcccaggatttcaagaccagcctgagcaacatggtgagaccttgtctctacaaaacatttttagaaacttagctgggtgtggtggtgtacccctgtggtcccagctaattgggaggctgaggcaggaggattgcttgagcccaggagtttaacgctgcagtgacctgggaggcggaggctgcagtgagccaaggtcacaccactgcacttcagcctgggcaacaaggaggctctgtctcaaaaaaaaaaaaagctgcagtgagccatgatcatgccatttcccttctgcctgggtaatagagcaagaccctgtctcaaaaagaaagggttgtttttttgttttgctttgtcttcaaaaaaataaaaagaaaaatcctcatgcaccaagcccaggtgtcctaattgtgtcctcattattaaatgcctaacttcccgtggtggactgttagcaggaagcgactgggatggacttaacattcacttagcaaacagctacctccctagccactggaggaccaaaccactatgacagggtgtctcccttcagtggctcccagcatgatggagggggtagtatatgttttgcggggcatttggggttttggggggaggttagggggttttttgagacagagtctccttctgtcacccaggctggagtgcagtggtgtgattatggctcactgcagccctgacctcacaggctcaagagatcctcccacctcagcttcccaagaagctgggaccattacgcctggctaattttatttattattatgtatttttttttaagagacagagtcccactatgttgcccaaactggtctcagtgatcctcccaccttggtctcccaaagttctgagattacaagtgggagccaccatgccccctgaccaaccaccaccctgcacccaaggccaagggctcgataaatactttgcaaacaaatggatatgtaaatgagtagatactaagtggtctgtgagagaaggctacagattgtggtggggcttcagaaggtctcgagaggtcccttgctggggattaggttaggcctcgtgatggtgcttctgggatattccttttctctaggatttaaatgtctcatttaagaacaatttttttttttttttttgagacagagtctccctctattgcccaggctggagtgcagtggcgcgatctcagctcactgcagcctccgcttcccaggttcaagtgcttctcatgcctctgcctcccaagtagctggcgctacaggcgtgcaccactatgccctgctaattttttgtatttttagtagagatggggtttcaccatgttggccaggctggtcttgaactcctgacctcaaatgatccacccacctaggcctccccaagtgctgggattacaggcatgagccaccactcccagcataagaacaat

SEQ ID NO: 724246 - DNA, 595 bp, Homo sapiens
aaatccattcctttttttacttttgcttcctcaaagggcttccccctctctgtgtacttctctgttaactctctttcctgttttctgaattcctccacttcctcttcctttttgtctatttgtgtccattccaggggccaagcctctcctttcaccgccacctcttcccagccccattgctcctctcttcaccctcacttctgcttctggtgtctcttctcctgtctcttcagttgacactcattactttcttcctctttgcaaagtaaagctgaattccatgtcctggctttgttgtcttgtaggacacttctattttcccttatgttatacaggtgctcytcaacttataatggggttacatcctcataaaccagtcataaattaaaaatatcatatgttgaaaacacaatgtatctcaaacattatagcttagcctcatctatctgaaatatgctcagaacatttacattagtctgcagttaggaaaaataatctaacacaaagcctattttataataaagtgtggaagacctcatgtaatttattgagtactgtgctgaaagtgaaagacagaatggttgtatgggtacac

SEQ ID NO: 724247 - DNA, 2192 bp, Homo sapiens
ttttctgtactataatcctcagtgcttagacaaagcctgacatatagcaagagttcaataaatagtagtataatcataagtaatgctctcttgctaaaactaattacaatggttacctctggagaggggcaatggattgttgaaaggtaaggtrtgaagacttccttttctctacttacccttttgtaccttttagattttaataccatgtgtatgtattttctacccacccccaatttttaaatcgggacaaaaataattttaataaacagatttatcttgttgcttttgaataaacattaaaatcaagatttttttcatcgcaatgctaccctgtagcatatcagccatcctttgaaattttgtgcagtttataaattaaagagcatgctttctatatctttatgtcagttgagcgttttgcagagttcctagacataggaagggctacatacatgttggtaattcaaaatctgaaaaagagggaaataatgttgtacaggcattattttttagtgaactagagggaatttctgaacaatatattcattcttttctaagggtctatgaatatttagcataataacacattcttagattctaccagcagtcagtgtcaaatatattggtttataagttttaagaatccaccattttcccctttttgaaaatcacttatcaatttcagcttttctagccctagtcttattctccaaagatactgggaatgaatttaaagctgctcagcacactcattcaattccatgagatgtaaagtagttggatgtgaagaactgatctcatcaaagtagtaatacaagattttaccttctgtttacttatcctgggatcccagtatctctttctgtatgtttcaattttccaacttaagaatcactgtccattttaaattagggagctcaaataagaattgagaagcccttccctcccttttctcataccctatcactacagcatcttccacaaacagtgggcctctctggctcacactcttctcactgttctctttgccctcaaatattatttaaccaaacaaaactggttgtctttcatttttggaccatgttctttacaatgactttagcctagagcattcctatgtagatacgtttgtctcttgaaatgtcttttattttcactgccctctaaattttccagcatcgttttcaaaactcccttagtcaccactgaaataatctaattgttgaataaaatcacaactaactaatccaaagatcttgatgtaacatttagccagttatttctttgaagatgtagagaatgagatagatgatagaaataaagggagagaaagattttgtttttcacagctagacaaaaagacagattttgtctttcacagtctgagcaagctgtgctcatatttacttatcctgtgttgatctcagaaaactaactcatacccttgtgcccatggggttagattattataattcccttctagtcaagcttccagcaataacttgggaatgaagaaaatgaaaaataacacaaaaggaactatttggctaaattaaatactgtgaatcagaaaggtgcacatgttttaggaagtcatgactgacctgtgtttagcacagatccttacacaaaggaggcatttaacataagtctactaagttgaattgaaccgcaatggtttctcactttacaaaagataataaaagctttctgtaatccttgcaatccatgctcccagggatagacaataaaatgggcaagataaccaataatgcttctctcaaccctcagaatcagaagtaaaaaagagatggagagaggagagcctatgagcagggcaatgagcagggtggttttcttggaacagtaagttcatgaagggaaagttaacctgaaagcctttataatatttatcaatgtattttaaaagtatgtaagcatcctaaatttaatttaacctaatttgaattccctatattaaagaacatatattgtacttacttccagaaatggtattgattgtatccagaggatatgcccacagaaataaattgcattagttttccaaactcttttattcatcttatatgtttctttaaagatagtaatggcacagtgtaatgttccttaccatttcaatagaactgtagctttctcaaaagaaagaagatggaaatttataccttctg

SEQ ID NO: 724248 - DNA, 2192 bp, Homo sapiens
ttttctgtactataatcctcagtgcttagacaaagcctgacatatagcaagagttcaataaatagtagtataatcataagtaatgctctcttgctaaaactaattacaatggttacctctggagaggggcaatggattgttgaaaggtaaggtgtgaagacttccttttctctacttacccttttgtaccttttagattttaataccatgtgtatgtattttctacccacccccaatttttaaatcgggacaaaaataattttaataaacagatttatcttgttgcttttgaataaacattaaaatcaagatttttttcatcgcaatgctaccctgtagcatatcagccatcctttgaaattttgtgcagtttataaattaaagagcatgctttctatatctttatgtcagttgagcgttttgcagagttcctagacataggaagggctacayacatgttggtaattcaaaatctgaaaaagagggaaataatgttgtacaggcattattttttagtgaactagagggaatttctgaacaatatattcattcttttctaagggtctatgaatatttagcataataacacattcttagattctaccagcagtcagtgtcaaatatattggtttataagttttaagaatccaccattttcccctttttgaaaatcacttatcaatttcagcttttctagccctagtcttattctccaaagatactgggaatgaatttaaagctgctcagcacactcattcaattccatgagatgtaaagtagttggatgtgaagaactgatctcatcaaagtagtaatacaagattttaccttctgtttacttatcctgggatcccagtatctctttctgtatgtttcaattttccaacttaagaatcactgtccattttaaattagggagctcaaataagaattgagaagcccttccctcccttttctcataccctatcactacagcatcttccacaaacagtgggcctctctggctcacactcttctcactgttctctttgccctcaaatattatttaaccaaacaaaactggttgtctttcatttttggaccatgttctttacaatgactttagcctagagcattcctatgtagatacgtttgtctcttgaaatgtcttttattttcactgccctctaaattttccagcatcgttttcaaaactcccttagtcaccactgaaataatctaattgttgaataaaatcacaactaactaatccaaagatcttgatgtaacatttagccagttatttctttgaagatgtagagaatgagatagatgatagaaataaagggagagaaagattttgtttttcacagctagacaaaaagacagattttgtctttcacagtctgagcaagctgtgctcatatttacttatcctgtgttgatctcagaaaactaactcatacccttgtgcccatggggttagattattataattcccttctagtcaagcttccagcaataacttgggaatgaagaaaatgaaaaataacacaaaaggaactatttggctaaattaaatactgtgaatcagaaaggtgcacatgttttaggaagtcatgactgacctgtgtttagcacagatccttacacaaaggaggcatttaacataagtctactaagttgaattgaaccgcaatggtttctcactttacaaaagataataaaagctttctgtaatccttgcaatccatgctcccagggatagacaataaaatgggcaagataaccaataatgcttctctcaaccctcagaatcagaagtaaaaaagagatggagagaggagagcctatgagcagggcaatgagcagggtggttttcttggaacagtaagttcatgaagggaaagttaacctgaaagcctttataatatttatcaatgtattttaaaagtatgtaagcatcctaaatttaatttaacctaatttgaattccctatattaaagaacatatattgtacttacttccagaaatggtattgattgtatccagaggatatgcccacagaaataaattgcattagttttccaaactcttttattcatcttatatgtttctttaaagatagtaatggcacagtgtaatgttccttaccatttcaatagaactgtagctttctcaaaagaaagaagatggaaatttataccttctg

SEQ ID NO: 724249 - DNA, 941 bp, Homo sapiens
gcgtgcctgtagtcccagctacttgggaggctgaggcaggagaatcactcgaacctgggaggcggagggtatagtgagctgagattgtgccactgcactccagcctggtgacagggtgagactccttctcmcaaaataataataataataattattattatatatatttgacttaatacaattgtgaataaaatcccattaaattatatttcttttgcttctcattgtcatacatctttctcaattgtgatgtgcagaaatatcactggtttattttatttctaaaagtttgactataatgcagcagaaaaaaacataaattagaatatattttcatattttacctttcaaacctacatttttttaacttttattttaaggtctggggtacatatgcaggtttgttatataggtaaacttgtgtcatgggggtttatagtaaagattatttcatcatgcaggtattaaacctagtacctattagtcatttttcctgatctctctctcctcccaccctccacctttgggtaagccccactgtctgttgttcccctccatgtgtccatgtgttctcatcatttggctctcacttataagtgagaacatgtagtatttggttttctgttcctgcatcagttttctaaggataacagcctccagctccatccatgttcctgcaaaggacaggatctcattctttatttatagctgcatagtattccatggtgtatatgtacttcatcttctttatccagtctaccattaatgggcaattaggttggttccttgtctttgctattgcaaatagtaaaacaacatttttaaatggaattttaagtctcagattttgtgcgccctcaaaaggctgagaacaaaaaagtagactagcacttccatattccgaaggaaatgggaaaaccaattttgtaactctttacctc

SEQ ID NO: 724250 - DNA, 941 bp, Homo sapiens
gcgtgcctgtagtcccagctacttgggaggctgaggcaggagaatcactcgaacctgggaggcggagggtatagtgagctgagattgtgccactgcactccagcctggtgacagggtgagactccttctccmaaaataataataataataattattattatatatatttgacttaatacaattgtgaataaaatcccattaaattatatttcttttgcttctcattgtcatacatctttctcaattgtgatgtgcagaaatatcactggtttattttatttctaaaagtttgactataatgcagcagaaaaaaacataaattagaatatattttcatattttacctttcaaacctacatttttttaacttttattttaaggtctggggtacatatgcaggtttgttatataggtaaacttgtgtcatgggggtttatagtaaagattatttcatcatgcaggtattaaacctagtacctattagtcatttttcctgatctctctctcctcccaccctccacctttgggtaagccccactgtctgttgttcccctccatgtgtccatgtgttctcatcatttggctctcacttataagtgagaacatgtagtatttggttttctgttcctgcatcagttttctaaggataacagcctccagctccatccatgttcctgcaaaggacaggatctcattctttatttatagctgcatagtattccatggtgtatatgtacttcatcttctttatccagtctaccattaatgggcaattaggttggttccttgtctttgctattgcaaatagtaaaacaacatttttaaatggaattttaagtctcagattttgtgcgccctcaaaaggctgagaacaaaaaagtagactagcacttccatattccgaaggaaatgggaaaaccaattttgtaactctttacctc

SEQ ID NO: 724251 - DNA, 941 bp, Homo sapiens
gcgtgcctgtagtcccagctacttgggaggctgaggcaggagaatcactcgaacctgggaggcggagggtatagtgagctgagattgtgccactgcactccagcctggtgacagggtgagactccttctcccaaaataataataataataattattattatatatatttgacttaatacaattgtgaataaaatcccattaaattatatttcttttgcttctcattgtcatacatctttctcaattgtgatgtgcagaaatatcactggtttattttatttctaaaagtttgactataatgcagcagaaaaaaacataaattagaatatattttcatattttacctttcaaacctacatttttttaacttttattttaaggtctggggtacatatgcaggtttgttatataggtaaacttgtgtcatgggggtttatagtaaagattatttcatcatgcaggtattaaacctagtacctattagtcatttttcctgatctctctctcctcccaccctccacctttgggtaagccccactgtctgttgttcccctccatgtgtccatgtgttctcatcatttggctctyacttataagtgagaacatgtagtatttggttttctgttcctgcatcagttttctaaggataacagcctccagctccatccatgttcctgcaaaggacaggatctcattctttatttatagctgcatagtattccatggtgtatatgtacttcatcttctttatccagtctaccattaatgggcaattaggttggttccttgtctttgctattgcaaatagtaaaacaacatttttaaatggaattttaagtctcagattttgtgcgccctcaaaaggctgagaacaaaaaagtagactagcacttccatattccgaaggaaatgggaaaaccaattttgtaactctttacctc

SEQ ID NO: 724252 - DNA, 941 bp, Homo sapiens
gcgtgcctgtagtcccagctacttgggaggctgaggcaggagaatcactcgaacctgggaggcggagggtatagtgagctgagattgtgccactgcactccagcctggtgacagggtgagactccttctcccaaaataataataataataattattattatatatatttgacttaatacaattgtgaataaaatcccattaaattatatttcttttgcttctcattgtcatacatctttctcaattgtgatgtgcagaaatatcactggtttattttatttctaaaagtttgactataatgcagcagaaaaaaacataaattagaatatattttcatattttacctttcaaacctacatttttttaacttttattttaaggtctggggtacatatgcaggtttgttatataggtaaacttgtgtcatgggggtttatagtaaagattatttcatcatgcaggtattaaacctagtacctattagtcatttttcctgatctctctctcctcccaccctccacctttgggtaagccccactgtctgttgttcccctccatgtgtccatgtgttctcatcatttggctctcacttataagtgagaacatgtagtatttggttttctgttcctgcatcagttttctaaggataacagcctccagctccatccatgttcctgcaaaggacaggatctcattctttatttatagctgcatagtattccatggtgtatatgtacttcatcttctttatccagtctaccattaatgggcaattaggttggttccttgtctttgctattgcaaatagtaaaacaacatttttaaatggaattttaagtctcagatttkgtgcgccctcaaaaggctgagaacaaaaaagtagactagcacttccatattccgaaggaaatgggaaaaccaattttgtaactctttacctc

SEQ ID NO: 724253 - DNA, 1029 bp, Homo sapiens
ttcacaggggttctctgaatttacacgtcaacctctctagcaaggttggggaaattttggtggacaatatcctcaactatgtttctcaagttgcttgctctctctccatctctttcaggaagaccaatgagttgcaagcttggtatctttacacgatccagtatttctcagagattttgttcattttgttattaaatagttttcaaatgccaatttactgagttttctttcttgtatgtcattttaaaccaattacctcctctaagcttaagtttcctcatatgtcaaacatacccacctctgcagtgttatttaagaatcaatgaaataatgttcttaaaacgctgaacccaatacctggatgtagtaaagattcaatagatgataactatgatatctacttatccattgtcaatttagtgttctttcagatttgtaagtactcctattaagttttatgtattctaataaacataaacttgatgaaatgattgaaaatattttctctcattctaccatgttcttcattatcttaattttgcttgttcttactgtatggatggctttataaaataaatatttgtgaaagagggtctgtggacctttgctaatactgtagctttattttctgaattctgtgataatgattttggtggttaaaatgtgtagagggtggagagttcactctttgattcacaatcatttcctaaaattgcccaaaaagtgatcttcagaaaagtaagatgttacatagtgtttaccctgcaaatgtttgtattcatgtgactctagaaatctgatttacaggaaaatactccccttgcttccctttggccaagcaacacctgaagaaaaatgtggtgacagctcccatgctggagcccttcacttttattcaagaggtcgctggggttttttcccaaatagttttaggtactgcagccacaaaaagggttgacaactagtttwaaaagctactacaatgcattttactttttaatatcttatttgccaactaagaaatctaga

SEQ ID NO: 724254 - DNA, 1051 bp, Homo sapiens
gttcctttccttcataatacttaagtcttaactgcatatgtatttgtctgtaaatttgttattctttttcttcctgctatactatcggatttttragaacaggaactagagctgttttattcaccaccctatcccagcaccttcaaaaagtccctctctatagcagacactcaaaaattggtcaaatggtgatattcacaacaacctaataaagtagataccattatcttaatttttacaaaagaggaaattggcattcacagaatgacttgctccagttaatcaataatctgccaaacccagattcaaacccagtctacatgatcttaaagcttatggttgtatctttgctagatgataaccttcctctaatagaaagatgaaatctgtattagtctgccagggctgccatgacaaagtatcacaaactggttggcttacacaacagaaatgtgttgtctcagaattctgtaggctagaagtgtgagattaaggtgctggcagggttggttccttctgagggatgtgagggaggctctgttccagacctctgtcccagcttccggtggtttgctgatcatctttggtggaccatcgcttgtagatacatcattccgatctctgcctccatcttcatgtgtcattcaccgtgtgtgtccaaatgtcttctttttatatagaaacagtcacataggattatggcccaaactaataaccccatcttaacttcatcatctgcaccacttctatttccaaataaggtcatatctgagttaatgggggttagtactttaacatatgaatttgggagagaacacaattcaacccataatagtacatttttagcaaatgactgactaatctcaaggcatagtaattggttttgtgttaaatgtactattcataatgtagaaaaatgttctaaaaaaggggataagtatcctagttttatcctaacattaaacttaaagagccattcagtcatcttttctagaagatcatgagaatctcaaagattatgtgatcagggactcagaacttggatgtttta

SEQ ID NO: 724255 - DNA, 1051 bp, Homo sapiens
gttcctttccttcataatacttaagtcttaactgcatatgtatttgtctgtaaatttgttattctttttcttcctgctatactatcggatttttaagaacaggaactagagctgttttattcaccaccctatcccagcaccttcaaaaagtccctctctatagcagacactcaaaaattggtcaaatggtgatattcacaacaacctaataaagtagataccattatcttaatttttacaaaagaggaaattggcattcacagaatgacttgctccagttaatcaataatctgccaaacccagattcaaacccagtctacatgatcttaaagcttatggttgtatctttgctagatgataaccttcctctaatagaaagatgaaatctgtattagtctgccagggctgccatgacaaagtatcacaaactggttggcttacacaacagaaatgtgttgtctcagaattctgtaggctagaagtgtgagattaaggtgytggcagggttggttccttctgagggatgtgagggaggctctgttccagacctctgtcccagcttccggtggtttgctgatcatctttggtggaccatcgcttgtagatacatcattccgatctctgcctccatcttcatgtgtcattcaccgtgtgtgtccaaatgtcttctttttatatagaaacagtcacataggattatggcccaaactaataaccccatcttaacttcatcatctgcaccacttctatttccaaataaggtcatatctgagttaatgggggttagtactttaacatatgaatttgggagagaacacaattcaacccataatagtacatttttagcaaatgactgactaatctcaaggcatagtaattggttttgtgttaaatgtactattcataatgtagaaaaatgttctaaaaaaggggataagtatcctagttttatcctaacattaaacttaaagagccattcagtcatcttttctagaagatcatgagaatctcaaagattatgtgatcagggactcagaacttggatgtttta

SEQ ID NO: 724256 - DNA, 1051 bp, Homo sapiens
gttcctttccttcataatacttaagtcttaactgcatatgtatttgtctgtaaatttgttattctttttcttcctgctatactatcggatttttaagaacaggaactagagctgttttattcaccaccctatcccagcaccttcaaaaagtccctctctatagcagacactcaaaaattggtcaaatggtgatattcacaacaacctaataaagtagataccattatcttaatttttacaaaagaggaaattggcattcacagaatgacttgctccagttaatcaataatctgccaaacccagattcaaacccagtctacatgatcttaaagcttatggttgtatctttgctagatgataaccttcctctaatagaaagatgaaatctgtattagtctgccagggctgccatgacaaagtatcacaaactggttggcttacacaacagaaatgtgttgtctcagaattctgtaggctagaagtgtgagattaaggtgctggcagggttggttccttctgagggatgtgagggaggctctgttccagacctctgtcccagcttccggtggtttgctgatcatctttggtggaccatcgcttgtagatacatcattccgatctctgcctccatcttcatgtgtcattcaccgtgtgtgtccaaaygtcttctttttatatagaaacagtcacataggattatggcccaaactaataaccccatcttaacttcatcatctgcaccacttctatttccaaataaggtcatatctgagttaatgggggttagtactttaacatatgaatttgggagagaacacaattcaacccataatagtacatttttagcaaatgactgactaatctcaaggcatagtaattggttttgtgttaaatgtactattcataatgtagaaaaatgttctaaaaaaggggataagtatcctagttttatcctaacattaaacttaaagagccattcagtcatcttttctagaagatcatgagaatctcaaagattatgtgatcagggactcagaacttggatgtttta

SEQ ID NO: 724257 - DNA, 612 bp, Homo sapiens
aaaaaagaaataaagaaagaaaacatggagatgcttgctttgcgtctccccatacttcttcctcctgcctcctgccttgaccacactatttggagccacagacaataccagaaagaaacctcacagctctcaggctgatggtatgtatccgtttgagcatccattgaagttaaggtcccacagatttctaatgactactaaggcagcagtggggaaattgctttctaatgcagccattatttcattgtctcctaaaagaccagagtaaattatacacctcctcctctcccccaaaaacctgtccaaagtggccagatccaaagactaggcctccagagcagtgcctggggtgttttgtttcagagtccyggagtggagcggtttctgaagtcatttcacttcatcttgcaacccctctaattcctagccctcaccagtcagctaagttttttagagatcacttgctcaaggccagtctaggggtcgattttactcagctactcccccaggtctcttttcactgtcctctgctttgcattgttaatttcctctctgaaggtgcattttaactttgttagcaggtctgacactggctgcttgcaaggagcagca

SEQ ID NO: 724258 - DNA, 1302 bp, Homo sapiens
tgctcctctctgacaccaaattcaatcaactgcttgcttttttgaaagtgctcaagtgaactcaggatctgtttccttactccctcagaggggaagggcggttaattaaatggcagcatagttcaataaaaaggacatsggtttgatgtattagcaagtcatctttctctgagttttgttttctcattggtaaaatagggagagtaagacccatatgacacaagatactatcctttactcccagtggaattttctcaggtcagaagatgctagaaaaaagtgagtctaaggctcttaatgaagcttgtaacttgggagttggttgcagggataattctagggacacagcaccaccagccaagctttagtaaagacaaaccaaaagacaggaatatgaaaatgatctcaatataaatttgcatatcaaaaaaaatcaaaaccctaactgtttaggtcaacagagtccagtggattccaaacccaatgaaatagacactggtgtgtgcattagtgcaaaggtaccaaatctcttgcacactggctgtacaactggcctgagcaaacacactaatcctcaaagtcaatggatatctctgagtcaagtcatagggttatgtttgagttaacacctccaccctccagattaccccaagaggcaatttaggcagtgcccattcacagctgctctcccaaaatgcagcattggttttgagagaagttggcaagctcagtaggtgagccaaggggcacatgatgtaggtgagaatgttgaaaggagggaagtttgctcattgctcatgccatttaagaaggaagatgatagctctaacactgacactgccagagaaaaaccaaccattgacaatacaaagacgtctaaccagcctttcccctcaaaccaataaattcagaaatgtgggacctcatcatattcatccaaagagcaaccaaacccaaaggaaggtggcaagggaaaacagacttgcctgtctgcaattttcacttagagagggagtcaatgctgagctgcactggtttacaaaacacagctctttacttgtacctcatctcacattgcagcatttggattcacactattgccgggtaggtagggcaggtgttcttaatccaatttacagatttgcggcttttgagtgctgaaacaacttactcttagtgacatcttctgaatagattaacagagctaaattctcaaccttacctgagtcactatggcaggagtgagatgtttcaactacctctgcaaacatctctgtatccccagcatttagcacaatgcct

SEQ ID NO: 724259 - DNA, 963 bp, Homo sapiens
tttctttgctgccctcatcaaaaccctgaaccatctcttacaatcatgactatttttatagatcatgcttcctactaatacacctaagccagccagacagaaagctcagagctcacagaccctaaaatgcagttgtgcaccttccataaggacaacatgtcctctgggccagasgaagacaagagagatccttaaatattgaagaaaaccaaattaaaactactttaagaggggatacaggttcacttaacaactaagtggcagcagttggaactctctgatttacactgaggcttctcagcttaagtaccaaggcatcaggtcaactttattttgaagcacctgctcactgtgtgccagatccagtcacaaatagcaactaaactgactggctgaggaaaaaaaacacattagagaaatatggacatgaggataagaggcacgtttgcaggtatcctcttaacctctacatattctctcctatgaggaagaaaacatggtaaagaggggtcaaactgccccaaattcaaatgctgccactgccacctacaaagtgcgcaaatttagacaatttactaaagttctatctgtcaaatggtcagtatagagataaaactatataatgcatgttgaaatataatggtgcttactaaacagcaggttatcaggtaaattttttcttttcttcatccttctaaggtatcaattcagtagccctaagagcacattcccaagagctatgaaaccacctgaatctggaggcttaattatcctaggctgacacactcaggagacctaaagatattgagaaaagaggcatgcaaatttctctaacctatttctttaggaaaactatctgctaacaaggtaacaaaggcttaccccatcacacaggagagggtgaactgcagaagaaagagggtgtcagcccagccttcaaactccacagcctgcaacacacaa

SEQ ID NO: 724260 - DNA, 963 bp, Homo sapiens
tttctttgctgccctcatcaaaaccctgaaccatctcttacaatcatgactatttttatagatcatgcttcctactaatacacctaagccagccagacagaaagctcagagctcacagaccctaaaatgcagttgtgcaccttccataaggacaacatgtcctctgggccagacgaagacaagagagatccttaaatattgaagaaaaccaaattaaaactactttaagaggggatacaggttcacttaacaactaagtggcagcagttggaactctctgatttacactgaggcttctcagcttaagtaccaaggcatcaggtcaactttattttgaagcacctgctcactgtgtgccagatccagtcacaaatagcaactaaactgactggctgaggaaaaaaaacacattagagaaatatggacatgaggataagaggcacgtttgcaggtatcctcttaacctctacatattctctcctatgaggaagaaaacatggtaaagaggggtcaaactgccccaaattcaaatgctgccactgccacctacaaagtgcgcaaatttagacaatttactaaagttctatctgtcaaatggtcagtatagagataaaactatataatgcatgttgaaatataatggtgcttactaaacagcaggttatcaggtaaattttttcttttcttcatccttctaaggtatcaattcagtagccctaagagcacattcccaagagctatgaaaccacctgaatctggaggcttaattatcctaggctgacamactcaggagacctaaagatattgagaaaagaggcatgcaaatttctctaacctatttctttaggaaaactatctgctaacaaggtaacaaaggcttaccccatcacacaggagagggtgaactgcagaagaaagagggtgtcagcccagccttcaaactccacagcctgcaacacacaa

SEQ ID NO: 724261 - DNA, 1125 bp, Homo sapiens
tagctgtgtgagaacagactaatacacgatccatgctactgcatttaatgtatcactatggaaatgcattttctttttagatgcagagattgaagaaaccaaaattaatggccatttctgggaattttagccctgttcaagaggtctgctatagtttttcctttctgtagctagtaggttcttatactaccttttaggaagaaatgttctactattatgaaaggaccttaagtcacttggagacactgaggtcactacaaattttgagttagttacttctttttttttttttttttgagacagagtcttgctctgtcgcccaggctggagtgcagtggcagcctccacctcccgggttcaagcgattctcctgcctcagcctcctgagtagctggtactacaggcatgtgccaccatgcccggctaatgaattagttacttctaaggctgtatcaataaattccagacttaaaatatckgtttatttttactgttaatcaaggtaggacgtcatttctttgcacatgccttggtattttcattggttaaattttattgtcagtatggaaaaataaaaatcagaggaaatgtatacagtatttctgtgatttgttttaagaatttaattatagattttaatcttgatgtggtttttttcaaaaacatgtaccaggttttatatcatcccagtaaataattttgtctgaaggtcaaatgtttttaagagtgtttcatggaaatgaatatattttcttaattttataattgaccaaatttttataatgtaaaagagaaattaatgaatgctgtattgaaaggtaatcactctgcagttgatcccgctataatttctatttatttaagaattatgaatcatcagctaaaatactgaaaatatttgctttaataatagactatgagtattttgtattttagtaaattttgtattggaactatcaaatagagtcacaacttcacccgtttcaatttttatggttgttctttattgactgcataacaattctatttgcagaaattccttcaagatttatcactgagtttttattcatatgattaaaaatatattaaaatataagctattactattatatgcgttatgaagga

SEQ ID NO: 724262 - DNA, 608 bp, Homo sapiens
ggacaayatggtgaaaccctgtccctaccaaaaaaaaaaaaaaaattagccaggcgtagtggcacatgcctgtagtcccagctacttgggaggctgaggtgggagaattgcttgaacccaggaggcggaggttgcagtgagccaagattgtgccactacactccagcctgggcaacagagcgaggccccaaggaatatatttacttgttattagttacttgttatgaataagccatctgaaaggatcaacaagaaaccaaaacacaagctgcattagggtaaactcttgtaccatttgaatttgaaccatgaaaatgtcttacctagtcaccaaattaaaaaagattttatttttttatttttttttcttccctaaggatgaggttttaaaaaggtgtggtttggactcagcagttctacttttacgtattgaacctggagaaacactcacataggtgccccaacagacatatgcatggatgttccctataatgctatttatggtcataaaataatgagaaatcacctaaatagacatgagtagagggaagctaaactgtgatacacccacatctggaatactatgcctcagaatgaagatgacccta

SEQ ID NO: 724263 - DNA, 608 bp, Homo sapiens
ggacaacatggtgaaaccctgtccctaccaaaaaaaaaaaaaaaattagccaggcgtagtggcacatgcctgtagtcccagctacttgggaggctgaggtgggagaattgcttgaacccaggaggcggaggttgcagtgagccragattgtgccactacactccagcctgggcaacagagcgaggccccaaggaatatatttacttgttattagttacttgttatgaataagccatctgaaaggatcaacaagaaaccaaaacacaagctgcattagggtaaactcttgtaccatttgaatttgaaccatgaaaatgtcttacctagtcaccaaattaaaaaagattttatttttttatttttttttcttccctaaggatgaggttttaaaaaggtgtggtttggactcagcagttctacttttacgtattgaacctggagaaacactcacataggtgccccaacagacatatgcatggatgttccctataatgctatttatggtcataaaataatgagaaatcacctaaatagacatgagtagagggaagctaaactgtgatacacccacatctggaatactatgcctcagaatgaagatgacccta

SEQ ID NO: 724264 - DNA, 807 bp, Homo sapiens
tttttcctgtataagagcatccacctatccaccttacattgtattaaaaaacaaaaatggaggcaataaaggattggttaaataaattagggtacatctattgcattacgcactacaatatgaggaggaaatattcaatgacatggaagccatggttaaccagtaggcaatgtttgctaaacaccrtgtaaggtgtaatcacattttggtatatattttacattttaaaatgacaggaaaggccgggtgcggtggctcacgcctgtaatcccagcactttaggaggctgaagtgggtgaatcacgaggtcaggagtttgagaccagcctgaccaacatggtgaaaccccatctctaaaactacaaaaattagctgggcatggtggcatgctgtaatctcagctactcaggaggctgaggcaggagaatcgcttgaactcaggaagcagaggttgcagtgggccgaggtcgcgccactgcactccagcctgggcaacaaagcaaaactccatctcaaaaaaaaaaaaaaaaaaaaagacgtatattaaaatggtaaccatggtatttctggatggtgagattgataataattgatttatatttccattattttatttagttgtattttttcaaatgttttcaataattatatatcacttgtggattaatattctacacattttgaaatcaggctcttttaggactaaaatatgacttgacaactccactaaattcagttgcaaagtgggttgtatatgtgtgcaatgaaccagggcttgagaaagaagaggcatggaaagtctcatta

SEQ ID NO: 724265 - DNA, 807 bp, Homo sapiens
tttttcctgtataagagcatccacctatccaccttacattgtattaaaaaacaaaaatggaggcaataaaggattggttaaataaattagggtacatctattgcattacgcactacaatatgaggaggaaatattcaatgacatggaagccatggttaaccagtaggcaatgtttgctaaacaccgtgtaaggtgtaatcacattttggtatatattttacattttaaaatgacaggaaaggccgggtgcggtggctcacgcctgtaatcccagcactttaggaggctgaagtgggtgaatcaygaggtcaggagtttgagaccagcctgaccaacatggtgaaaccccatctctaaaactacaaaaattagctgggcatggtggcatgctgtaatctcagctactcaggaggctgaggcaggagaatcgcttgaactcaggaagcagaggttgcagtgggccgaggtcgcgccactgcactccagcctgggcaacaaagcaaaactccatctcaaaaaaaaaaaaaaaaaaaaagacgtatattaaaatggtaaccatggtatttctggatggtgagattgataataattgatttatatttccattattttatttagttgtattttttcaaatgttttcaataattatatatcacttgtggattaatattctacacattttgaaatcaggctcttttaggactaaaatatgacttgacaactccactaaattcagttgcaaagtgggttgtatatgtgtgcaatgaaccagggcttgagaaagaagaggcatggaaagtctcatta

SEQ ID NO: 724266 - DNA, 807 bp, Homo sapiens
tttttcctgtataagagcatccacctatccaccttacattgtattaaaaaacaaaaatggaggcaataaaggattggttaaataaattagggtacatctattgcattacgcactacaatatgaggaggaaatattcaatgacatggaagccatggttaaccagtaggcaatgtttgctaaacaccgtgtaaggtgtaatcacattttggtatatattttacattttaaaatgacaggaaaggccgggtgcggtggctcacgcctgtaatcccagcactttaggaggctgaagtgggtgaatcacgaggtcaggagtttgagaccagcctgaccaacatggtgaaaccccatctctaaaactacaaaaattagctgggcatggtggcatgctgtaatctcagctactcaggaggctgaggcaggagaatcgcttgaactcaggaagcagaggttgcagtgggccgaggtcgcgccactgcactccagcctgggcaacaaagcaaaactccatctcaaaaaaaaaaaaaaaaaaaaagacgtatattaaaatggtaaccatgktatttctggatggtgagattgataataattgatttatatttccattattttatttagttgtattttttcaaatgttttcaataattatatatcacttgtggattaatattctacacattttgaaatcaggctcttttaggactaaaatatgacttgacaactccactaaattcagttgcaaagtgggttgtatatgtgtgcaatgaaccagggcttgagaaagaagaggcatggaaagtctcatta

SEQ ID NO: 724267 - DNA, 621 bp, Homo sapiens
caggttctttcagctgccatattgtaatgaaaaggggttgggtttggatgaagacagaccaaggtgtgattcccagctgtctactcctagctacccgacaatggaaaagttacttaactttgctttctcatctgtaaaatgactaacagtcacttctcatattgtacaaaaygtctgtcttaagggatgttgcaaaacaaaacaaaacaaaacaaaacaaaacaaaacaaaacaaaacaaaacaaaacaaaattgctctccagccagactctacaagctgtgagtccaactcaccaaatcttcacatcctgccccccaaagtagactggtaaagaaaaggctgaagtcatgtctcagcatttgagcattgctctctagtcattgctctagagagttctaatcttggggctactgataataaggggccatgcagagaagatagtgaagccctcctccacccgctgtaacctgctagtcagtcatcaatgattcttaaagcactgcctctgcctgctctcaggaaggtgagatgacgcatcacttgcttttgttttcacacctgtcccctgggaacctttgctcaaagttgtaaattatgtgacatctttagtaacaacaacg

SEQ ID NO: 724268 - DNA, 878 bp, Homo sapiens
aattgacaggcctttggggactaggctggccaatatgttcctgggccatggcataatctttatttttagaagaggttcccaatttgagatgatcaaacaccccaccccagtctctcattgggccctggaggctcattgttacttggtgtcttatttctgtttggggtgatgagtctatctggaaataagcaaatttgttgggtcaaagctggctaagtctctgcctggggaaggatttcacagaagtccagaggccatatccttaaggttgtactcctgatgtcttttgaggggttatccagtcattccatcatagggaggctgatggcagtgggaccttcccaggcccccacccactctggaccctctgggactttctgtttgtaaaaagcaccagcaccaatgtattggcaaggagatttactaaaactcaacagtgagtaaactctcttactggtcattttgcatcatatgagggatttcaggcaaagaaaggatattaaaattgagtatctactatatatcagatactatatcagtgctttcatagatatcatctcactggagctctgtaatgacccagtgagttgcatggtttgtccaaatgactaaatgtcttgtctcagccactgccagaaaagagacattttaaccaagaatcaatggccatgtaattatgtgattgcattccaccaacttgtcttytgacagttactcatcagagctggtgttttaacatctgtttctgagccaaacaaatacaacttttattgatcccttgaaaactttgtctcctgctactttgtctttgcagcttctgtgtagacacctgaaggctccactggctgtatacctgccattcattgtattagctggct

SEQ ID NO: 724269 - DNA, 2782 bp, Homo sapiens
aagctcttttggagttttgaagtctttggggtaacacagagacacccatgagtgacagcagcaggtttctggagaaagggatgttcttgagggaccaaaagagagatgcttccagattgagaggagagtagtcggtaaagaagtaatgagcggaggcacaggtgggtggcagggaggggcttgctctgcttcccacgcagttcccctgaaaggaggaaggtccctggagagagaaaactgctgcagagggagtctaggtggatggagccatagacggacttgcagggatccctgatccctggttcctagcctgacagggaaggaacagagctgaattattcccttgccttcccacatgatgcagggaaagcagagagaaagccactagagcttcagggtgcaggaggaagaggaaatgtgagatgatgcttaggagcatatgtcagtgaccaaagacattgtcgtgcttcaaacctgctcttcccagagcaacctgatttcataaatgctccttaggactgggccaatggactgaaattatctcaaccacctggtggaaagtgaaaagcagggggggtcctcaatattaaaattaagttctaagaaaaagttatattttttcaacagctatgttgtgagctgatttatagatgctatctctatgattgctgtgcttggagagattcagccccccagaaggcccagtgctttgccacctcttaggatccacactactgtacctcttttactgtcaatatcagaagggctcagccacaagcccttggaagcttagaaaatttgtccttcctaagaccccagaattgtctcaggatttaactcttgaggcaggccaccctggaacgggttcactctgcatgtgtctataaccaggtggacttttataaccagatcatgtccaacaggggtataaaaagatccaatcgcatttaggagtccagataaatttcctagtaaatcaggagacaggctacataaatgtctcccacagagtctatgcatttaagatgtctagaaatagatgttaagcgacaggactaaaagcactggatgaatatttttcaagagcctctaattcttacctaccttgctgcctcactatggctgctactatattcctatgaatataagaaaagttaccctaggtcaaggtataaaccatctgtggctaagacagctgatggtcatcaaaatccacattctcctcttccttctggacacagggtagactacatttcccagccttccttgaagtaagtgtagtcacataaccgagttacagccagtgggactgggggaaagcagtgtgtgctgcttccaggcccagcctataaccctcccataggcactgctccatgctctttgtcctttgccaagaaaagagtggtgatcacagtagctttggttgccatgatctgaggacagmagcactttaggtcacatcggtgaccaaagacatcagactttgagtgatatggtccctgccaacgtccaggcctctttctggtttcttgggtataagtgtgaagactgtgagagagattgagggccacagtcctggctgttgacccttcttacgggagactttctatcagccaaacttgtagtatgtggtcattgaaactttcttcttaggtccaagaatgtcattatattgtcagtaacaatattcctggacaaagaggaagagagatgctaaagttttgtatcatatgatttctgaagttctctcctataatccttatgttagccctcagaggtcgtgatcctcttttataatagaaataaacaagattcagatgaatgtgcctgatcttagcagagccaattatccatgacacccagcctccatgagtgactgacatattactgaaatgaaatttgagggtgtttcatttgatggagaacatccaggtcaccatctttttataggccagctgttttttccatcttccttacttgcagagaaattaaaactgcatgatacatttcctgtagtgaagctaagcctgaagcctcaggacctgtgtgcacaggggcatggaagagaatgtgttttagccatgccataaataccttatcatacatgacttttacagaaatgtgacaagagcaacaaaaagaaagaaagaggcaactttgaaatctcaatgctcttggattcattcttatcacatacttgtgtcctggcacccccagaaagaccttggggcagaacaggcagactctctgaggctgggtcactatgcaacgtttctaacactcaaaagccaccgcttcgcctttttccttttccacaccattgcccctcaggtcagtaggtaaatgccctctgcggtaggtaatatactaacaacataaaccagcagtccacagaccctgactactcacccatgcctgtcactggaagaagggggtgggagcacaaggtaaatacaattttccctctttagccacaaaggatttaattcccccaagccctcttgataggaaaattcacaattatacgacttggaacactaaggttcaaacaagtttagatttgacaaaattcactgaattgtaccttaggatttgtgcatttcctcatatgtaaattctaccttaaaaacaacaataaaaaaaaaaacacctgactacactctcaccaggctggttacaattttaaaaagactgactataccaagtgtcagtgaggatgtggatcaactgggatgttcattagtggttggtgcataaacttgtgcaaacacttggaaagcca

SEQ ID NO: 724270 - DNA, 581 bp, Homo sapiens
ttcaggttcatctgtttgtatctcccactaaactatgagctttggggtggcagtgtcyggtcagtcttgctctctcccttctgctagctttgtttctaacactgttcctttatataatgagaccatgataaggatttcgcaaatgaataaactgacttcctccagggcaggagtcttgtaatatttatctttctttttccagttcctaatatataataaccactcaataattactagttaagcaaatgcatgccctcttcttactatatccctgtgagtccaaagatccatgctcggtttcctatttctgattaactgagtcacctttagaaaagtaactttaagcctcaatttccttctctgtaggatgcagtaatacttcctcatctgactacttggaactttttaagcaaaaataaactatatgggtaaaaattactcagcttttaccatgtgctaaaggcctgatgtatattaaagaatgtaatcctcataacaaaccttaaagtaggtattgttatccccattttacagataaggaaactgaagaacagaaagtttaattaacttggccaatacca

SEQ ID NO: 724271 - DNA, 581 bp, Homo sapiens
ttcaggttcatctgtttgtatctcccactaaactatgagctttggggtggcagtgtccggtcagtcttgctctctcccttctgctagctttgtttctaacactgttcctttatataatgagaccatgataaggatttcgcaaatgaataaactgacttcctccagggcaggagtcttgtaatatttatctttctttttccagttcctaatatataataaccactcaataattactagttaagcaaatgcatgccctcttcttactatatccctrtgagtccaaagatccatgctcggtttcctatttctgattaactgagtcacctttagaaaagtaactttaagcctcaatttccttctctgtaggatgcagtaatacttcctcatctgactacttggaactttttaagcaaaaataaactatatgggtaaaaattactcagcttttaccatgtgctaaaggcctgatgtatattaaagaatgtaatcctcataacaaaccttaaagtaggtattgttatccccattttacagataaggaaactgaagaacagaaagtttaattaacttggccaatacca

SEQ ID NO: 724272 - DNA, 1333 bp, Homo sapiens
ttttgtctgcctagctcttttcctttctgaagctgcccctgaataatgatgctttcctggtgcgactgttaatcacatagatttaattcccctgcccatgggaggggaattggctagccagtcagaatgcctcattcctttgttcatattcattggtccagagctgggaacacaacacaaacagggctgttcagaatcctacgaaagacttttcctggagctgtcaggaaagagacactctttttgctagggttactggtcatgaggaccatgtaagtctagagctttcgtagccatttttaccaccaagtgggaagagcctacttgagaacgaaaccaacacagttgcaaacgtcctaaggatgttgtttgagactctgaacccatctgcgcctaaagctagatcattcatggacttttctattaaattagccaatacattttctttttcatttttttgtttataccagtttgatttggatctctgtcccttgcaaccaaaagaagcctcactgatatagtctctgattaagtttccctcctttcattggtacayaggaaggaagctcagagtcaaaattgcagcccacatgtagcaagtggacaggatcctattgaatgaattttgtataatgggcttgtccctcgttttatcttcttttttctattctttttttcttcactcacattgtatcttgttatattttacatgtttttctaagccactacaaattctttttacaatatgacaataaatagtagagattgtttcccacattgtcctgaatctggactacaataaaactaaaggtttatttctaacgtacatcattggtttcctgtccagacttcatctctcccttctcttccaaccctggttttgtcctagaaatcactcttcttccatgtagcccatgtgctttagggaaggctgaccttaccacagcttcaggatgggcctgattaatccaagagtaacctcatccttgtaaggaattgattcaggaatttacaccactgagataccaggagaagtttgctggtggattctacttctgggagacctactgaaaatgaccttttccgtcttttactatatgttatggtgtgtgggtgtgagtcctgaaactgttgcagccatctcacccacctatttgaggattacgctgatggcgaaagagaacaaaacaaagaatgagaggaagttggagcagagccactagagtaagtcaagcctgagaactggtctatttgtgggttctggttatttgaaccaataagtattttcattcaagtcacttcgagttggttatacccttttttttttttattt

SEQ ID NO: 724273 - DNA, 550 bp, Homo sapiens
aaaagcactctgaaaatttctacttgtatgtctgaacatatataaacacacagagaaatacatattttacactcttggcagtaggcttaaagatatttgttcagcaaattttcttgggcccactaatttggccattctcatgttctcaattcacaaaactatctataataatagtccaaatataaattataagaatgaatttgttattatgcacttaaataagttcatagtaaaaagaccaacatatgtcaaggtagtgtttttccttaccatgataaaaataataagagctatctatgacaaacccacagccaatatcatactgaatgggcaaaaactggaagcattccctttgaaaactggcayaagacagggatgccctctctcaccgctcctattcaacatagtgttggaagttctggccagggcaatcaggcaggagaaggaaataaagggtattcaattaggaaaagaggaagtcaaattgtccctgtttgcagacgacatgattgtttatctagaaaaccccatcgtctcagcccaaaatctc

SEQ ID NO: 724274 - DNA, 789 bp, Homo sapiens
ttaatatggagctgctctttggaagtctaaaacatatttaaatctactgaacttcctctatgaacatagttacttactccctctagaattctaaatcagtacttctttttagaaaaaacactttagaaaataaagcatatattgaatgtctactaaccacaaagcatgtctgccaaaatagctggagatgtgaatacagctgggcttgcctagttgagacatgagtctcccaggttcctgtcatgctggaaccctgttggggccaccaaccagtcaagttttccctctgacactggcttcatgctttggcagaatgttccaaattctcctcagctccattaaatgcctgggcaatgcattctgcttgtcagtggaattcagctggttacttggagacccattcatgacttcctgactgcctgaaagacagcttgggggtaagaccttccctaagacccaggaggacgtcttttcaaagggaaggtcctctggccrtttaatatgatgacatcccagccacagagaactttcggagcctactttttatgctctgtgagtgtgcccatgctccccctcagacccagattcacatgttctagcctcgaccctcatcaaaacttacctccccctataaatgacccctggacaatgcagggacaggcactcccacttcggcctgcccttcagcacagcacgtaccccacacagaagtcccctgctggtgtttctctcccctcctgggcctggagcttcctctctggcccccagcccccagctcccagcctgtgc

SEQ ID NO: 724275 - DNA, 622 bp, Homo sapiens
tttgggaggccgaggcaggcggatcacctgaggtcaggcgttcgagaccagcctggccaacatagtgaaacaccgtctctactaaaaatacaaaaattagttgggcrtggtggcgcacacctgtaatcccagctacgtgggaggctgaggcaggagaattgcttgaacctgggaggtggggggttgcagtggcagtgagccgagatcgcgccactgcactccagcctgggtgacagaacaaaaatccagaaaaaaaaaaagaagaaaaaagaaaaacaggagccattgtcccttaaggtggaatgagttcctgttcgtggagctgtccaccactgccctgctgggatgagaaatgggctgaggggatgcgacacagaacaaacaaatcatctgctctaagccccaggatgaagaggggcaggtagaccctggctaaatcaggggctggcaggaggacataatggagacccagagggtgcatcagcgaaggccgagtgaagatcagagtgcagagatccgaaggagcctggagcacccagaccttgaactgcacacgctgcaggcgtcagcagtagatgccagcccagtactcaggaatgggaccagcccgtccagcattctg

SEQ ID NO: 724276 - DNA, 850 bp, Homo sapiens
tgggtaccacaaaccgcatgggatgtctaggaaggggctggaaggaagtcacggtgcactgagaatgtggtgtgccaggcggtgtgctatgtacctatgtgtccatgacctctttaattctcaaagcactcctgtgaggttcactttacaaatacaggactgaggctcagagagtcatgtagcttgcccaacaccacacagctcatgggtggtggagctgggcctgaacccacatgtctttctaactccaaaccacattctctttgcatgataccatgatagacactccatttcmgtagtgttaccgggagtgaaggccttgaaggatgggtgagaggtgagaagggagaaaggagggagtgggcattccaggctgagggaaaggaagaggagtgggcctgaggagcagcaggaattccaccagccccgcccagaagtggcccagtttttatcaccatcccaaatacatcgccttggtgtacatgaacttgctgagggcctagtttccatggctccgaagaggtgacatctccctcccacccctcatccaccctgagctccctggctgatttattcaatgtggtcatctgcaatggttgtggacctgtcaggatgacagattcgcctggggacatcctcctgtggaaggaactggattcatcccttgatcacttccatgccctgtgggtctctccctacctcttgctcattctacgagttatccctccattagccgggccgaagcatcctccaggcagggtttcctaattacctaatggtgaccatgctaccctttgccaaccttatgaaaagcatggccatgtccgttatctcatctgatcttttgctc

SEQ ID NO: 724277 - DNA, 623 bp, Homo sapiens
ggctggggtggaattttgtgtgtccatcacccgcctggagtgataatctaggatgtccaaggtttggaagaaagcagacgagagagaggggtctggagattgtcctcgtatctctgggcttatctccagggaggtctcttgctatttcctcaacccaagatttagactctgtccaggggggtaggctggggggcctctggcaaatccccgaagtttgggagaacctgggaatgggggctcgcttccccatccttcacactgagtcacattcatggctgctcagggcatagaaagtagggtgcaagatgttagcaggaacaatcctttgccaaacaaggaaagaactgctttttagggggaagtgtggctgtatcctagccgggtggctgtggccggcaagggccacaaggacagctctctgtcagctcttccctctggctggctctccagcggggtgtatctttagtatggttttaggccaagggttaaacagagatgacttcgtgtgaattttcaatttttgtttttaaaatagagacagagcctcactatgytgtccaggccagtctcaaactcctgggctcaagcgatcctcctgccttggcttcccaaagtgctgggat

SEQ ID NO: 724278 - DNA, 869 bp, Homo sapiens
gaaagtactatgagtgactggctccaagggaacttatgcaaagaaagctatttgatgttataaatttaggttctaaggctagttcagtcccttattcactggatgagtgaacaaaccacaaaatcttgagagctttaacctacttacctataagatagattttgaaaacagctacttcggcctggcgtggtggctcacgcctgtaatcccagcactttgggaagctgaggcaggtggatcacctgaggtcgggagttccagaccagcctgaccaacatggagaaaccctgtctctactaaaaatacaaaaaaattagctgggcgtggtggcgggtgcctgtaatcccagctactcgggaggctgaggsaggggaatcacttgaaccagggaggtggaggttgcggttagccgagatcacgccattgcactccagcctgggcaacaagagcaaaactctgtctcaaagaaaaaaaaagaaaacaactgcttcacaggactgttgtgaaaagtacatgcaatgctataagataaagtgtgtgtagaatttgattccaggagctatactacctaatcccaacccagctgtaccactcactaagtctaggtaacttgacctccctgaccctgtcacctctacaatgaaaggatggcttgacatacagagtgcatggaacagcacctggcacacaataaactcctgacatgtgtttgtgattctggctgatgttactgttataattctctcacaaaggcctaatttgcacccaagtttatattttctgcaaatgggtccaggctatgctctaagtttaacccacttaaaatacttggttccttggtgacttttctaaaatagcataataagtcc

SEQ ID NO: 724279 - DNA, 869 bp, Homo sapiens
gaaagtactatgagtgactggctccaagggaacttatgcaaagaaagctatttgatgttataaatttaggttctaaggctagttcagtcccttattcactggatgagtgaacaaaccacaaaatcttgagagctttaacctacttacctataagatagattttgaaaacagctacttcggcctggcgtggtggctcacgcctgtaatcccagcactttgggaagctgaggcaggtggatcacctgaggtcgggagttccagaccagcctgaccaacatggagaaaccctgtctctactaaaaatacaaaaaaattagctgggcgtggtggcgggtgcctgtaatcccagctactcgggaggctgagggaggggaatcacttgaaccagggaggtggaggttgcggtkagccgagatcacgccattgcactccagcctgggcaacaagagcaaaactctgtctcaaagaaaaaaaaagaaaacaactgcttcacaggactgttgtgaaaagtacatgcaatgctataagataaagtgtgtgtagaatttgattccaggagctatactacctaatcccaacccagctgtaccactcactaagtctaggtaacttgacctccctgaccctgtcacctctacaatgaaaggatggcttgacatacagagtgcatggaacagcacctggcacacaataaactcctgacatgtgtttgtgattctggctgatgttactgttataattctctcacaaaggcctaatttgcacccaagtttatattttctgcaaatgggtccaggctatgctctaagtttaacccacttaaaatacttggttccttggtgacttttctaaaatagcataataagtcc

SEQ ID NO: 724280 - DNA, 869 bp, Homo sapiens
gaaagtactatgagtgactggctccaagggaacttatgcaaagaaagctatttgatgttataaatttaggttctaaggctagttcagtcccttattcactggatgagtgaacaaaccacaaaatcttgagagctttaacctacttacctataagatagattttgaaaacagctacttcggcctggcgtggtggctcacgcctgtaatcccagcactttgggaagctgaggcaggtggatcacctgaggtcgggagttccagaccagcctgaccaacatggagaaaccctgtctctactaaaaatacaaaaaaattagctgggcgtggtggcgggtgcctgtaatcccagctactcgggaggctgagggaggggaatcacttgaaccagggaggtggaggttgcggttagccgagatcacgccattgcactccagcctgggcaacaagagcaaaactctgtctcaaagaaaaaaaaagaaaacaactgcttcacaggactgttgtgaaaagtacatgcaatgctataagataaagtgtgtgtagaatttgattccaggagctatactacctaatcccaacccagctgtaccactcactaagtctaggtaacttgacctccctgaccctgtcacctctacaatgaaaggatggcttgacatacagagtgcatggaacagcacctggcacacaataaactcctgacatgtgtttgtgattctggctgatgttactgttataattctctcacaaaggcctmatttgcacccaagtttatattttctgcaaatgggtccaggctatgctctaagtttaacccacttaaaatacttggttccttggtgacttttctaaaatagcataataagtcc

SEQ ID NO: 724281 - DNA, 869 bp, Homo sapiens
gaaagtactatgagtgactggctccaagggaacttatgcaaagaaagctatttgatgttataaatttaggttctaaggctagttcagtcccttattcactggatgagtgaacaaaccacaaaatcttgagagctttaacctacttacctataagatagattttgaaaacagctacttcggcctggcgtggtggctcacgcctgtaatcccagcactttgggaagctgaggcaggtggatcacctgaggtcgggagttccagaccagcctgaccaacatggagaaaccctgtctctactaaaaatacaaaaaaattagctgggcgtggtggcgggtgcctgtaatcccagctactcgggaggctgagggaggggaatcacttgaaccagggaggtggaggttgcggttagccgagatcacgccattgcactccagcctgggcaacaagagcaaaactctgtctcaaagaaaaaaaaagaaaacaactgcttcacaggactgttgtgaaaagtacatgcaatgctataagataaagtgtgtgtagaatttgattccaggagctatactacctaatcccaacccagctgtaccactcactaagtctaggtaacttgacctccctgaccctgtcacctctacaatgaaaggatggcttgacatacagagtgcatggaacagcacctggcacacaataaactcctgacatgtgtttgtgattctggctgatgttactgttataattctctcacaaaggcctaatttgcacccaagtttatattttctgcaaatgggtccaggctatgctctaagtttaacccacttaaaatacttggttccttggtgacttttctaaaatagcataatragtcc

SEQ ID NO: 724282 - DNA, 632 bp, Homo sapiens
tcaaaaaaaaaaaaaaagcatgctattaaaaaacaatataaacttaattttcgacattccaaatgagagatcaaaagtttcccaaatgcaagaagttatatgattattgccttcttgaggaaaaaaawgttccatttacattagcaacaaaaattataaaatagcttgaaatgaatttaacaagcattatataaaacatagatgaaaaaagttacaaaacctgaaaacaaatttgagacacatgcacattcctgaatagaaacatttggcattagccggatgtggtggcttacactggtaatcccagcactttgggaggccgaggcgggtggatcacctgaggttgggagtttgagaccagtctgaccaacatggagaaacccgtctctactaaaaatacaaaaattagccgggcatggtggtgcatgcctgtaatcccagctactcgggaggctgaggtgggagaattgcttgaacccaggaggcggaggttgtggtgagctgagatcacgccactgcactctagcctgggcaacaagagcgaaattccgtctcaaaaaaaaaaaagaaagaaaaaaaagaaagaaagacttggcatcattaaaatatcaatttcctcccaaactattaat

SEQ ID NO: 724283 - DNA, 632 bp, Homo sapiens
tcaaaaaaaaaaaaaaagcatgctattaaaaaacaatataaacttaattttcgacattccaaatgagagatcaaaagtttcccaaatgcaagaagttatatgattattgccttcttgaggaaaaaaaagttccatttacattagcaacaaaaattataaaatagcttgaaatgaatttaacaagcattatataaaacatagatgraaaaagttacaaaacctgaaaacaaatttgagacacatgcacattcctgaatagaaacatttggcattagccggatgtggtggcttacactggtaatcccagcactttgggaggccgaggcgggtggatcacctgaggttgggagtttgagaccagtctgaccaacatggagaaacccgtctctactaaaaatacaaaaattagccgggcatggtggtgcatgcctgtaatcccagctactcgggaggctgaggtgggagaattgcttgaacccaggaggcggaggttgtggtgagctgagatcacgccactgcactctagcctgggcaacaagagcgaaattccgtctcaaaaaaaaaaaagaaagaaaaaaaagaaagaaagacttggcatcattaaaatatcaatttcctcccaaactattaat

SEQ ID NO: 724284 - DNA, 632 bp, Homo sapiens
tcaaaaaaaaaaaaaaagcatgctattaaaaaacaatataaacttaattttcgacattccaaatgagagatcaaaagtttcccaaatgcaagaagttatatgattattgccttcttgaggaaaaaaaagttccatttacattagcaacaaaaattataaaatagcttgaaatgaatttaacaagcattatataaaacatagatgaaaaaagttacaaaacctgaaaacaaatttgagacacatgcacattcctgaatagaaacatttggcattagccggatgtggtggcttacactggtaatcccagcactttgggaggccgaggcgggtggatcacctgaggttgggagtttgagaccagtctgaccaacatggagaaacccgtctctactaaaaatacaaaaattagccgggcatggtggtgcatgcctgtaatcccagctactcgggaggctgaggtgggagaattgcttgaacccaggaggcggaggttgtggtgagctgagatcacgccactgcactctagcctgggcaacaagagcgaaattccgtctcaaaaaaaaaaaagaaagaaaaaaaagaaagaaagacttggcrtcattaaaatatcaatttcctcccaaactattaat

SEQ ID NO: 724285 - DNA, 1679 bp, Homo sapiens
aaataaactatggtaccaccatagccaggaagactatgctgcctttagactaatatgtcagatctatgagtactaagacccagacatggtcaaggtacattactaagtaaaaaaactgtcatcatgttccatgagtccctttctgttaaaattttttaaaagttaatgtctatataaaaaactctgggaatatacaccaaactgctgaaagtgattgtctttgaagagacaaatttcaaggaacttactttctacataatgaatttctatatttctataatgtttacattttatatgtcatatctacaataggcaaaaaaaaccccacaagagtaaaatgattttgttcaaagtttttccttttttttttttttttttttttttttttttactttaagttctgggatacatgtgcagaacgtgcaggttaaacaggtatacatgtgccatggtggtttgctgcgcccatcgacccatcagctacattaggtgtttctcctaatgctatccctccccttgcccctcaccccgacaggccctggtgtgtgatgttcccctccctgtgtccatgtgttctcattgttcaactccacttacgagtgagaacttgttcaaagttttaaaaaaactgagaaactgagaaagtttttaaattaaaccactctgctagtcatattcaagcatttctagagaaagaacctactagaagtaaacaccacaggccagactctagataatgtaaatcaggtaaggtaaatggaagaggttcgtctgtctcaacgctctcttggcccaccatctctgcccacatgaggaagctggcaagtagccacctggaactggtgggaactaagaaactcagaggtctcaccgttccttatctcaagaaagctttaatcaaggacaacaaggacagctccgcccacacaagctgtttacagattccaaaagcagtctataaggcagctcagcaacaaggagtcttaactaaaaatccacaagaattttatcactaaaattaatgaattgtcaaaaggcaaatttctggcaacagtcttttaaaattccagttagcacagtccagtgcttcccaaccttttccaagtctccgcacacacaggaaatgaaaatatttacagggcacaytgctgcaaacagaggatgcatgctgacagatgacagacccagggctcatgctcttgcagccccaggcctggtgggctgcaggcatgaatgctacgccatatgtgtcacagtcttggcacatctatcagaagggtctcgcacagggagagcatttgttttaaaagcttccttcaaaagtattactacattcaggccaggcatggtggctcacgcctgtaatcccagcactctgggaggctgaggtgggtggatcacctgacatcaggagttcgagaccagcctggccaacatggtgaaaccccctctctactaaaaatacaaaaaattcgctgggtgcggtggcgtgtgcctgtaatcccagctactcgggaggctaaggcaggagaatcgcttgaacccaggaggcgggaggttgcagtgagctgagatcacgccactgcactccagcctgggcaacagtgagactctgttgccaacaccacctcccccccgccaaaaaacagtattattgcattcatttagcaaatatttat

SEQ ID NO: 724286 - DNA, 1302 bp, Homo sapiens
tggtgaaaccccgtctctacaaaaatacaaaaatacaaaaaaaaaaaaaaattagcgtggtgtggtggtgtgcgcctgtaatcccagctatgtattacaaatttatattatgtggttagaacttgacatgtaatacatgtaatacatagtagctatatattacaggcgctatggctcacgcctgtaatcccagcactttgggaggccgagacgggcggatcacaaggtcaggagatcgagaccatcctggctaacacggtgaaaccctgtctctacaaaaaattagctgggtgtggtggcgggcacctgtactgccagctactcgggaggctgaggcaggagaatggtgtgaacccgggaggcagagtttgcagtgagctgagatcatgccactgcactccagcctgggtgacrgagcgagactccatcttaaaaaaaagaaataaggcctatatctatattcttttctttctcttacatggaaataaacagagcaactgtcataacagaaataagcataactggtatttacctctctgcctgtaaggatatgtcttgccaattttacttttgcaaaattccccttgccgattgttttcaacagtctgtagtttccgatgtgaggttgttcatctgcacaggaggctatagagtttctacaccgagctcctgagcggctggtacgagaggtaacttcttgacgcccatctccatgtgacgtgtgcggcaatacagcatacacaaagataaggaaatgagagaacacagagtacttgccaagttctaagagcttctaattgaagaaaaaacattcctactttaattttaatcttaaagtatctagcacttcaaaggaatttaaccacataatataaatttgaggaaaataaaaattctgagacgaaaaatacgaagtgttgaagttcaattgagtgttcaggaagaaattagatattttgcatacgtggctgtcatataaaataggagtaaaagggctaccttctggttatacagtgcttaacttttccatatgttagtaagtgcacctgcacacctgagcctcactacagcccgtgcagcaggggaaaagctaatgtcaccattcactagataaggatacagccacataactgttcagggggaaatccatagagaatctggattcccgatttccttctatactacactgctaacagtaattcaaaacaatgtgctttacagaaacagctagactgtgtggcccttaatagacgacccttgttgtatagatgaataaagtactcaatatgcttacttaataaa

SEQ ID NO: 724287 - DNA, 551 bp, Homo sapiens
cctctgatgcttgggtgcttagaatcagtgagaggggracccaagcatcagtatcttatttatttatttatttattatttagtttttgagatggagtctcactctgtctcccaggctggagtgcagtggcctgctctcagctcactgcaaactctgcctcccgggttcaagcaattctcctgtctcagcctcccgactagctgggattacaggcccctgccaccatgcccagctaatttttgtatttttagtagagacggagtttcacaatgttggccaggctggtcttgaactcctgaccttaggtgatccacctgcctcagcctcccaaaatgctgggatttcaggtgtgtgccaccgtgcccagccacatcagtattttttaaactcttcagtttaagcttactgactaaacccttttccacacaacatttcatttagtttaaagatgcctctcctgaaggctgtgatttccaactatccctttagagcaatgccaggcaattagcagttattacttgcagcccaggagaggagacgtatatggaagc

SEQ ID NO: 724288 - DNA, 551 bp, Homo sapiens
cctctgatgcttgggtgcttagaatcagtgagaggggaacccaagcatcagtatyttatttatttatttatttattatttagtttttgagatggagtctcactctgtctcccaggctggagtgcagtggcctgctctcagctcactgcaaactctgcctcccgggttcaagcaattctcctgtctcagcctcccgactagctgggattacaggcccctgccaccatgcccagctaatttttgtatttttagtagagacggagtttcacaatgttggccaggctggtcttgaactcctgaccttaggtgatccacctgcctcagcctcccaaaatgctgggatttcaggtgtgtgccaccgtgcccagccacatcagtattttttaaactcttcagtttaagcttactgactaaacccttttccacacaacatttcatttagtttaaagatgcctctcctgaaggctgtgatttccaactatccctttagagcaatgccaggcaattagcagttattacttgcagcccaggagaggagacgtatatggaagc

SEQ ID NO: 724289 - DNA, 551 bp, Homo sapiens
cctctgatgcttgggtgcttagaatcagtgagaggggaacccaagcatcagtatcttatttatttatttwtttattatttagtttttgagatggagtctcactctgtctcccaggctggagtgcagtggcctgctctcagctcactgcaaactctgcctcccgggttcaagcaattctcctgtctcagcctcccgactagctgggattacaggcccctgccaccatgcccagctaatttttgtatttttagtagagacggagtttcacaatgttggccaggctggtcttgaactcctgaccttaggtgatccacctgcctcagcctcccaaaatgctgggatttcaggtgtgtgccaccgtgcccagccacatcagtattttttaaactcttcagtttaagcttactgactaaacccttttccacacaacatttcatttagtttaaagatgcctctcctgaaggctgtgatttccaactatccctttagagcaatgccaggcaattagcagttattacttgcagcccaggagaggagacgtatatggaagc

SEQ ID NO: 724290 - DNA, 1199 bp, Homo sapiens
aagaaattctatagtttttggttttatagaagggtctttgggccacctttttttgcttttattttgtgaactttttcgtctgctttaagcctcaaatctagtctattagttacgtgcctgtgttgcccttccatgcttcaagctctttgagggcagagattgttttatcagggtcagcatttgcgtaagccctagagtgagcatcgcctgacatttggagcctacacacctcagttgctcccatagtcccagcctgtgttcatgttcatgttttccacaacaccccagcctcatgcttctcactttagatacagtacagatgttcctgaaattaaacaatgagatcttagaaaggctttagggctctgtatgccattgaaaattaagacaaattagggtaactaggaaacatcatttgtggtcattcaaaggcactgattgtatgaggcacacttcccatgcgcagtcacttgaatgccccctgctagcccagacctccagaaagttattttattctacgttgccttcttcttctttttttctttctttcttttttttttttttttttttgagatagagtctcactcagtcacccaggctggagtgcagtggtgcgatctcggttcactgcaacctccacctcctgggctcaagccattctcctgcctcagcctccaaagtagctgggattacaggtgcgtgccaccatgcatcttttgtatttttagtagagacggggtttcaccatgttggccaggctggtcttaaactcctgacctcaggtgatccgtccgcctcagcctcccaaagtgccaggagtacaggtgtgagccaccacgcccggcctctatgttgccttcttataacagtgttgctgagttagatgattaaccaaagtgctctgatagtgtattttttaaaatctggaaccaaattcaggtrgaaagcagcaatggagacaggagtaatgtgtgaggcctaaaaatggaaagacaactttctatcctcagtcggagtaggcccagatatgaaacgacaaggttcattatattcaggggcaatttttccctagttgcacttttttcttcccaatatgtatgagttttcatgggacatccacttcttgggctgcttggagacaagggaaggaggctttctccattcaagggttgcagattcagagattcaaggaaaaggcc

SEQ ID NO: 724291 - DNA, 3410 bp, Homo sapiens
gctttccagatacccaggaattagtataacgcaaagccaatgtccaatgtttcctaaaggttataggtatttctctttcctccatatacagctatcatgataaatgactacaggttcattttggtaaagccaagaagaaagatgtacagtgtacatttgtggtggtattacaggattcttccagaaggggctccttttctgtgaattgactcaggctatgaatggctaaaaaaacccatcattttatatagatccagtatgacctgatggggttgctcatctaatttagtccaagagcctgattaataattagctactacctatgttctgtgcatgtcaagccattctgaataatactctagctctgttgcttattatagtaagcatgcttaccttgtttctggtagttaagtgctgccacttagtatctgccactctttgataccatcattctcattgaagtcagggagtctatttcaatggtagatctcctaccttcctctccaaactacagaggataggcactgtaatgctttattttaaactctttcttggggaaatataatatacacttagaaaagtacataaaacaaatgtatagcttagtgagctattataaagtgaattttgtagaaaaaccatgcagatgacaaaatggagcattgtttgtaccccagaaatcttgtgcatgatattttactgtcaaatacctcttctgccaaaatgcgactgttattctatattttatagtaagcatctccatatatttatttattaattttctactataacaagcattcctaataacataacgaaatttgacttgttttggaattttgtttaaatagaagcatactggtagtatatattaaattgggagtatactttatttggcttctttttctcattattatagttttgagatttatacaaattgtgcatttttattgatgtatagtgttaattctatgaatatactacaatgtatgcattctgttgaaaatgggttagtttgatcagggctagtttgttagttgttgcttgtgttatttcattctggctgctatagcaaattactttaggctgggtaatttgtaaacaaaagaaatgtatttcttacagttctgaaggctgggaagtccaagatcaagttaccagtagataacagtgtctggtgagggtctgctctctgcttcagagatggtgccttctagctgtgtcctcacatggtggaagggcaaaaaagctcccttaggcttcttttataagggcagtgctatggttggtatgtctttgtcccctctaaaacttgtgttgaaatgtaattcctaatgcaacagtgttgggaggtggggcctcatgggagatgttcaggtcacgaaggctccaccttcataagtgaattaatactactatacaaagggactgtgggaatgggctcaccctttcttgttcttctgccacgtggggacacaacattttttctgctttcctttctgtcttccactatgtgaggacacagcaagaaggccctcaccagataccagatgctagtgccatgatcttggactttccagcattcagaactgtgagaaatatatttctgttgtttttgaattacccagcttgtgatattttgttatagcagcaaaaaagaactagtacaggtactaatcccattcatgagggctctgccttcatgacctagttacttcccaaagtccccacctcttaatagcaacacatcagggattcaattttaacattgtttgagggacacaaacaatcaggccatagcagggcttttacaaagcttcagtgaatattgttatatatgtctcttgatgcacatgtacatgcttttctgttcggtatgtattcagaagcagaattggtcccctcccttttattttaccatacttttgtaactccatgctttcttctaggtatgttcttctgaaatatatttcagttaactaattcttctactgtatctaatctttgtttaatccaaccactaatttttattctcaattattgcatttttttacttttataatttatattttaaaaatctgagttctcatgtctctgttctcagtttaaattttcaatcctttcccttatctcccagaaactagtaaacatagttatttttaaatcaatgtctaaaaattttgacatctggagtcttgtagttctatttctatgctttgttgttgtttctgtttcttgttcaagttgccttatttggaccaactttcatgcatcccagatactatcatactatcttaaaactttttttttttttttttttttttaaraaatgtggctgagtgcgttggctcatgcctgtaatcccagtacgttagaaggccaaggtgggtggaccacttgaggccaggaatgagatcagcctggcctacatggcaaaaccccgtctccactaataatataaaaataagctgggtgtggtggcccacacctatactcccagatacttgggaggctgaagcaggagaatagcttgaacactggaggtggaggttgcagtgagccaagattatgccactgcactccagcctgggtgacagaatgagactctgtctcaagaaaaaaaaataaaaaaagagaaataatgtgaaacttgaggtaatgttattttcctttctggagtatttgctgttgcttcttccaggcatctgggaacactagcgatctgagatcatcataatccagtattaggattgaaattttctgggtcaccaaagtgactctggtgagctgcaatctttgtgaaagctgttatacttccaattcaccccatgaatcctaggtgcaattctctagggttccacctcaaagtgtaggaatattactggagcctttaccctggactggtcttactaaatcactttcagctgtctgaaacagtgcattaaatccagagattattttaggtgtacccatttttacaaatctaataaaataatattcttccttttctagtttaagaactcattcatatgcatatttcttaagttaatgctgatgaaaattaaaagaaacttggtacccattttacgtgtaatcctcctcctccaagtcagactttgaaggttgatagcactatcaggtatttcggcaaggtagaaccacctacctgatcttatgagaagagtcttctgctgctgctgtcaaaggaaattcagtagaatttggagatttagagtattcatattcttatgaattccccaaagtgtctcaatttctagatgtaacattcaataattttcgcaattcatacatcacaggcatcaaccagttagaatggacacctgatcagttagtatgtatgctcaccaccattaagtcttctgtcaaatgttaccctaatttaaatttttaaa

SEQ ID NO: 724292 - DNA, 577 bp, Homo sapiens
tgttaataaggctcaagtaactagaaagaaggaggaatcatttattaggttctgcataggacagaaaggaattgttccaaggagttgagaccttggttatgggcatgttaatgttrgagtgagatgcccggaaagcagttagaaatgtaagtcctgatgttgcaggagacatatgcgtcagagatataaatctgtaagtcatcagcaagtaatggcatttaaaaccatatactcagaaagattactactgtaggtgcgaagtactggaagtaaataagaacccttctccaactttttctactcagctaaatcacaccagggtctacctctggaaaacaggtattgaggtggagtccatcagcatagtgctggggatgtttcttatggaatcacattatctctgtttaataagaagggtcatttggaaatctctatatgtttttcagaaaataaaatctaggtactagttactaaatgtcttcacttgctgaaacttttagatagtccaaggagcttttgggaaaatgaatacggcagtgagaaaaaaaaaatgaagctaaacatctgggaacatttg

SEQ ID NO: 724293 - DNA, 577 bp, Homo sapiens
tgttaataaggctcaagtaactagaaagaaggaggaatcatttattaggttctgcataggacagaaaggaattgttccaaggagttgagaccttggttatgggcatgttaatgttagagtgagatgcccggaaagcagttagaaatgtaagtcctgatgttgcaggagacatatgcgtcagagatataaatctgtaagtcatcagcaagtaatggcatttaaaaccatatactcagaaagattactactgtaggtgcgaagtactggaagtaaataagaacccttctccaacttttwctactcagctaaatcacaccagggtctacctctggaaaacaggtattgaggtggagtccatcagcatagtgctggggatgtttcttatggaatcacattatctctgtttaataagaagggtcatttggaaatctctatatgtttttcagaaaataaaatctaggtactagttactaaatgtcttcacttgctgaaacttttagatagtccaaggagcttttgggaaaatgaatacggcagtgagaaaaaaaaaatgaagctaaacatctgggaacatttg

SEQ ID NO: 724294 - DNA, 960 bp, Homo sapiens
gacctatatctaaatttcagaaaggtcttgccacaagtactttaaccatgacaatttttaaaggaattaatgtatgtttcttctctctaaaaagaagatgggcaattcacaactgtgattttttccaactcctttgaacatagtagtgaatgaccttttcaatgctttgcgttttgtggtaaaacttcataaattctataaaaaacacagtaaacagacctttaaaataacttggaaaaagtttagagaaaaattcctttctattactatgtttataacatgaaaaaccttgtcttttctgtgaactttttactaccatattactcaggtaaccatttcaaagctttaaagctataatacacacttatttagaatttctcaaagagattccaaaaaaagtatgttttccagccaatttaaatgataggtccaaaattgtgtttaatttagaaatatttgtattttgagggrgagaaaaaatgttttcaactatgtttatgttgaatgccagctcctcatatatcaccaactgtggataagacaaagttaagtttattgctcactgtagtgtgggagaacaccacttgaacagagctttgggaatgtctcagactaggaagcgcaagattgaattttattgagattctgaaacttggttaaagaaagcaatggagggaatggggcaggaagaaggggttgtaggaggaagcttgattagctttgggaaattcttatgacataagaggctataattggtacaagcagcaatgccaagatttttaggcaaggggttcaaagaatcttgttaggttaactgtctgtttatgtcttctattgaaaagttgataagtcttttcaaaagttcctgtagtaaacaagaaagacaattccataaagaccactgaagccaggttaatgtagacattaagatatacaggaataggtttcttttttcatttg

SEQ ID NO: 724295 - DNA, 1121 bp, Homo sapiens
tattcctcccatagtccagataatagcagtagacccccacagcattccccttttctgaaggtaaatattaaaacagtataatttaatattatagtggagaaagaattatctttccrtttcataaattttaaaagtgttgccttcacaatagaggcctatcaaccttgaaaaatgagtgatgatatttataatgtatttttaaatttttttctaaaattattcagttaataaacattagtcaccaattatctacaggcactatgttctaaaggtgaaaaccttggttagacagcccttctcatatacccccatagcctcctatacttttcaagtacacatcacaggatcctatattgtaattgcctgtttacttgcttgagttgttcaccagattatatgcatcatgagggtgaggattggtagcttctattttccctcttatctctagcatttagcacagtgctcataaccaagcagtttagtatataactcaagatgaatgaattacaaatctcaaacaagatcactgacattttagatagagaaataaacatccatgtaaccggttaaaaattctatggttgggtaatatgttgagaggttattttgtggttcatctttgttgccacagagacagcaaaatatagcaggtacatttgccttcttaaaggagctcaaaagtatagatctgtgttcagaattctaggtgccgttttagtggattggaaaataggaactcctatgtatttctgggaatgtcttgataataatccctatgcagattgtatcatagaagatgaagtccattgggaaactcactctaggaactgagtaagtaaaaatacttaagccaaacctgagtccctccctcccagggttaaagaggaatagctctgtactgtgcctatggagcctggacactcagccatggttagagagcttgagacttttttattttgcatggatggagagagccatttgaatgagcctgagggcctgggcattctcaacgaaggcaagatgacccttgtctacccagcctaaatacctacaaatccttagtgactacagcagttctctaataatggcttttattgggatctcctgacattgagagcttg

SEQ ID NO: 724296 - DNA, 1121 bp, Homo sapiens
tattcctcccatagtccagataatagcagtagacccccacagcattccccttttctgaaggtaaatattaaaacagtataatttaatattatagtggagaaagaattatctttccgtttcataaattttaaaagtgttgccttcacaatagaggcctatcaaccttgaaaaatgagtgatgatatttataatgtatttttaaatttttttctaaaattattcagttaataaacattagtcaccaattatctacaggcactatgttctaaaggtgaaaaccttggttagacagcccttctcatatacccccatagcctcctatacttttcaagtacacatcacaggatcctatattgtaattgcctgtttacttgcttgagttgttcaccagattatatgcatcatgagggtgaggattggtagcttctattttccctcttatctctagcatttagcacagtgctcataaccaagcagtttagtatataactcaagatgaatgaattacaaatctcaaacaagatcactgacattttagatagagaaataaacatccatgtaaccggttaaaaattctatggttgggtaatatgttgagargttattttgtggttcatctttgttgccacagagacagcaaaatatagcaggtacatttgccttcttaaaggagctcaaaagtatagatctgtgttcagaattctaggtgccgttttagtggattggaaaataggaactcctatgtatttctgggaatgtcttgataataatccctatgcagattgtatcatagaagatgaagtccattgggaaactcactctaggaactgagtaagtaaaaatacttaagccaaacctgagtccctccctcccagggttaaagaggaatagctctgtactgtgcctatggagcctggacactcagccatggttagagagcttgagacttttttattttgcatggatggagagagccatttgaatgagcctgagggcctgggcattctcaacgaaggcaagatgacccttgtctacccagcctaaatacctacaaatccttagtgactacagcagttctctaataatggcttttattgggatctcctgacattgagagcttg

SEQ ID NO: 724297 - DNA, 732 bp, Homo sapiens
aaaaaaaaaaaaaaaaattaaaagatgacaatcctgacacctgttctcctaccaccttttagaaattttcctggtttctactgatttctcaacctcctgctggagacaatccaagataaggagacctatattctcacaaggcacaactatatcaattcattaattaacctgatgtcacaaatccaagacctaaaataaattagacctagcattagcaaaatttgggacagataagactaagagtctcaatgaaaaccccctcccacacagatgctgatagaggtctgtggaggtgagacttctccctgactggctgctgccctggcactggggaagccagcgaggggtggaggaaggaagggtgttttttttgttgttgttgtttgtttttttatacaggatctctctctgttgcccaggctgaagtgcaatgctatgatcacagctcactgcagcctcaacctcctgggctcaagtgatcctcccacctcagccttccaagtagctgggacaggcctggctaatwaaaaaaaatttttttttgtagagatggggtctcaaactcctggactcaagctatcctcccaccttgacctcccaaagtgttgggattacaggcatgagccactgtgcccagccaccagttatttctattactcagtgttggggaagaagctagcagagggaatggttaggagaggaggactacaaaggaaataatgacacttgtta

SEQ ID NO: 724298 - DNA, 627 bp, Homo sapiens
ctttatcccagtgttggcttttctttaagaaacacagattcacaacctatttcactaactggccattgataaataaaaatacttgcacatggcaaatggaagcaacattgtgcaggaacttggaggttcctttagtagtttcagccagaagaataaagccatacagaaccacacaagctcccagaaatccaaacccagctgaytggttttacacttggaaacataatcagcaccaccactgcctcccatcccaaaagcccttccacagttactaactccaaattctgaacgggaaaagcaatatgcaaatttagaaaaaggcagaacccccagatcctaaagcccaggctcaaatcacagtggcttgatgcctttgcaaagcattactttagggactgattattctgaaacgttgtttgggtgatgatacccaagacaccagggccctgcctcctgggaagacagcagtattagcttgtggctgcatagtagacatcgttcatcaaaaacagaagaaataccaagaaaaaatattgatgctagctggtctgaagcagtttaaaattgtcacaaacctgcactgatttgttagcatctttatctctgaaagcgctcacccttattcac

SEQ ID NO: 724299 - DNA, 680 bp, Homo sapiens
aaaaaaaaaaaaaaaaaaggaaaaaaaagatgagaaaatttgtcctggaattctatgatctcttcagacccaggcaccagtattcttggactttctaaaacaccacagcaaacatatactatgaacttactttacggtaggctttttttttctttttaaaactttatagaaattattcagtgttcacaactctgaagttgagagtatcatccccactttatagatgaaaaagaacggaggctttaraaagatgaagtgatttgctcaagatcacacagttaataagttggcaagtcaggacttgaaactgggtgtaagtttaaggccagttctctagtctatcctttacctgaaacaagtgtaaaatcagaggtggcctttgaaagcacgtgatgctgggaagtaggaaaaggttatccagttcttaggctgttgtttgtgccttcttttatatatgtaatatacaaaccctccatccacctccatggtcatgtgcaaaccaatcacatcaggactaggaaggaagggcgggaacaaaatgcctctggctcctcagtatttgacagagataactgaaaaataatgaaaaaaaaaaaaggaatttatgccgggcatggtggctcacgcctataatcccagcacttgggaggcagaggtgggtggatcacttgaggtcagga

SEQ ID NO: 724300 - DNA, 1103 bp, Homo sapiens
tatcccatcatgatatttattttgtaatacttgctctgcggttatctacatcaggacattttgtggctctgcagcatttattgggcactatattaagctggtataaactcagacaaaatgccaggcgaatgataaactagtgacatttctgagtttctctgtagaaaatgtctacaaaggctgcatttggctgattgtatttcagaaggctgatgttgcgctgctatgtcactggtatactatttcagagtgtgatttgtttttattcatattcttgtctttagtgatctttaggttttatttcaaaatagctcttaaatgtgaaaacctacttaagatactggaagtatagatgtaggaggctgcaatgggctttgtcttgttttcatcaacaaagctcatctagatgacctgtgcaacttcgcctcatactccctcaatagcgaggaccacacatagaccaggactgaagtcttttcacctgcttataaatgtatacgcttacctttctttagcaccatctcatggcttttaggatcaaatacaaaacctgagcattacacaaaaggtgctttttgattgggcccctggtgtcttttcagttctcttttgctaatctactttggaaacactggatccatcctattgacttacaatagatacatatatgggtcatcctttctttgagctagggccccagtacctgctatttgtctgtaaatggaatgctcttcactccttctgtccattgatcctattgctgcatrtacttgaagatttgattcatttactccaaagggttcctggaccttgcttttcctccaggtttccatctgcaggtgaaaggtcattcctcctgtgtcttcaaatagcaccttgaatgttagaaccctttcttcattgggttactgcctcttctgtagttctaaagctcttaagtgcagtaattatgtagccctcattcttatttcatagtaggggtttggaatgtttcactgactaaataaatgaataaataattgaattgtatttattcatataattgatctctgagccattgactcattttttgtctattgacttatgacaatcaataattttga

SEQ ID NO: 724301 - DNA, 655 bp, Homo sapiens
ataaagagcataaggagtactagagatgtttacaggaatattgagtcccctaggaagatcccacagttcttgacagtcaagatacagataccatctgtatgagagacaaattaaagaacagagaagtgttgggataatcaggatgaaaagagatcctggtttttggaaaaggtttatgagctgaatctttaaggatgaataggtagaggcacatcaggaggctttctcagggagttggggktggcctttgtgaacaaagagagtcagataagagaagggaaggaagtgttctgagaccatcacgttggcaacaggaaatgcaccgatgtactttgtgttaggcttaaggtttgagctataacacttcatatttagtctaattaaaatgatatcttgacttatatgatattaaataataagaaataactattaattacttttgagatgtctggtagcaaatttctctgtaggagaagcaaagggactaaagtagcattccagcacacttagaattcttaaagatctttatgcagaattcagaagggcattaaaggcaacaattcttttcccaaaggaggacagacttccaacagtgggatgtaccattcccatgggaggtttgtcatcagaaattctgtgtctatgggaagacatg

SEQ ID NO: 724302 - DNA, 865 bp, Homo sapiens
gttctagtgtttccaagagaatgggacaggatcttagtggaatttagaagccaggcaggtggaaaagcattgaggaccccatcccaagggctcgagtccctagagacagcctggaaagattgggtgccagctgcagagaggagagcaaggcgaccaaacgcagggtaaggtctggaggtgctcatagttcactacgggacatgtacatggaagtgaataattatgtcacaaggtgccaagggggctagttacctcacataggatcttagaaaaggtctcctggagaccatgtctgagctggtcctgaggtgtgagtagggattctccgcagggcggggaaggacttgaaagagtctggcaatatggagcacatcaggattatggaaggtgagcttggagaacaaggcagagtctagcctgtgaaaggcctcttgcaatttgttgaggatccatgaccttctcccatgcatggtgaaatgcccttaaaggattttgaatagatttaaaagacactcaaaaacaaaaaacggtagattcaaaatagacggtagggatcgctttcttccgttttctttgaaggatcagaagtgtttaccaccacctggattgtttttgggctttcaggtgagtgggaaaacaaagaaattcatgcctgatcaygttgagccacttatataatgttgctttgacactaatggagatgtaacttcttttaagacataatagaatctcctaagtgggtgtgggagtcgtaagaaggaggaatctgggcttctacaagcaagatagcatgtattcatttattcagtcagtcagtcgctggatcgatgcgcttagctttgtgctctgtgctgggtgctgtgtg

SEQ ID NO: 724303 - DNA, 1228 bp, Homo sapiens
tggtgtcaattggaggtggagaggccaccagtgctctgaatccacaagctaagatgagctacttgttaggcttggctgtttggaattgtctgttctttgcaaaaagcagacgaaatgaagttatggtagttagtgggatgagtgggccacccagaaaagtcaaagttcaggttggactcattttctcatgtatttaagtgtctttgccatttgtttaccttctcctgtgcctccacctctcatcattaggagatgggaccagcatgctcggaagcccactcagcctatgcactcagcaggttggaactattagggaagtatagcctttgggagctgtccttaaccaatgatggacagatcttggtgtataaattccccagctccctcgccctgcaggcagcataaccctgaggaatatgttctactctggcatccaggggcctcccaagcagagtgaagctccggttgcccatgcaataaacatgctaacacagcctttttgggctaccttcccttccctttttccattccccacttgcagcatttgcagggatcacctcccgaataaaccacttgtacatgaatccttgacttggcatctagttcttggtgaatccagcctcaggcaatgagtaactcacatagagacggcctgctatctaagtataagcgaagatgaaggaagactctattttctttggacctgatcaagtttatttacaatcttcattttatttttattatttatttatttatttatttayttatttatttatttatttaattgagactgagacttgctctgttgcccaggctggagtgcagtggtgtgatctcggctcactgcaacctccacctcccagattcaagtgattctcctgcctcagcctccggagtagctgaaattacaggtgtgtgccactacacccagctaattttttgtatttttgtatttttatggggtttcaccatgttggacaggcttgtctcgaactcctgccctcaagtgatccaccaaccttggcctcccaaagtgctgggattacagatgtgagccaccacgcccggcctacaatctcgatgttagacttcacttattttcttctgctctgtaacccagtgtggactgcagtggtgcaatcatagttcactgcagcctcaaattcctgggctcaagcaatcctcctgcctcagccttctgattagctgggactacaggcatatgcca

SEQ ID NO: 724304 - DNA, 1228 bp, Homo sapiens
tggtgtcaattggaggtggagaggccaccagtgctctgaatccacaagctaagatgagctacttgttaggcttggctgtttggaattgtctgttctttgcaaaaagcagacgaaatgaagttatggtagttagtgggatgagtgggccacccagaaaagtcaaagttcaggttggactcattttctcatgtatttaagtgtctttgccatttgtttaccttctcctgtgcctccacctctcatcattaggagatgggaccagcatgctcggaagcccactcagcctatgcactcagcaggttggaactattagggaagtatagcctttgggagctgtccttaaccaatgatggacagatcttggtgtataaattccccagctccctcgccctgcaggcagcataaccctgaggaatatgttctactctggcatccaggggcctcccaagcagagtgaagctccggttgcccatgcaataaacatgctaacacagcctttttgggctaccttcccttccctttttccattccccacttgcagcatttgcagggatcacctcccgaataaaccacttgtacatgaatccttgacttggcatctagttcttggtgaatccagcctcaggcaatgagtaactcacatagagacggcctgctatctaagtataagcgaagatgaaggaagactctattttctttggacctgatcaagtttatttacaatcttcattttatttttattatttatttatttatttatttacttatttatttatttatttaattgagactgagacttgctctgttgcccaggctggagtgcagtggtgtgatctcggctcactgcaacctccacctcccagattcaagtgattctcctgcctcagcctccggagtagctgaaattacaggtgtgtgccactacacccrgctaattttttgtatttttgtatttttatggggtttcaccatgttggacaggcttgtctcgaactcctgccctcaagtgatccaccaaccttggcctcccaaagtgctgggattacagatgtgagccaccacgcccggcctacaatctcgatgttagacttcacttattttcttctgctctgtaacccagtgtggactgcagtggtgcaatcatagttcactgcagcctcaaattcctgggctcaagcaatcctcctgcctcagccttctgattagctgggactacaggcatatgcca

SEQ ID NO: 724305 - DNA, 1228 bp, Homo sapiens
tggtgtcaattggaggtggagaggccaccagtgctctgaatccacaagctaagatgagctacttgttaggcttggctgtttggaattgtctgttctttgcaaaaagcagacgaaatgaagttatggtagttagtgggatgagtgggccacccagaaaagtcaaagttcaggttggactcattttctcatgtatttaagtgtctttgccatttgtttaccttctcctgtgcctccacctctcatcattaggagatgggaccagcatgctcggaagcccactcagcctatgcactcagcaggttggaactattagggaagtatagcctttgggagctgtccttaaccaatgatggacagatcttggtgtataaattccccagctccctcgccctgcaggcagcataaccctgaggaatatgttctactctggcatccaggggcctcccaagcagagtgaagctccggttgcccatgcaataaacatgctaacacagcctttttgggctaccttcccttccctttttccattccccacttgcagcatttgcagggatcacctcccgaataaaccacttgtacatgaatccttgacttggcatctagttcttggtgaatccagcctcaggcaatgagtaactcacatagagacggcctgctatctaagtataagcgaagatgaaggaagactctattttctttggacctgatcaagtttatttacaatcttcattttatttttattatttatttatttatttatttacttatttatttatttatttaattgagactgagacttgctctgttgcccaggctggagtgcagtggtgtgatctcggctcactgcaacctccacctcccagattcaagtgattctcctgcctcagcctccggagtagctgaaattacaggtgtgtgccactacacccagctaattttttgtatttttgtatttttatggggtttcaccatgttggacaggcttgtctcgaactcctgccctcaagtgatccaccaaccttggcctcccaaagtgctgggattacagrtgtgagccaccacgcccggcctacaatctcgatgttagacttcacttattttcttctgctctgtaacccagtgtggactgcagtggtgcaatcatagttcactgcagcctcaaattcctgggctcaagcaatcctcctgcctcagccttctgattagctgggactacaggcatatgcca

SEQ ID NO: 724306 - DNA, 1228 bp, Homo sapiens
tggtgtcaattggaggtggagaggccaccagtgctctgaatccacaagctaagatgagctacttgttaggcttggctgtttggaattgtctgttctttgcaaaaagcagacgaaatgaagttatggtagttagtgggatgagtgggccacccagaaaagtcaaagttcaggttggactcattttctcatgtatttaagtgtctttgccatttgtttaccttctcctgtgcctccacctctcatcattaggagatgggaccagcatgctcggaagcccactcagcctatgcactcagcaggttggaactattagggaagtatagcctttgggagctgtccttaaccaatgatggacagatcttggtgtataaattccccagctccctcgccctgcaggcagcataaccctgaggaatatgttctactctggcatccaggggcctcccaagcagagtgaagctccggttgcccatgcaataaacatgctaacacagcctttttgggctaccttcccttccctttttccattccccacttgcagcatttgcagggatcacctcccgaataaaccacttgtacatgaatccttgacttggcatctagttcttggtgaatccagcctcaggcaatgagtaactcacatagagacggcctgctatctaagtataagcgaagatgaaggaagactctattttctttggacctgatcaagtttatttacaatcttcattttatttttattatttatttatttatttatttacttatttatttatttatttaattgagactgagacttgctctgttgcccaggctggagtgcagtggtgtgatctcggctcactgcaacctccacctcccagattcaagtgattctcctgcctcagcctccggagtagctgaaattacaggtgtgtgccactacacccagctaattttttgtatttttgtatttttatggggtttcaccatgttggacaggcttgtctcgaactcctgccctcaagtgatccaccaaccttggcctcccaaagtgctgggattacagatgtgagccaccacgcccrgcctacaatctcgatgttagacttcacttattttcttctgctctgtaacccagtgtggactgcagtggtgcaatcatagttcactgcagcctcaaattcctgggctcaagcaatcctcctgcctcagccttctgattagctgggactacaggcatatgcca

SEQ ID NO: 724307 - DNA, 1313 bp, Homo sapiens
cactccgctttgttttcgttgcacttttgtttaaggtcaccgtcttttcagggcaagtggaacgtgcttttcatttactctagcagtataaagtgtcctttttaaatacgctcatttaagctgaaagaatgagttggtttcatgaaaagtaccgaatcaatatgagcatcggtagaagtgaaattaggaaaaatggcaaagtggaaagtggatgatgggctggaggggctctyttggggcagctgggggctcccaggttcacagcccaatcaacataaagagcagcccctcacttcacagttcgcaaaagccttttccaagcacagtctcagtcaatgcatcctgtgcccggcaaccctgttttccagggcctcacccacagccacagccacgtcttgtaagcatcccagctgccaatcacaggctattgcaggcactttatagacatcgctgaaccgcgccctacacctggcttgagtggaaggcacaactcgaaccccacatgctagaagaggaaactaaggctccaagagtcacgtggcagtttttttcctgcagcagttgtaacaaattcgcacaaactcagtggctgacaacaacaaaaatgcattccctcacagttctagaaaatggaagtctgaaatcaaggcatcagcagggccatgctccctccaaagcctctcagcaggatccttcctcatctcttccagcttccggtggcccccagcattccttggctggtggctgcatccctccagtctctgcctccatccccacacggccttctcttctgcggcctccctctccttctccttctccaagaacacctgtcattggacttcaggccctccctaatcccggttgataccatctcaagatcctttatttatttacatctgcaaagacgttttttccaaacagtgacattcacagtttctgggggacattttctgggagattgggttggggtcaccatttaacccacgacaagcagtatcaggattgatgcttagaacagagcctggtttccttcactggacacacaggcgcacactggagcccacctcccctgcccgtaccaccatggggggtgcccactctgcctcctcagacccagaaacccaggggacccggtgaaacagcaggcacctggtgtggcagggaccaggcctcgcaccatctcatgctcccatttaattaggacagaagactgaactctgctcaatgataccagcatcatcccactcacctgcctggggacccatctctttgaggaaatttatagccataatttagtaggtgaattatggccg

SEQ ID NO: 724308 - DNA, 1313 bp, Homo sapiens
cactccgctttgttttcgttgcacttttgtttaaggtcaccgtcttttcagggcaagtggaacgtgcttttcatttactctagcagtataaagtgtcctttttaaatacgctcatttaagctgaaagaatgagttggtttcatgaaaagtaccgaatcaatatgagcatcggtagaagtgaaattaggaaaaatggcaaagtggaaagtggatgatgggctggaggggctctcttggggcagctgggggctcccaggttcacagcccaatcaacataaagagcagcccctcacttcacagttcgcaaaagccttttccaagcacagtctcagtcaatgcatcctgtgcccggcaaccctgttttccagggcctcacccacagccacagccacgtcttgtaagcatcccagctgccaatcacaggctattgcaggcactttatagacatcgctgaaccgcgccctacacctggcttgagtggaaggcacaactcgaaccccacatgctagaagaggaaactraggctccaagagtcacgtggcagtttttttcctgcagcagttgtaacaaattcgcacaaactcagtggctgacaacaacaaaaatgcattccctcacagttctagaaaatggaagtctgaaatcaaggcatcagcagggccatgctccctccaaagcctctcagcaggatccttcctcatctcttccagcttccggtggcccccagcattccttggctggtggctgcatccctccagtctctgcctccatccccacacggccttctcttctgcggcctccctctccttctccttctccaagaacacctgtcattggacttcaggccctccctaatcccggttgataccatctcaagatcctttatttatttacatctgcaaagacgttttttccaaacagtgacattcacagtttctgggggacattttctgggagattgggttggggtcaccatttaacccacgacaagcagtatcaggattgatgcttagaacagagcctggtttccttcactggacacacaggcgcacactggagcccacctcccctgcccgtaccaccatggggggtgcccactctgcctcctcagacccagaaacccaggggacccggtgaaacagcaggcacctggtgtggcagggaccaggcctcgcaccatctcatgctcccatttaattaggacagaagactgaactctgctcaatgataccagcatcatcccactcacctgcctggggacccatctctttgaggaaatttatagccataatttagtaggtgaattatggccg

SEQ ID NO: 724309 - DNA, 606 bp, Homo sapiens
agcagctacagaagcttggcctctgtttctgggcatcacagaagtacatctgattggctgagcctagcccacattctagctgtactgacgccatggaaaactaatgtttagccttccagcttctgaggcctaggaaggcacacttggaaagaakgtagaggaaacaatttccaatgctgacctccctgagtgggatttgaactcagtctgcatgactcctgggcctgtgccctttctgcagcaccatgctgctcctacttgctttctccatcccagtggttctcaaagctggcttcacatctggctgtcaccacccaggtcttctgggtcagattctccagggctggccacgtgtggtgactctgaggaacacccactggagcggcctctgcacttgcctcacctctcttcttactccccaggaggtcacagcctcacaccctcacatgttaggtgatttgcagaagtatctcagcctacttctcttctcgctatatccacgtcctcgccagcatcactatgcctttgctttcagggctacctgcccctgttttaggacatgggctttctggagagcatctcagatgcctgagttcaacattagtg

SEQ ID NO: 724310 - DNA, 544 bp, Homo sapiens
cctaggaaacccgtctcttccatcagtcggtcccatttccctttatccctctcggctgcatctctatcactctctgaatgctgcactggtagcctctctgggttcctaggcagtgctcagcttgcaaggtgacaggttttccttcctgayagttgagactgatcatgtggtctgaactggacagactagtccttgagtgtaaccgtggcctccaatggcccccacctatgtagggcagctctctggggtgactcctggggttgctctggttcagtgttcgtccttcagcagcctccccttccctttctttgttatttcaaaaacacctcatttttggagttaatctctcccatctccagagagggagatgattggactaggttagccctgagggtatttcctgcttggctgaaaatgcccctccagagtagtccttattccagccccgggtctgtcctgaagctgctgagttccccaccttctcacctgtcctggaggtgtcatcttgggcttcttttctggctggtccgaagtctccagagca

SEQ ID NO: 724311 - DNA, 1354 bp, Homo sapiens
tatcttaattttatttttaagaaaaatccaggaatagcaggagttcaggtttctgcttaagctgtgttgtcttctgtggttcagatatatctgtgtctgtctgtcccactgtgtgggtgactccttcagggttttccttgtatgaggggtcagttttcatcatagtcttggggaagggggaccttagttcaaagaggagaacttctactctcaaggagataaaatttggaaaaaataacttcagcagttagtgattttgcagtttcagtaatcaatacataaattattaaaaagtataaacttgccaacgtttgaattgatgatttaaaagataaagttgatgaaatgtgtcataaaagaaagtagaaacacatagttatagattcaaaaggaaagataagagttttgaagacagtgccaggagattagactcattgaattaacaggaagaaaaaaggaaagatgaaggaaaagtaatatttcaaaaagaactataagacaatgtttttgagcagcagaaagataaatatacagttttgggtttcttgctaggtatcaaaaaattactgggaaaaaatgtgaacttttgaaattccaaaatcctaagttacatacaaatgcttaaagcttccagttataaaaaactgttcacatatcagagttaacctgtttagcctcagatttgcctccaatacatggacgctattccgcaacatgtatagacttttgagaggaaaggcctgcaatgtcaaattctacacatgcataaaatattatacacctattgctgaaacaaccataaggtgagaatagtctcagtgaatacaatccatgtttattatttkgaaaaatatctgtgaactctaaataaatttcagtgcaataagactagaaacctcaatatattggaagatataaaaggggaaataacaacaatgaataaaagatggataaaacaatagatggacacaatttctatgcttatatacatatcatatataattgaatgatgataatgttactgtgaacttataagcacacagtgagtctttttggaagaggaaacgtgtagcaagagaaatcctttcaatagactgccccccacaaagaaaacaaaaactaacaaaaaaacccctactttttcaacaaaattaagtggcagatgtgggagaagggggggaataataaagaacaaaaaaattaacatataataatatgccaccacaatgacatacgtgagatccaaataattaaattgttaaatataggttcatgtgttattaatttattaaaacatataatacattatttttaggagatctgtacggtctaaaatcacaaaagatagtgtaaa

SEQ ID NO: 724312 - DNA, 634 bp, Homo sapiens
ttatactcttctctgtgctcgatgtgaatattgctgggattttaaaaatgttcactaatccttaattcagtttatctctaaaaatgtgtgtgtgggtgagtgtagggaaatgtagggaaaagaaataattaaggaacacacactgtctccttaattatttcttttctctacatttaagggtcatatctttctacatatttgagtataatagtttcttaaaattttcttttgaatactgcaattactgacagtagcttactttttttgagatttctgaaacttatctttcctatctattgagccttgtaagttctctttacacgtatgtttatgtctatatctacttgtctatctgtgtatctatctttgtagaragaaagacttggacaagttacttgcaaggaagttattggacagttttttttgtgaaatattgtctattttcatctttgaaaatgtgataactgatattatatatatgaactttaaaaaattaatataggcattaaaatggtttcacattcattattggaatttctttaataaattgcctgttgatgtattttcctattttttctcttgaggcattcataattttatagttaattttcaaaccttctttgcttaccaagaa

SEQ ID NO: 724313 - DNA, 580 bp, Homo sapiens
ggatgtaccaaaataaacttaaaagtcaaccaagtatttgaaagcaaaattaacttcttgctaatggttgaatcttttttataattttatcctaagtaattctctgcatgctttttcttgacaaggatatcatttaaagtcacagtggagtaaatgcaactaatacgtttctcattccctctcagtggcagatttttaatataagtgtcagtggataaatcttcaaaatccagcctaccacctctccagtcaattctctccacttctagagatggtgtcaggaacatcagcagaggaataagtgtatcacttttgatgtcctattaaaasaattttggcaactattaattgaatttcctggacgccaaggcccataccagacaataggagctctaagatgaattcagcatggatcatgcccatccaataagtgtgttgatgggtacatattcaaggtgtaagtttggggaaagagttgtgagtagagtgatggggcaatatgttgggctgggtacatgaagttagtttcatatgactgtagccttagtagtgagtaaatgcaagaagacatgaatgacaa

SEQ ID NO: 724314 - DNA, 585 bp, Homo sapiens
taggtattccaacctttcttccacagtggggttaacaggaccttcttgcaagcccggtattctaaatgaacycctttcaaggctgtctaccccctttccaggactttcaagagccagaatatacccagtaccccacaagacaccctcaaccttctgctagtgaaaatcctttaccacagcaacagcatcactggccaagatgtctctcatgtctagcacagtataataggccacattggtcaagatatagatgatggtgacaatgggcatggagatgccaatggagaggggcaggttcctacagccaaatagaataaaatgcacattagtcccacagtcatatccctatctctcctttaatccttagactctccctgccacaccggtctttccagggatggagactgttgctacatttcctcaatgcatttgtctttgacggtgccctggatagtggctgaagctctgaacacttaagaactaaagaacattaggggaaaggaatatcatattaggagacaggactgtgcagctgggagcagtggctcatgcctgtagtactaacactttgggaggctgaggcag

SEQ ID NO: 724315 - DNA, 2196 bp, Homo sapiens
gctccgcctcccgggttcacrccattctcctgcctcagcctcccgagtagctgggaccacaggcgcctgccaccacacccagctaattttttgtatttttagtagagacgggtttcaccatgttagccaggatggtctcaatctcctgaccttgtgatctgcccgcctcggcctcccaaagtgctgggattacaggcgtgagccaccgtgcccggccttgttttcttaattctccagatgattccaatccacagccagagttaggacccactgctgcccagcatcttccgcaacctcctctaggctacctgcccagcttcttctgaggcagagagaaaaagaaaggaacatagaaacatagaacatagaaaggaagagagcaaggatgagcccccaaagggacttgatgatcaaagcagcataaaggtctaccccttcactgctggtcaagagtttgttccaaagttcacaacaaacccacactagaacccaaggctctgatgaaagcctatttcttgaggtgaatatgggccagaaaaggtaagtttcttcacctccaccctcagatggctcttgggaaaagccctctgaaaaaggcaactagcttccaagtagaaggttcaaagggcaaaagtccgttggggggcccagcatctgactgttccacctcattagccacaagtacatgagatcagtcattctggtaccaggagaagctgcacgaggacacctggccaaagctctcagacacacagagatccaaagtccttcacagcccacagcggctctggcagactcagggtaagctgtctgcccccttcccacagcaaccctcagcccccaccagcaccctgaaaggcaaaagcacgaaatacccttctcagccaagttgaacctggaatcatatcttctgttcattcatccagccaacatttattgaagaacccactacatgcaattcactgtggccacatgtgtatgacacgaagaatctttgcctgatccctgaagaacagtactctgtaaacaaagagccctgaactgccaggtactgctgactcactggtacaggggacatactgaaggcatagatggtaaaaatgtcctggtagtgtcctgaatggcaaaacaactaggtctcagtgtgggcaagtgtaggtaaggcaagaacagtcatgtccacctgtgaacagtgggccaaaacaccttggctctgaggaaaggacagtcgggtggagctggacttctggacacctatcctcttgctgagaggaaagttccacctctcttgcaaaacagaaagaaaaggctcagccctcctttctgatccctgagctattgtgaagtaaaatgtaaactgcttttaagtcatccaaagacagcatgcggaaggtaaagcttttagaaatcaataagatgcatatgatatgaatataacttgcagtaatagatactatttttaactgacaactgtgtgccaggtcactatgtacttacacctatcttctaatttaatctgacagagagtaagttttattatctttattttacacttgagaaaactgaggtcaggcagtgactagctccaaagcctacatccattccaccacaccacatacctccctaactgtatgcaagaatgtgagacggggagtgggattatctccccctgtggtaatggagatgcctagaacttcagagcactggggcagtccacgaatttctccaagaagtcagaataagcagcttcaggaggtgccatctgcacacctctctgtttgggaaaagcaaccatttctactaccctagacaggacagtgaggctccttcaaaactcagaattccttaactcactcactcattcattcattcattaagcttatattgagtacccactgtgttccaggccctgtgcaggctctgagattaagatccagtctccagccttcactcaaaagtggacattgacaattacaagaatcagttgctatgaaagtcactgagaggcaacctatctacccacacgtcactggaggagtgaatggggtgcaggcaagcaccaggatcactgttatctggactgagtgcatggaggctgctgctggggtgggggaggggaagcaatattcctgacagagagggcaaaacgttattaccctgacaatgaaatcagcaatgaatgaagtcaaccacccg

SEQ ID NO: 724316 - DNA, 2196 bp, Homo sapiens
gctccgcctcccgggttcacaccattctcctgcctcagcctcccgagtagctgggaccacaggygcctgccaccacacccagctaattttttgtatttttagtagagacgggtttcaccatgttagccaggatggtctcaatctcctgaccttgtgatctgcccgcctcggcctcccaaagtgctgggattacaggcgtgagccaccgtgcccggccttgttttcttaattctccagatgattccaatccacagccagagttaggacccactgctgcccagcatcttccgcaacctcctctaggctacctgcccagcttcttctgaggcagagagaaaaagaaaggaacatagaaacatagaacatagaaaggaagagagcaaggatgagcccccaaagggacttgatgatcaaagcagcataaaggtctaccccttcactgctggtcaagagtttgttccaaagttcacaacaaacccacactagaacccaaggctctgatgaaagcctatttcttgaggtgaatatgggccagaaaaggtaagtttcttcacctccaccctcagatggctcttgggaaaagccctctgaaaaaggcaactagcttccaagtagaaggttcaaagggcaaaagtccgttggggggcccagcatctgactgttccacctcattagccacaagtacatgagatcagtcattctggtaccaggagaagctgcacgaggacacctggccaaagctctcagacacacagagatccaaagtccttcacagcccacagcggctctggcagactcagggtaagctgtctgcccccttcccacagcaaccctcagcccccaccagcaccctgaaaggcaaaagcacgaaatacccttctcagccaagttgaacctggaatcatatcttctgttcattcatccagccaacatttattgaagaacccactacatgcaattcactgtggccacatgtgtatgacacgaagaatctttgcctgatccctgaagaacagtactctgtaaacaaagagccctgaactgccaggtactgctgactcactggtacaggggacatactgaaggcatagatggtaaaaatgtcctggtagtgtcctgaatggcaaaacaactaggtctcagtgtgggcaagtgtaggtaaggcaagaacagtcatgtccacctgtgaacagtgggccaaaacaccttggctctgaggaaaggacagtcgggtggagctggacttctggacacctatcctcttgctgagaggaaagttccacctctcttgcaaaacagaaagaaaaggctcagccctcctttctgatccctgagctattgtgaagtaaaatgtaaactgcttttaagtcatccaaagacagcatgcggaaggtaaagcttttagaaatcaataagatgcatatgatatgaatataacttgcagtaatagatactatttttaactgacaactgtgtgccaggtcactatgtacttacacctatcttctaatttaatctgacagagagtaagttttattatctttattttacacttgagaaaactgaggtcaggcagtgactagctccaaagcctacatccattccaccacaccacatacctccctaactgtatgcaagaatgtgagacggggagtgggattatctccccctgtggtaatggagatgcctagaacttcagagcactggggcagtccacgaatttctccaagaagtcagaataagcagcttcaggaggtgccatctgcacacctctctgtttgggaaaagcaaccatttctactaccctagacaggacagtgaggctccttcaaaactcagaattccttaactcactcactcattcattcattcattaagcttatattgagtacccactgtgttccaggccctgtgcaggctctgagattaagatccagtctccagccttcactcaaaagtggacattgacaattacaagaatcagttgctatgaaagtcactgagaggcaacctatctacccacacgtcactggaggagtgaatggggtgcaggcaagcaccaggatcactgttatctggactgagtgcatggaggctgctgctggggtgggggaggggaagcaatattcctgacagagagggcaaaacgttattaccctgacaatgaaatcagcaatgaatgaagtcaaccacccg

SEQ ID NO: 724317 - DNA, 2196 bp, Homo sapiens
gctccgcctcccgggttcacaccattctcctgcctcagcctcccgagtagctgggaccacaggcgcctgccaccacacccagctaattttttgtatttttagtagagacgggtttcaccatgttagccaggatggtctcaatctcctgacctygtgatctgcccgcctcggcctcccaaagtgctgggattacaggcgtgagccaccgtgcccggccttgttttcttaattctccagatgattccaatccacagccagagttaggacccactgctgcccagcatcttccgcaacctcctctaggctacctgcccagcttcttctgaggcagagagaaaaagaaaggaacatagaaacatagaacatagaaaggaagagagcaaggatgagcccccaaagggacttgatgatcaaagcagcataaaggtctaccccttcactgctggtcaagagtttgttccaaagttcacaacaaacccacactagaacccaaggctctgatgaaagcctatttcttgaggtgaatatgggccagaaaaggtaagtttcttcacctccaccctcagatggctcttgggaaaagccctctgaaaaaggcaactagcttccaagtagaaggttcaaagggcaaaagtccgttggggggcccagcatctgactgttccacctcattagccacaagtacatgagatcagtcattctggtaccaggagaagctgcacgaggacacctggccaaagctctcagacacacagagatccaaagtccttcacagcccacagcggctctggcagactcagggtaagctgtctgcccccttcccacagcaaccctcagcccccaccagcaccctgaaaggcaaaagcacgaaatacccttctcagccaagttgaacctggaatcatatcttctgttcattcatccagccaacatttattgaagaacccactacatgcaattcactgtggccacatgtgtatgacacgaagaatctttgcctgatccctgaagaacagtactctgtaaacaaagagccctgaactgccaggtactgctgactcactggtacaggggacatactgaaggcatagatggtaaaaatgtcctggtagtgtcctgaatggcaaaacaactaggtctcagtgtgggcaagtgtaggtaaggcaagaacagtcatgtccacctgtgaacagtgggccaaaacaccttggctctgaggaaaggacagtcgggtggagctggacttctggacacctatcctcttgctgagaggaaagttccacctctcttgcaaaacagaaagaaaaggctcagccctcctttctgatccctgagctattgtgaagtaaaatgtaaactgcttttaagtcatccaaagacagcatgcggaaggtaaagcttttagaaatcaataagatgcatatgatatgaatataacttgcagtaatagatactatttttaactgacaactgtgtgccaggtcactatgtacttacacctatcttctaatttaatctgacagagagtaagttttattatctttattttacacttgagaaaactgaggtcaggcagtgactagctccaaagcctacatccattccaccacaccacatacctccctaactgtatgcaagaatgtgagacggggagtgggattatctccccctgtggtaatggagatgcctagaacttcagagcactggggcagtccacgaatttctccaagaagtcagaataagcagcttcaggaggtgccatctgcacacctctctgtttgggaaaagcaaccatttctactaccctagacaggacagtgaggctccttcaaaactcagaattccttaactcactcactcattcattcattcattaagcttatattgagtacccactgtgttccaggccctgtgcaggctctgagattaagatccagtctccagccttcactcaaaagtggacattgacaattacaagaatcagttgctatgaaagtcactgagaggcaacctatctacccacacgtcactggaggagtgaatggggtgcaggcaagcaccaggatcactgttatctggactgagtgcatggaggctgctgctggggtgggggaggggaagcaatattcctgacagagagggcaaaacgttattaccctgacaatgaaatcagcaatgaatgaagtcaaccacccg

SEQ ID NO: 724318 - DNA, 2196 bp, Homo sapiens
gctccgcctcccgggttcacaccattctcctgcctcagcctcccgagtagctgggaccacaggcgcctgccaccacacccagctaattttttgtatttttagtagagacgggtttcaccatgttagccaggatggtctcaatctcctgaccttgtgatctgcccgcctcggcctcccaaagtgctgggattacaggcgtgagccaccgtgcccggycttgttttcttaattctccagatgattccaatccacagccagagttaggacccactgctgcccagcatcttccgcaacctcctctaggctacctgcccagcttcttctgaggcagagagaaaaagaaaggaacatagaaacatagaacatagaaaggaagagagcaaggatgagcccccaaagggacttgatgatcaaagcagcataaaggtctaccccttcactgctggtcaagagtttgttccaaagttcacaacaaacccacactagaacccaaggctctgatgaaagcctatttcttgaggtgaatatgggccagaaaaggtaagtttcttcacctccaccctcagatggctcttgggaaaagccctctgaaaaaggcaactagcttccaagtagaaggttcaaagggcaaaagtccgttggggggcccagcatctgactgttccacctcattagccacaagtacatgagatcagtcattctggtaccaggagaagctgcacgaggacacctggccaaagctctcagacacacagagatccaaagtccttcacagcccacagcggctctggcagactcagggtaagctgtctgcccccttcccacagcaaccctcagcccccaccagcaccctgaaaggcaaaagcacgaaatacccttctcagccaagttgaacctggaatcatatcttctgttcattcatccagccaacatttattgaagaacccactacatgcaattcactgtggccacatgtgtatgacacgaagaatctttgcctgatccctgaagaacagtactctgtaaacaaagagccctgaactgccaggtactgctgactcactggtacaggggacatactgaaggcatagatggtaaaaatgtcctggtagtgtcctgaatggcaaaacaactaggtctcagtgtgggcaagtgtaggtaaggcaagaacagtcatgtccacctgtgaacagtgggccaaaacaccttggctctgaggaaaggacagtcgggtggagctggacttctggacacctatcctcttgctgagaggaaagttccacctctcttgcaaaacagaaagaaaaggctcagccctcctttctgatccctgagctattgtgaagtaaaatgtaaactgcttttaagtcatccaaagacagcatgcggaaggtaaagcttttagaaatcaataagatgcatatgatatgaatataacttgcagtaatagatactatttttaactgacaactgtgtgccaggtcactatgtacttacacctatcttctaatttaatctgacagagagtaagttttattatctttattttacacttgagaaaactgaggtcaggcagtgactagctccaaagcctacatccattccaccacaccacatacctccctaactgtatgcaagaatgtgagacggggagtgggattatctccccctgtggtaatggagatgcctagaacttcagagcactggggcagtccacgaatttctccaagaagtcagaataagcagcttcaggaggtgccatctgcacacctctctgtttgggaaaagcaaccatttctactaccctagacaggacagtgaggctccttcaaaactcagaattccttaactcactcactcattcattcattcattaagcttatattgagtacccactgtgttccaggccctgtgcaggctctgagattaagatccagtctccagccttcactcaaaagtggacattgacaattacaagaatcagttgctatgaaagtcactgagaggcaacctatctacccacacgtcactggaggagtgaatggggtgcaggcaagcaccaggatcactgttatctggactgagtgcatggaggctgctgctggggtgggggaggggaagcaatattcctgacagagagggcaaaacgttattaccctgacaatgaaatcagcaatgaatgaagtcaaccacccg

SEQ ID NO: 724319 - DNA, 2196 bp, Homo sapiens
gctccgcctcccgggttcacaccattctcctgcctcagcctcccgagtagctgggaccacaggcgcctgccaccacacccagctaattttttgtatttttagtagagacgggtttcaccatgttagccaggatggtctcaatctcctgaccttgtgatctgcccgcctcggcctcccaaagtgctgggattacaggcgtgagccaccgtgcccggccttgttttcttaattctccagatgattccaatccacagccagagttaggacccactgctgcccagcrtcttccgcaacctcctctaggctacctgcccagcttcttctgaggcagagagaaaaagaaaggaacatagaaacatagaacatagaaaggaagagagcaaggatgagcccccaaagggacttgatgatcaaagcagcataaaggtctaccccttcactgctggtcaagagtttgttccaaagttcacaacaaacccacactagaacccaaggctctgatgaaagcctatttcttgaggtgaatatgggccagaaaaggtaagtttcttcacctccaccctcagatggctcttgggaaaagccctctgaaaaaggcaactagcttccaagtagaaggttcaaagggcaaaagtccgttggggggcccagcatctgactgttccacctcattagccacaagtacatgagatcagtcattctggtaccaggagaagctgcacgaggacacctggccaaagctctcagacacacagagatccaaagtccttcacagcccacagcggctctggcagactcagggtaagctgtctgcccccttcccacagcaaccctcagcccccaccagcaccctgaaaggcaaaagcacgaaatacccttctcagccaagttgaacctggaatcatatcttctgttcattcatccagccaacatttattgaagaacccactacatgcaattcactgtggccacatgtgtatgacacgaagaatctttgcctgatccctgaagaacagtactctgtaaacaaagagccctgaactgccaggtactgctgactcactggtacaggggacatactgaaggcatagatggtaaaaatgtcctggtagtgtcctgaatggcaaaacaactaggtctcagtgtgggcaagtgtaggtaaggcaagaacagtcatgtccacctgtgaacagtgggccaaaacaccttggctctgaggaaaggacagtcgggtggagctggacttctggacacctatcctcttgctgagaggaaagttccacctctcttgcaaaacagaaagaaaaggctcagccctcctttctgatccctgagctattgtgaagtaaaatgtaaactgcttttaagtcatccaaagacagcatgcggaaggtaaagcttttagaaatcaataagatgcatatgatatgaatataacttgcagtaatagatactatttttaactgacaactgtgtgccaggtcactatgtacttacacctatcttctaatttaatctgacagagagtaagttttattatctttattttacacttgagaaaactgaggtcaggcagtgactagctccaaagcctacatccattccaccacaccacatacctccctaactgtatgcaagaatgtgagacggggagtgggattatctccccctgtggtaatggagatgcctagaacttcagagcactggggcagtccacgaatttctccaagaagtcagaataagcagcttcaggaggtgccatctgcacacctctctgtttgggaaaagcaaccatttctactaccctagacaggacagtgaggctccttcaaaactcagaattccttaactcactcactcattcattcattcattaagcttatattgagtacccactgtgttccaggccctgtgcaggctctgagattaagatccagtctccagccttcactcaaaagtggacattgacaattacaagaatcagttgctatgaaagtcactgagaggcaacctatctacccacacgtcactggaggagtgaatggggtgcaggcaagcaccaggatcactgttatctggactgagtgcatggaggctgctgctggggtgggggaggggaagcaatattcctgacagagagggcaaaacgttattaccctgacaatgaaatcagcaatgaatgaagtcaaccacccg

SEQ ID NO: 724320 - DNA, 2196 bp, Homo sapiens
gctccgcctcccgggttcacaccattctcctgcctcagcctcccgagtagctgggaccacaggcgcctgccaccacacccagctaattttttgtatttttagtagagacgggtttcaccatgttagccaggatggtctcaatctcctgaccttgtgatctgcccgcctcggcctcccaaagtgctgggattacaggcgtgagccaccgtgcccggccttgttttcttaattctccagatgattccaatccacagccagagttaggacccactgctgcccagcatcttccgcaacctcctctaggctacctgcccagcttcttctgaggcagagagaaaaagaaaggaacatagaaacatagaacatagaaaggaagagagcaaggatgagcccccaaagggacttgatgatcaaagcagcataaaggtctaccccttcactgctggtcaagagtttgttccaaagttcacaacaaacccacactagaacccaaggctctgatgaaagcctatttcttgaggtgaatatgggccagaaaaggtaagtttcttcacctccaccctcagatggctcttgggaaaagccctctgaaaaaggcaactagcttccaagtagaaggttcaaagggcaaaagtccgttggggggcccagcatctgactgttccacctcattagccacaagtacatgagatcagtcattctggtaccaggagaagctgcacgaggacacctggccaaagctctcagacacacagagatccaaagtccttcacagcccacagcggctctggcagactcagggtaagctgtctgcccccttcccacagcaaccctcagcccccaccagcaccctgaaaggcaaaagcacgaaatacccttctcagccaagttgaacctggaatcatatcttctgttcattcatccagccaacatttattgaagaacccactacatgcaattcactgtggccacatgtgtatgacacgaagaatctttgcctgatccctgaagaacagtactctgtaaacaaagagccctgaactgccaggtactgctgactcactggtacaggggacatactgaaggcatagatggtaaaaatgtcctggtagtgtcctgaatggcaaaacaactaggtctcagtgtgggcaagtgtaggtaaggcaagaacagtcatgtccacctgtgaacagtgggccaaaacaccttggctctgaggaaaggacagtcgggtggagctggacttctggacacctatcctcttgctgagaggaaagttccacctctcttgcaaaacagaaagaaaaggctcagccctcctttctgatccctgagctattgtgaagtaaaatgtaaactgcttttaagtcatccaaagacagcatgcggaaggtaaagcttttagaaatcaataagatgcatatgatatgaatataacttgcagtaatagatactatttttaactgacaactgtgtgccaggtcactatgtacttacacctatcttctaatttaatctgacagagagtaagttttattatctttattttacacttgagaaaactgaggtcaggcagtgactagctccaaagcctacatccattccaccacaccacatacctccctaactgtatgcaagaatgtgagacggggagtgggattatctccccctgtggtaatggagatgcctagaacttcagagcactggggcagtccacgaatttctccaagaagtcagaataagcagcttcaggaggtgccayctgcacacctctctgtttgggaaaagcaaccatttctactaccctagacaggacagtgaggctccttcaaaactcagaattccttaactcactcactcattcattcattcattaagcttatattgagtacccactgtgttccaggccctgtgcaggctctgagattaagatccagtctccagccttcactcaaaagtggacattgacaattacaagaatcagttgctatgaaagtcactgagaggcaacctatctacccacacgtcactggaggagtgaatggggtgcaggcaagcaccaggatcactgttatctggactgagtgcatggaggctgctgctggggtgggggaggggaagcaatattcctgacagagagggcaaaacgttattaccctgacaatgaaatcagcaatgaatgaagtcaaccacccg

SEQ ID NO: 724321 - DNA, 2196 bp, Homo sapiens
gctccgcctcccgggttcacaccattctcctgcctcagcctcccgagtagctgggaccacaggcgcctgccaccacacccagctaattttttgtatttttagtagagacgggtttcaccatgttagccaggatggtctcaatctcctgaccttgtgatctgcccgcctcggcctcccaaagtgctgggattacaggcgtgagccaccgtgcccggccttgttttcttaattctccagatgattccaatccacagccagagttaggacccactgctgcccagcatcttccgcaacctcctctaggctacctgcccagcttcttctgaggcagagagaaaaagaaaggaacatagaaacatagaacatagaaaggaagagagcaaggatgagcccccaaagggacttgatgatcaaagcagcataaaggtctaccccttcactgctggtcaagagtttgttccaaagttcacaacaaacccacactagaacccaaggctctgatgaaagcctatttcttgaggtgaatatgggccagaaaaggtaagtttcttcacctccaccctcagatggctcttgggaaaagccctctgaaaaaggcaactagcttccaagtagaaggttcaaagggcaaaagtccgttggggggcccagcatctgactgttccacctcattagccacaagtacatgagatcagtcattctggtaccaggagaagctgcacgaggacacctggccaaagctctcagacacacagagatccaaagtccttcacagcccacagcggctctggcagactcagggtaagctgtctgcccccttcccacagcaaccctcagcccccaccagcaccctgaaaggcaaaagcacgaaatacccttctcagccaagttgaacctggaatcatatcttctgttcattcatccagccaacatttattgaagaacccactacatgcaattcactgtggccacatgtgtatgacacgaagaatctttgcctgatccctgaagaacagtactctgtaaacaaagagccctgaactgccaggtactgctgactcactggtacaggggacatactgaaggcatagatggtaaaaatgtcctggtagtgtcctgaatggcaaaacaactaggtctcagtgtgggcaagtgtaggtaaggcaagaacagtcatgtccacctgtgaacagtgggccaaaacaccttggctctgaggaaaggacagtcgggtggagctggacttctggacacctatcctcttgctgagaggaaagttccacctctcttgcaaaacagaaagaaaaggctcagccctcctttctgatccctgagctattgtgaagtaaaatgtaaactgcttttaagtcatccaaagacagcatgcggaaggtaaagcttttagaaatcaataagatgcatatgatatgaatataacttgcagtaatagatactatttttaactgacaactgtgtgccaggtcactatgtacttacacctatcttctaatttaatctgacagagagtaagttttattatctttattttacacttgagaaaactgaggtcaggcagtgactagctccaaagcctacatccattccaccacaccacatacctccctaactgtatgcaagaatgtgagacggggagtgggattatctccccctgtggtaatggagatgcctagaacttcagagcactggggcagtccacgaatttctccaagaagtcagaataagcagcttcaggaggtgccatctgcacacctctctgtttgggaaaagcaaccatttctactaccctagacaggacagtgaggctccttcaaaactcagaattccttmactcactcactcattcattcattcattaagcttatattgagtacccactgtgttccaggccctgtgcaggctctgagattaagatccagtctccagccttcactcaaaagtggacattgacaattacaagaatcagttgctatgaaagtcactgagaggcaacctatctacccacacgtcactggaggagtgaatggggtgcaggcaagcaccaggatcactgttatctggactgagtgcatggaggctgctgctggggtgggggaggggaagcaatattcctgacagagagggcaaaacgttattaccctgacaatgaaatcagcaatgaatgaagtcaaccacccg

SEQ ID NO: 724322 - DNA, 2196 bp, Homo sapiens
gctccgcctcccgggttcacaccattctcctgcctcagcctcccgagtagctgggaccacaggcgcctgccaccacacccagctaattttttgtatttttagtagagacgggtttcaccatgttagccaggatggtctcaatctcctgaccttgtgatctgcccgcctcggcctcccaaagtgctgggattacaggcgtgagccaccgtgcccggccttgttttcttaattctccagatgattccaatccacagccagagttaggacccactgctgcccagcatcttccgcaacctcctctaggctacctgcccagcttcttctgaggcagagagaaaaagaaaggaacatagaaacatagaacatagaaaggaagagagcaaggatgagcccccaaagggacttgatgatcaaagcagcataaaggtctaccccttcactgctggtcaagagtttgttccaaagttcacaacaaacccacactagaacccaaggctctgatgaaagcctatttcttgaggtgaatatgggccagaaaaggtaagtttcttcacctccaccctcagatggctcttgggaaaagccctctgaaaaaggcaactagcttccaagtagaaggttcaaagggcaaaagtccgttggggggcccagcatctgactgttccacctcattagccacaagtacatgagatcagtcattctggtaccaggagaagctgcacgaggacacctggccaaagctctcagacacacagagatccaaagtccttcacagcccacagcggctctggcagactcagggtaagctgtctgcccccttcccacagcaaccctcagcccccaccagcaccctgaaaggcaaaagcacgaaatacccttctcagccaagttgaacctggaatcatatcttctgttcattcatccagccaacatttattgaagaacccactacatgcaattcactgtggccacatgtgtatgacacgaagaatctttgcctgatccctgaagaacagtactctgtaaacaaagagccctgaactgccaggtactgctgactcactggtacaggggacatactgaaggcatagatggtaaaaatgtcctggtagtgtcctgaatggcaaaacaactaggtctcagtgtgggcaagtgtaggtaaggcaagaacagtcatgtccacctgtgaacagtgggccaaaacaccttggctctgaggaaaggacagtcgggtggagctggacttctggacacctatcctcttgctgagaggaaagttccacctctcttgcaaaacagaaagaaaaggctcagccctcctttctgatccctgagctattgtgaagtaaaatgtaaactgcttttaagtcatccaaagacagcatgcggaaggtaaagcttttagaaatcaataagatgcatatgatatgaatataacttgcagtaatagatactatttttaactgacaactgtgtgccaggtcactatgtacttacacctatcttctaatttaatctgacagagagtaagttttattatctttattttacacttgagaaaactgaggtcaggcagtgactagctccaaagcctacatccattccaccacaccacatacctccctaactgtatgcaagaatgtgagacggggagtgggattatctccccctgtggtaatggagatgcctagaacttcagagcactggggcagtccacgaatttctccaagaagtcagaataagcagcttcaggaggtgccatctgcacacctctctgtttgggaaaagcaaccatttctactaccctagacaggacagtgaggctccttcaaaactcagaattccttaactcactcactcattcattcattcattaagcttatattgagtacccactgtgttccaggccctgtgcaggctctgagattaagatccagtctccagccttcactcaaaagtggacattgacaattacaagaatcagktgctatgaaagtcactgagaggcaacctatctacccacacgtcactggaggagtgaatggggtgcaggcaagcaccaggatcactgttatctggactgagtgcatggaggctgctgctggggtgggggaggggaagcaatattcctgacagagagggcaaaacgttattaccctgacaatgaaatcagcaatgaatgaagtcaaccacccg

SEQ ID NO: 724323 - DNA, 149 bp, Homo sapiens
aggtaacgggtagatgtgcttgcagagtcaagacagataaagccaacaacacacaccgtttctctctgatgtcttgcctgagacaagctctaggtggaggaaagagtaagtkttaactttaaatgaagttccaaattttaataattaca

SEQ ID NO: 724324 - DNA, 1264 bp, Homo sapiens
aattaccttccaaatgcccctggctccaaatggcatacccctgggagttaaaactttaacatataaatttgggggtgaggacacaaactttcagttcttaataacatgacaaaaaattgttatagtgataagcaggaaggaaagggatacaaagtacataatctatgagcatagctatataaactaataaacaataaataaaaatttaaaaatacaacagaagtacatcgaaatcaggcctggagcagtggctcacacttgtaatcctagcactttgggaggctgaggctggaggacagcttgagcccaggagtttgagaccagtctgggcaacatggtaaaaccctgtctctaaaaaaaaaaaaaaaaaagaatcagccaggagtggtggtgcatgcctgtagtcccagctacttgggaggtgaaggtgggaagatcaattgagcccaggaggttgagactgcagtgagctaggattacaccactgcactccagcctgggtgacagagtgacatactatctcaaaaaaaaaaaaaaagtacatcaaaaataattttttgttttgtttttatttttgtttgtttgtttggagatggagtcttgctctgttgcccaggctggagtgcagtgacacaatctcagctcactgcaacctcctcctccgggttcaagtgattctcatgcctcagcctcccgagtagctgggattggaggatttattgttcaatgggtatagagtttcagtttggtctcgaatttttttttcaagaccttggcctcccaaagtgttgggactgcaggtgtccggccagtagtacaaaaattttaaagacgctgagtaactgtgagcaaaattatgagatttttactctgtttgccagtcttcatagtccctgccacacctaattcaacattttgttgttgttgttgttgttgcctgtctttatggaacctatttaaagaaatcaacttgatttttacacttgtatttcattggtttatttttagttagttaaaatacgtaattacaataactagtccatttatgaaaggaggagtttggaaacaactgattcttggtataagtcaactggtggaacaaaagtgtgtgtgtacagaagcctactagctgcaaaggctcagcatgctgtggacatcaatcatttgggagcacacagatggagaacasagctattggaagcatactatttgcattcatatcccagctcagctaccttttagccatttaatcttgaacaagaaa

SEQ ID NO: 724325 - DNA, 594 bp, Homo sapiens
ccgcacatccagggaccaacatcctagatgtttctgcccctggatgtgtacacatatgactgtacaactagctgaccagatggaagtcagctagttggaacttacctaaaacaagacagctagttggaatttgttttaggcaaaagaaaagaaaagaaacactttcacaggcagcttgattccacagagcactctggctttctgcagattaaaaaaaaatctcatggatatgctcaagctgaagaatgaagatccaagtcaagacagaggaatcctgactcactgcaatgatctctggcaattctgcaggtccctgagctgcgtgcgtrcgcgcgcgtgtgtgtgtgtgtgtgtgtgtggtcacatatgcctcagagaggagcatgcctcaaaggagacccaggggggctccctggggttggagggaggaacagccaaggcataatttctgccccagagacaatgagtttaaaagctccactctgccacggggatatctaaattatacttacagaaacctcaactctttattcatttgcaccagaagggggcactgttacctctaaaacgcatctcaggccacaggtccccata

SEQ ID NO: 724326 - DNA, 595 bp, Homo sapiens
cccagctactcaggaggctgaggcaggagaaacccttgaaccaaggaggtagaggttgcattgagccgagatcgcaccactgcactccagcctgagcaacaagagcaaaactctgtctcaaaaaaaaaaaaaaaaaaaaagaataaaagcccacttccattgtaactgctaccagatctgtctccagagatatagactacaatctagcatgatttggaagccaaatgttatgttttgagattctccctgggctgagccagcaggtcactgttcattagttgaactctcatgggaaccctgtttggggcagatttcgtcattcttcctcactctgtgtctccattcctgccttggacagtgtttcatgccggatataaactcagtgactcaagtccccttggtgacttcagggtccctsttatttgctcctttaaaggaacagaagggagaaaaatatatcgtagaatccaaagagcccagaggccagagacctaattttgtttattcaataactaatattttagtatctagtaggcttggataggtatatagaaccttgaaggcacagccagcaggacttactggaagataaatg

SEQ ID NO: 724327 - DNA, 1524 bp, Homo sapiens
ggccaggaattggagaacagcctggacaacacagggagacctggtctctacaaaaaaaaattaaaaattgccaggcatggctgtgtgtgccatgtagtcgtagctacttggaaacccgaggtaggagaactgcttgagcccagaagttcaaggttacagtgagctatgatcatgccactgcactccagcctgggcaacatagccagatcctatctctaaaaaatcaaattcttttaaataaataaaatagccaggtgcagtagctcatgtctgtaatcccagcgctttgggaggccaaggcgagcagaccacttgagtccasgagtttgagaccagcaagggcaatgtggcaaaaccttctctctatgaaaaacaagaaaattagccaggcatggtggcgtgtgcctgtatcccagctactcaggagactaaggtgggagaatctattgagcctgggaggcagaggtttccgtaaactgagatcacgtcggtcaatcaatcaatcaaatacataagtatgagatacataaatattaaaatacttctatattttaagcattcataagtatactcccttaatattaaagtatatagtatttggtataaaatatgtaagtatacaaataatacaatatttaggtataagtattcataaaagtattcgtatgcttaatattaaagtacgtaagtataaagtatataaacacagaaatatcatttttaaatgcataagtatatgaatacttaaaatacaccatatttagtaaatgtagaaagaatcaatgctattggcctataaagagtaagagtattaaacgtatgactacactgttttcactaatttttgtaaagtaaattttgttccttattttaagtgcacttagctctgctctcgatcatgaaaaaaacagaataatcaatgaaatattaactatctagcccttggatgctagagacacaattttgaaggtcaattatttcaagcccaaaattgtaatattttttaaatgaggaaatgtagtcctttaaaaaatgttaatttttataaatctcagcatttcttgcatgataggccagaaggaaatgcatctgtacttaaatattttaatgtaagttccttatttcatgcttttctttaatcattttgataggaaataattatttttaaaagaattattaacctttttatataatggtgagttcacaaagagatttacatgtacacctatgttaaacaacatgatttttctaccactatcagaaaaataattggataaaaaaactgcttttaagcaatttttaatgtacaaattcgataagatgaatattaaaattcaatgagtaattataattatgattttatacatacatatacacacttttttttttttttttttgagatgatgtcttgctctgtcaccctggctggagtgcagtggtatgatctcggctcactgcaacctctgcctcccgggttcaagcgattcttctgcctcagcctcctgagtagctgggaccacaggc

SEQ ID NO: 724328 - DNA, 1470 bp, Homo sapiens
tttctatgtgttggcagtgcattttatgtgacaaaaagtagaatgtagggggaggtttaagtcaaatatctatgtgatcttttcacttataatttgcatttagttaaggagtgactatcttgccttttacctttgtgctggcggtggttttttaaagaatcaatttggtgtacaaatcctttctttctttttttatttttgattttttttgagatggagtttcgctcttgttgcccaggctgtagtgccattgcactatctcagctcattgcaacctccgcctcccggatttaagcggttctcctgcctcagccttctaagtagctgcgattactggcatgcgccaccacacccagctaatttttgtatttttagtagagacggggtttctccatgttggtcaggctggtctcaaactcccgacctcaggtgatccacacgcctcagcckcccaaagtgctgggattacaggcgtgagcctccgcgcccggcccaaatcttttcaccatgggtttacaggcataacgccaccacacccagggaattttaaaattgttttttagagaggggggtcttactattttgctcaggctggcaaactccttttaaaagatattgaaagccatctggtttattatttttatttcaaaatataataatggaagaaattttacagtattatatacaatttactgagtcagctatcagttcctttttctgatttttttctagttgccattcttgatattttctaggtaatctaaactgagttgtattttcaagtactcttaaaatactttaaaaaattttaaattgagccgtttaattctttgcttaaaggtgatgggtattttattttctgtatggcaccacgtgattttaaattgaactcttcatttattagtcatttggttataaactcagcatagattgcgcagaattttgagaggggagaaactatagctttcctttcggatgccactggtgggtagcctgttttgcctgtttgttcttatgttaaagaagggctctacgtcctgtctggaaagggcggagctggctcggaccgccccactgcctttcccaggaccttcactcgtcctgtcccaccgcagccccgcctcctccacgccgggtgagctgtggcctagcagcatccgaggctccgccccccccacccccaagcgtctgcgctctagcgaaggggcggagcagggcggtggcgcgctgacacctggcggcggcggagggcgggcagaaggcgagcgtgggctgggattggctgaggcgacgcgggtggagggggcgggaaggaggcggggagacggttgtcgggctggttcctgtgctggatcctgggcggcctgaggggtacggagactctgggggagggagacggcagcggcatggcggccgggtgtaagacgcccgaccctcctcttccctgtcttcgccgccgccgctgctgga

SEQ ID NO: 724329 - DNA, 1470 bp, Homo sapiens
tttctatgtgttggcagtgcattttatgtgacaaaaagtagaatgtagggggaggtttaagtcaaatatctatgtgatcttttcacttataatttgcatttagttaaggagtgactatcttgccttttacctttgtgctggcggtggttttttaaagaatcaatttggtgtacaaatcctttctttctttttttatttttgattttttttgagatggagtttcgctcttgttgcccaggctgtagtgccattgcactatctcagctcattgcaacctccgcctcccggatttaagcggttctcctgcctcagccttctaagtagctgcgattactggcatgcgccaccacacccagctaatttttgtatttttagtagagacggggtttctccatgttggtcaggctggtctcaaactcccgacctcaggtgatccacacgcctcagccgcccaaagtgctgggattacaggcgtgagcctccgcgcccggcccaaatcttttcaccatgggtttacaggcataacgccaccacacccagggaattttaaaattgttttttagagaggggggtcttactattttgctcaggctggcaaactccttttaaaagatattgaaagccatctggtttattatttttatttcaaaatataataatggaagaaattttacagtattatatacaatttactgagtcagctatcagttcctttttctgatttttttctagttgccattcttgatattttctaggtaatctaaactgagttgtattttcaagtactcttaaaatactttaaaaaattttaaattgagccgtttaattctttgcttaaaggtgatgggtattttattttctgtatggcaccacgtgattttaaattgaactcttcatttattagtcatttggttataaactcagcatagattgcgcagaattttgagaggggagaaactatagctttcctttcggatgccactggtgggtagcctgttttgcctgtttgttcttatgttaaagaagggctctacgtcctgtctggaaagggcggagctggctcggaccgccccactgcctttcccaggaccttcactcgtcctgtcccaccgcagccccgcctcctccacgccgggtgagctgtggcctagcagcatccgaggctccgccccccccacccccmagcgtctgcgctctagcgaaggggcggagcagggcggtggcgcgctgacacctggcggcggcggagggcgggcagaaggcgagcgtgggctgggattggctgaggcgacgcgggtggagggggcgggaaggaggcggggagacggttgtcgggctggttcctgtgctggatcctgggcggcctgaggggtacggagactctgggggagggagacggcagcggcatggcggccgggtgtaagacgcccgaccctcctcttccctgtcttcgccgccgccgctgctgga

SEQ ID NO: 724330 - DNA, 654 bp, Homo sapiens
tgactggccccaccctaaatcacttcattagcataatcaggtttgatcaaaaatagtggctcataaataaccaaagacactcctattagaaaattccaagagttttaggaggactgtgacaggaactggagagaaagaccatgtatttcatattatatcacagggacagaggtaatggttaaagctagtggataatgatgcaagtattgtctgctgaaagccaattcgttccgtatttcttaatattgcatgtttggtatcttttggttgcaagcaacaaaaacgaatttaagaaaaagaagaagtaattaaatccggccgggcgyggtggctcacgcctgtaatcccagcactttgggaggccgaggcggacggatcacgaggtcaggagatcaagaccatcctggctaacacggtaaaaccccgtctctacttaaaaaaaaattagccaggtatggtggcgggcgcctgtagtcccagctacttgggaggctgaggcaggagaatggcatgaacccgggaggcggagcttgcagtgagccgagatctagccactgcactccagcctgggagacagagcgagactccatctcaaaaaaaaaaaaagtaattaaatccagaagggtagtggtgcagctagtttcaaggatttga

SEQ ID NO: 724331 - DNA, 654 bp, Homo sapiens
tgactggccccaccctaaatcacttcattagcataatcaggtttgatcaaaaatagtggctcataaataaccaaagacactcctattagaaaattccaagagttttaggaggactgtgacaggaactggagagaaagaccatgtatttcatattatatcacagggacagaggtaatggttaaagctagtggataatgatgcaagtattgtctgctgaaagccaattcgttccgtatttcttaatattgcatgtttggtatcttttggttgcaagcaacaaaaacgaatttaagaaaaagaagaagtaattaaatccggccgggcgtggtggctcacgcctgtaatcccagcactktgggaggccgaggcggacggatcacgaggtcaggagatcaagaccatcctggctaacacggtaaaaccccgtctctacttaaaaaaaaattagccaggtatggtggcgggcgcctgtagtcccagctacttgggaggctgaggcaggagaatggcatgaacccgggaggcggagcttgcagtgagccgagatctagccactgcactccagcctgggagacagagcgagactccatctcaaaaaaaaaaaaagtaattaaatccagaagggtagtggtgcagctagtttcaaggatttga

SEQ ID NO: 724332 - DNA, 654 bp, Homo sapiens
tgactggccccaccctaaatcacttcattagcataatcaggtttgatcaaaaatagtggctcataaataaccaaagacactcctattagaaaattccaagagttttaggaggactgtgacaggaactggagagaaagaccatgtatttcatattatatcacagggacagaggtaatggttaaagctagtggataatgatgcaagtattgtctgctgaaagccaattcgttccgtatttcttaatattgcatgtttggtatcttttggttgcaagcaacaaaaacgaatttaagaaaaagaagaagtaattaaatccggccgggcgtggtggctcacgcctgtaatcccagcactttgggaggccgaggcggacggatcacgaggtcaggagatcaagaccatcctggctaacacggtaaaaccccgtctctacttaaaaaaaaattagcyaggtatggtggcgggcgcctgtagtcccagctacttgggaggctgaggcaggagaatggcatgaacccgggaggcggagcttgcagtgagccgagatctagccactgcactccagcctgggagacagagcgagactccatctcaaaaaaaaaaaaagtaattaaatccagaagggtagtggtgcagctagtttcaaggatttga

SEQ ID NO: 724333 - DNA, 980 bp, Homo sapiens
gcacacatatgtttattgtggcactgttcacattagcaaagacttggaaccaacccaaatgcccatcaatgatagactggataaagaaaatgtggcacatatacaccatgaaatactatgcagccataaaaaaggatgagttcatgtcctttgcagggacatggatgaagctggaaaccatcattctcagcagactaacacaggaatgaaaaccaaacactgcacattctcataggtgggagttgaacaatgagaacacatggatacagggcggggaacatcacacaccggggcctgtcggtaggtggggagctagcagaggggtagcattaggagagatacctaatgtagatgacaggttgatgggtgcagcaaaccaccatggcacatgtatacttatgtaacaaacttgcacgttctgcacgtgtatcccagaactgaaagtataatttacaaaaaaatccagattaaagcaagcgacatttcttctttcttccgtgggatattctgttgctccttctgatacattctgctcctttttcccccaccattattagatctatttcctytggtgaatctggtgctgcctctgtctttacaaaaagcaattctgctgtcttcctagctcaaaaagcatgaatggttttatgaaaaatcagtaatatacaatgggggaagtagtgttggaaaactttttaaaggacagcatagtttcagcacaaatgcagtttaaatcagttttctagggagtctaaatctatattgtatgagactcttggttcaggaataaattcaatatattccttaaacttaaaaaactaaattatcttcaatgaaatgtttatagtaaactaatgaacagttcatagtaattagttatattttacagagatttttagtaacaaaagctcacaaatttttcttctcacccataaatttaatacttcactcctgaaaattttagttatttatacttttta

SEQ ID NO: 724334 - DNA, 1080 bp, Homo sapiens
ggacctgcctctggtgtggactgtggaaggagagatgctctgggcttccaggggagccgcctgctgcagcagcagcccaggccatgctgcctggcacagagctcaaggtcccaagtgcccccgctgggtgctgggctgcctgccctggcttgcagtcttctcccaggtccgcactcttctgcaggggccatcactgcccttgtcctaccaaggacaactaggtctcagtgagtggcaaatagaagccaactccctgcataactcaggaaactgactccgagcattccctcaaccagggaccactcaccctggcccagacctccccgagaactcctgcctcttcctggggcctctggcctaccccatcctgtcccttggggctgctggcagggttggcgtgtatgggtgtggacaggcagaccctcgcgggcagcctgctcctggggccctggcactgcctggctggggctcacaggcacgctgccctcctcccttcactcctgccccaaggatgccctctgttcaggctgaacaccccaacagcagccttttgggtgacctccgagtgagttacccagaatagcttctgctggcgaatagcatcttctgcaaggtggctccttcactgccttttggagctcaggcacttctggggcccagacacacgggtgacatgttaccacatccaaacrgaccactgggaactttaaaactgccgtcttctgctttattgacaggtaaattgttcaaaaatgttctcacaattcaataattaattacaaagactgagacttacattaaaaaagtaaaaaccagaaccccccaggtgcccatccagcagaaggcccaggagggcagtggggtggcagggctaggcggtgctgggccactcagtgccgacttggggaagtgcacgtcctgaacagccttgccaagcagccgaccggtgggaggacaggggaagcctggcccaagctgtggacaagctgtgtctgccgccacagttaatcacaagcctctgacgacacagggccacagagctggtcactcaacatctggtacaaagggtgaggtgaaatc

SEQ ID NO: 724335 - DNA, 1207 bp, Homo sapiens
tgaggtgggtggatcacctgaggtcagaagttcaagaccatcctgggcgacatggtgaaaccccatctctactaaaaatacaaaaaaaaaaaaaaaaaaaaaaaaaaattagccgggcatagtggcgcgtgcctgtagtcccagctacttgggatgctgaggcacaagaattgcttgaacctgggaggtggaggttgtggtgagccgaaactgcaccactgcactccagcctgggtgacagagtaagactgtctcaaaaaaaaaaaaaaaaaaaaaaaaagggagggatgagggattagcaagggcaggcgtgctggctgtagagaatgaggcatgaaratgccgcctctgtctccatctctgctgcccactctccacagctgtgactcacacactcatggacagtactggctgtaaactcacttgctaccgggccctctactctgttaatgttacagaaagctaccgctttcctggccgcctccattcagtgatcaagcaccatctctggttctctggaatccacttattcctccccacagcagtgcccggctccgcagcaacgagagaggcaatgacttgtgcagaaacaggcttatcaaagatctggcgggcacttaccggttaaatagatttgcttcttcaaaactgtggatttcagggaaaagacaagcattgccagtttgataaaacaaacaaacattttgacaggtgaaggtgaacaggtgtgcgtccagagtggctgtgagcaatgcaagcctgcttgggtgttgtaatgacagacacaggccaggatgctaagagtccaccccaagggaggctgctacgggcagatgcccacatgggcacctgctgactgccccctactcacacaggcagcaaccctagccaaccccacctcaacccaacgatcagacttggcatcacccaccctgggcaggccggcctctgtgcgtggaaagggcacagctcctcctgaggagagtttgtgccaaaggttcaacccacaactgatgaagatgaaacatcagacaaacccagagtggacattctgcaggacaactggcctgggtaacaccaaaatatcattgtcataaaagggaacagatggggaactgttccagattaaaggaaacaaaagactaaatgcgattcatgacctccagatggatccagaactaggaggaaaagccagcaggaaagggca

SEQ ID NO: 724336 - DNA, 1882 bp, Homo sapiens
cacacgcactgcacacagagggacacccatgtgtggtgcccgcttggcacacacatggcctcacccctttcctgctggtgtttccacttagcagaagtggccaggaggtggcaaactgccgacccgccttggtgcccccatctggagccgccagggctgaggccagggcatgactcagggttcctggttgcagaagtcaaggggcagccttggctcaggtttaaggctgatttcagtgagcggctgcttgctttatgttgttcttttgagtggtggggaggcaaagcccagagaagcagggaggtggagagagccacactggctccgttttccattgttgggcctcaatttcctcatctgcaagctgagcagggcaatcgtgtgccactaaattctaccacgacctgaggatgaggcagtggaatgacctgtgattttgaggtaagccctgcagtagattcaaggcaggagaaatcagcctgacaagaggcagtcaaggaaggcttcttggaggaggagcacttgtgccagactgcatagcccattcctgctgaaacagaacccagaactgagctgcccttcatggcatgtgcttgggaaagctgtggcaggaccttgggccacttttgtgctgctgcctgtgatgtgcaccctgtgtgcagttccacacacgggaccctgcaaggttgataggattatccccattttacagatggcaaagctgaggcttaggttttatggcccatgtcaaagagctgggaagttaaagcctaggtaggaatgccagatctgctgcccgatttgcaggagcccgcacggtgtccacatctcctgcagttgccttctcctccttcctcacacccagccccatctcattcaatccttagtgctctgtaagtgacaaactgactcctttcgaatgacagtacctggagcccattatgggcaaaaattagggtacaggtcccttaggaacgagttggagcctccagtgtgtgtcaagttcagcatgcatggttcattaacatgcccttggcgtctctctgtcccatggtgatcccccttgcatgggcaaggggtgacagtaaccccatctctctgtttgcagatgatggcagttggggctgtctcagcctcttggacacttatgtcctccagtggggtcaagggagggagcatcgaagatgagggtaactgtcggctcctgctcttgtgttttacatggatgggtctccaatctccttcacagctgcctgggtgtgaagatgctctgactgtwcccggggatggggagtccctgtggggacagcctgaatactcgaatcagacagactcaggctcacatttgccctttgccttgtcctagagcttcatctcatctccaagacctctcagctataaaacagcccttgtatcactgaagcctcaccaggcagggattctcctggcttgtttactctggaatcttctgtgtcttgaatcaagtaaatgctcaatagccatctgttggaattgtgaactacagagccgtttgtgtgaactacagagctattaaatgagataaaatgtggttagggcctgttacacaatcagtgcttcataaatgatccctgctgtattcatataaagtgcttggaacagtggctggaaaataataataatacaattaatagtaattcaggatatgatgattaattttttaggcttctgatacaagttccgcaataacagtcactcctctgggcatctgttatttgccaggcatcttgtcaggtgcttttcaagacatcttctcattagaccttcgtcgtggccttggggggcaccttttattatccctatttcactgactaggaaactaaggctcatagatgccatgact

SEQ ID NO: 724337 - DNA, 1882 bp, Homo sapiens
cacacgcactgcacacagagggacacccatgtgtggtgcccgcttggcacacacatggcctcacccctttcctgctggtgtttccacttagcagaagtggccaggaggtggcaaactgccgacccgccttggtgcccccatctggagccgccagggctgaggccagggcatgactcagggttcctggttgcagaagtcaaggggcagccttggctcaggtttaaggctgatttcagtgagcggctgcttgctttatgttgttcttttgagtggtggggaggcaaagcccagagaagcagggaggtggagagagccacactggctccgttttccattgttgggcctcaatttcctcatctgcaagctgagcagggcaatcgtgtgccactaaattctaccacgacctgaggatgaggcagtggaatgacctgtgattttgaggtaagccctgcagtagattcaaggcaggagaaatcagcctgacaagaggcagtcaaggaaggcttcttggaggaggagcacttgtgccagactgcatagcccattcctgctgaaacagaacccagaactgagctgcccttcatggcatgtgcttgggaaagctgtggcaggaccttgggccacttttgtgctgctgcctgtgatgtgcaccctgtgtgcagttccacacacgggaccctgcaaggttgataggattatccccattttacagatggcaaagctgaggcttaggttttatggcccatgtcaaagagctgggaagttaaagcctaggtaggaatgccagatctgctgcccgatttgcaggagcccgcacggtgtccacatctcctgcagttgccttctcctccttcctcacacccagccccatctcattcaatccttagtgctctgtaagtgacaaactgactcctttcgaatgacagtacctggagcccattatgggcaaaaattagggtacaggtcccttaggaacgagttggagcctccagtgtgtgtcaagttcagcatgcatggttcattaacatgcccttggcgtctctctgtcccatggtgatcccccttgcatgggcaaggggtgacagtaaccccatctctctgtttgcagatgatggcagttggggctgtctcagcctcttggacacttatgtcctccagtggggtcaagggagggagcatcgaagatgagggtaactgtcggctcctgctcttgtgttttacatggatgggtctccaatctccttcacagctgcctgggtgtgaagatgctctgactgttcccggggatggggagtccctgtggggacagcctgaatactcgaatcagacagactcaggctcacatttgccctytgccttgtcctagagcttcatctcatctccaagacctctcagctataaaacagcccttgtatcactgaagcctcaccaggcagggattctcctggcttgtttactctggaatcttctgtgtcttgaatcaagtaaatgctcaatagccatctgttggaattgtgaactacagagccgtttgtgtgaactacagagctattaaatgagataaaatgtggttagggcctgttacacaatcagtgcttcataaatgatccctgctgtattcatataaagtgcttggaacagtggctggaaaataataataatacaattaatagtaattcaggatatgatgattaattttttaggcttctgatacaagttccgcaataacagtcactcctctgggcatctgttatttgccaggcatcttgtcaggtgcttttcaagacatcttctcattagaccttcgtcgtggccttggggggcaccttttattatccctatttcactgactaggaaactaaggctcatagatgccatgact

SEQ ID NO: 724338 - DNA, 1882 bp, Homo sapiens
cacacgcactgcacacagagggacacccatgtgtggtgcccgcttggcacacacatggcctcacccctttcctgctggtgtttccacttagcagaagtggccaggaggtggcaaactgccgacccgccttggtgcccccatctggagccgccagggctgaggccagggcatgactcagggttcctggttgcagaagtcaaggggcagccttggctcaggtttaaggctgatttcagtgagcggctgcttgctttatgttgttcttttgagtggtggggaggcaaagcccagagaagcagggaggtggagagagccacactggctccgttttccattgttgggcctcaatttcctcatctgcaagctgagcagggcaatcgtgtgccactaaattctaccacgacctgaggatgaggcagtggaatgacctgtgattttgaggtaagccctgcagtagattcaaggcaggagaaatcagcctgacaagaggcagtcaaggaaggcttcttggaggaggagcacttgtgccagactgcatagcccattcctgctgaaacagaacccagaactgagctgcccttcatggcatgtgcttgggaaagctgtggcaggaccttgggccacttttgtgctgctgcctgtgatgtgcaccctgtgtgcagttccacacacgggaccctgcaaggttgataggattatccccattttacagatggcaaagctgaggcttaggttttatggcccatgtcaaagagctgggaagttaaagcctaggtaggaatgccagatctgctgcccgatttgcaggagcccgcacggtgtccacatctcctgcagttgccttctcctccttcctcacacccagccccatctcattcaatccttagtgctctgtaagtgacaaactgactcctttcgaatgacagtacctggagcccattatgggcaaaaattagggtacaggtcccttaggaacgagttggagcctccagtgtgtgtcaagttcagcatgcatggttcattaacatgcccttggcgtctctctgtcccatggtgatcccccttgcatgggcaaggggtgacagtaaccccatctctctgtttgcagatgatggcagttggggctgtctcagcctcttggacacttatgtcctccagtggggtcaagggagggagcatcgaagatgagggtaactgtcggctcctgctcttgtgttttacatggatgggtctccaatctccttcacagctgcctgggtgtgaagatgctctgactgttcccggggatggggagtccctgtggggacagcctgaatactcgaatcagacagactcaggctcacatttgccctttgccttgtcctagagcttcatctcatctccaagacctctcagctrtaaaacagcccttgtatcactgaagcctcaccaggcagggattctcctggcttgtttactctggaatcttctgtgtcttgaatcaagtaaatgctcaatagccatctgttggaattgtgaactacagagccgtttgtgtgaactacagagctattaaatgagataaaatgtggttagggcctgttacacaatcagtgcttcataaatgatccctgctgtattcatataaagtgcttggaacagtggctggaaaataataataatacaattaatagtaattcaggatatgatgattaattttttaggcttctgatacaagttccgcaataacagtcactcctctgggcatctgttatttgccaggcatcttgtcaggtgcttttcaagacatcttctcattagaccttcgtcgtggccttggggggcaccttttattatccctatttcactgactaggaaactaaggctcatagatgccatgact

SEQ ID NO: 724339 - DNA, 1882 bp, Homo sapiens
cacacgcactgcacacagagggacacccatgtgtggtgcccgcttggcacacacatggcctcacccctttcctgctggtgtttccacttagcagaagtggccaggaggtggcaaactgccgacccgccttggtgcccccatctggagccgccagggctgaggccagggcatgactcagggttcctggttgcagaagtcaaggggcagccttggctcaggtttaaggctgatttcagtgagcggctgcttgctttatgttgttcttttgagtggtggggaggcaaagcccagagaagcagggaggtggagagagccacactggctccgttttccattgttgggcctcaatttcctcatctgcaagctgagcagggcaatcgtgtgccactaaattctaccacgacctgaggatgaggcagtggaatgacctgtgattttgaggtaagccctgcagtagattcaaggcaggagaaatcagcctgacaagaggcagtcaaggaaggcttcttggaggaggagcacttgtgccagactgcatagcccattcctgctgaaacagaacccagaactgagctgcccttcatggcatgtgcttgggaaagctgtggcaggaccttgggccacttttgtgctgctgcctgtgatgtgcaccctgtgtgcagttccacacacgggaccctgcaaggttgataggattatccccattttacagatggcaaagctgaggcttaggttttatggcccatgtcaaagagctgggaagttaaagcctaggtaggaatgccagatctgctgcccgatttgcaggagcccgcacggtgtccacatctcctgcagttgccttctcctccttcctcacacccagccccatctcattcaatccttagtgctctgtaagtgacaaactgactcctttcgaatgacagtacctggagcccattatgggcaaaaattagggtacaggtcccttaggaacgagttggagcctccagtgtgtgtcaagttcagcatgcatggttcattaacatgcccttggcgtctctctgtcccatggtgatcccccttgcatgggcaaggggtgacagtaaccccatctctctgtttgcagatgatggcagttggggctgtctcagcctcttggacacttatgtcctccagtggggtcaagggagggagcatcgaagatgagggtaactgtcggctcctgctcttgtgttttacatggatgggtctccaatctccttcacagctgcctgggtgtgaagatgctctgactgttcccggggatggggagtccctgtggggacagcctgaatactcgaatcagacagactcaggctcacatttgccctttgccttgtcctagagcttcatctcatctccaagacctctcagctataaaacagcccktgtatcactgaagcctcaccaggcagggattctcctggcttgtttactctggaatcttctgtgtcttgaatcaagtaaatgctcaatagccatctgttggaattgtgaactacagagccgtttgtgtgaactacagagctattaaatgagataaaatgtggttagggcctgttacacaatcagtgcttcataaatgatccctgctgtattcatataaagtgcttggaacagtggctggaaaataataataatacaattaatagtaattcaggatatgatgattaattttttaggcttctgatacaagttccgcaataacagtcactcctctgggcatctgttatttgccaggcatcttgtcaggtgcttttcaagacatcttctcattagaccttcgtcgtggccttggggggcaccttttattatccctatttcactgactaggaaactaaggctcatagatgccatgact

SEQ ID NO: 724340 - DNA, 1882 bp, Homo sapiens
cacacgcactgcacacagagggacacccatgtgtggtgcccgcttggcacacacatggcctcacccctttcctgctggtgtttccacttagcagaagtggccaggaggtggcaaactgccgacccgccttggtgcccccatctggagccgccagggctgaggccagggcatgactcagggttcctggttgcagaagtcaaggggcagccttggctcaggtttaaggctgatttcagtgagcggctgcttgctttatgttgttcttttgagtggtggggaggcaaagcccagagaagcagggaggtggagagagccacactggctccgttttccattgttgggcctcaatttcctcatctgcaagctgagcagggcaatcgtgtgccactaaattctaccacgacctgaggatgaggcagtggaatgacctgtgattttgaggtaagccctgcagtagattcaaggcaggagaaatcagcctgacaagaggcagtcaaggaaggcttcttggaggaggagcacttgtgccagactgcatagcccattcctgctgaaacagaacccagaactgagctgcccttcatggcatgtgcttgggaaagctgtggcaggaccttgggccacttttgtgctgctgcctgtgatgtgcaccctgtgtgcagttccacacacgggaccctgcaaggttgataggattatccccattttacagatggcaaagctgaggcttaggttttatggcccatgtcaaagagctgggaagttaaagcctaggtaggaatgccagatctgctgcccgatttgcaggagcccgcacggtgtccacatctcctgcagttgccttctcctccttcctcacacccagccccatctcattcaatccttagtgctctgtaagtgacaaactgactcctttcgaatgacagtacctggagcccattatgggcaaaaattagggtacaggtcccttaggaacgagttggagcctccagtgtgtgtcaagttcagcatgcatggttcattaacatgcccttggcgtctctctgtcccatggtgatcccccttgcatgggcaaggggtgacagtaaccccatctctctgtttgcagatgatggcagttggggctgtctcagcctcttggacacttatgtcctccagtggggtcaagggagggagcatcgaagatgagggtaactgtcggctcctgctcttgtgttttacatggatgggtctccaatctccttcacagctgcctgggtgtgaagatgctctgactgttcccggggatggggagtccctgtggggacagcctgaatactcgaatcagacagactcaggctcacatttgccctttgccttgtcctagagcttcatctcatctccaagacctctcagctataaaacagcccttgtatcactgaagcctcaccaggcagggattctcctggcttgtttactctggaatcttctgtgtcttgaatcaagtaaatgctcaatagccatctgttggaattgtgaactacagagccgtttgtgtgaactacagagctattaaatgagataaaatgtggttagggcctgttacacaatcagtgcttcataaatgatccctgctgtattcatataaagtgcttggaacagtggctggaaaataataataatacaattaatagtaattcaggatatgatgattaattttttaggcttctgatacaagttccgcaataacagtcactcctctgggcatctgttatttgccaggcatcttgtcaggtgctttkcaagacatcttctcattagaccttcgtcgtggccttggggggcaccttttattatccctatttcactgactaggaaactaaggctcatagatgccatgact

SEQ ID NO: 724341 - DNA, 668 bp, Homo sapiens
cacggcccaggatgtctcagagacccagaggctgagggggttgccagactgcccccagatgtctccgtgacaccatccggccccaggctaagaggagccagacccttgaaagggacccattgctctgcaaggttgctgggctctcatggtgcggggggcagtttgccacgagagctgaattttgtggtccaagcaggaattctaaggctgagtccagtttgaagctaccacgagactgggggctagccctctgcccttcctgagccttagtttccactgcgtgcaatggggacagccaggccaggttggcctctcgagggtgtcttggggactgaacacatttaaaatggaaaggaatcttaaagatatctttagttctcaatttgctgatggggaaactaaggttcgtatcacactgagagtcagtggcaaaattgagcttggaaaccggctcctacaaatcttggctggaaatgtctcatatttaacttaaccagcttcttcatcggcagcatgtagcggaacacaggaatgaaaagattgttctgtcttyttgctagcaggcctgttctgacatttcctttttgccctaagacatttttctctggggttactgatgaacaaaatggaattttttctgagacgcatccagttggtccaaataccag

SEQ ID NO: 724342 - DNA, 1529 bp, Homo sapiens
tacagtatcagttctttaacatttattaggattttgtttataaatgagtatgtgatcaaattgtgtagtgtcctaagggtttgaaaagaaggtattttattctatgattttttgttctatatatgtccattaaataaatcctgaggccagctgtggtggctcatacctgtaattccagcactttgaaaggctgaggtggaaggattacctgagcctaggagtttgagaccagcctaggcaacatagtgagaccccatctttttttwgagaaaaataacttcaaaaaaataagtaaagaaatatataagtcttgaagccaagcatggtgtctcatgtctatagtcttagcactttggaaggccaaggcaagaggatcacttgaactcaggggtataagaccagcctggcaatatagtgagatcccatctctatttaattaaaaataaaaagtcttgatagttttgtttttcaagtcttaatttttgcttaataattgtttgctcaatctatgatatattaaggaacttattttaacatcttcccttctaatgaaggatttgccaggttttttgttattacatatactttgctatatttattttgagactatattatgaaataaaaatacaaggttacatttgttatatacttcaatgaattaaatatttattttttaaaaaaaaaattgtctttagctaaaataatgcatctccccttaattctatattaccagctattaagtacataaccattaatttgggcttctaatacaggacattttcttattatttttctgtatctttttatacttttacttttaacctatctgagttttttatcttgtaaaaagcaaaaactggaaattgtttttgctcacatgagtctgtagattgtgttaggttaacctcagttacttaaaacaacattttatatgttgcacttactaccctggacagtctgtaacctgcaagctctgcttcactctgtccttactccagaacctaggctaacgaggggacactgtcttcttgaacactattttttttctttttttttttgcctgtggcagaggaaaaaaaaacataacaaagtacagactcttaatgcttctgcagtgaagtggcatatgctatttctgcccacatttcaggactcaaagcaagctatatgttgaaactaactttgaatcttgatgtgtgcaatcccactatttgtcaagaataagacagaatccagactatgagatagattaattagctataaatgtaccttttatttccaccatattttattacattattttatttatgttattcctagttaagtgataaggaaaggaagttagagatgctatttctttgttattgtagaattcttgggctagaatagtctgttttgccatttactgattgttttctgcagagacaccttactgagtaacatagcacctaactctttggtagcataagctaaaatgtgtttttccacacttagctggaaatatccaaagccactggactacaacataa

SEQ ID NO: 724343 - DNA, 676 bp, Homo sapiens
ggttagatttggattacagtcttcatttctgtatttcaatgactgcaattgtaactaaatgaaaaattgaacattttaggatttgaaatgagataaaagattacaggaatgtaaaaaatacatctgtattgatatttcatgtatctttacttttttttaaattaaattcaaattttctttttttctttcttgatttttacatgaattaaaacaaaatacaaataattatataaaaggaataaagggaagaaaaaagtagaatgttaaatgaaattcaattaaatttggcataaaatgtgtttagaaaatttgttaaacgcaatatctatttctttatttccatgattgaaataaaaattgtctataataatgattttctgaatatgtattccttatctatgttttagccagtgaactccactgggaaaaaaaaaagaaggtaaactgtcatgcaatggtatcacatctaagcactagcctctttttactatatttgcagaagtcaaatttactaawaccagtctaatgttttgtagttccttcctgtagatggcagcagagcaggcataaaaaatcaatagaacaaattgtcagaccagtaatgtggcttctgttgttctgcttctcattaaaggcaatggcaatagaagaaaagctattactgcaaccagaattc

SEQ ID NO: 724344 - DNA, 632 bp, Homo sapiens
tataacatacataactagggaggctttaagttttattaatatgacattaaatcatttctgtttgttatagataacagtataatatggtcaaattcagttgttaaattgattgtctgcaaatacctgcttatgcacaatrtttaaatatttaccagaaatctaagcttcctaaaaatcaaatttactacacattttaaaaacaagagtagtacattaatcatagtcatgtcattcaaatggctaattgtccacattgccaaatattcaccagtattaaaactgggaaaattcctatgctataggttattaaaatctatcatttcacaattcttatctggaaaattttcagagatacagacctttttatcacaaagttaatcttcattttaatatttatgttattttagctgaaatcaaggaggaaattatttcattagacaaaagcatgtagaaaaagaatatatagtctgaaaatgaaactaatttatgctaaaacagtatttctataaaatgtcattgcagcctttaaaaattatgtttttcaaagaattgtcatctgacaaagtgcacattttctttcttgtgaaatgaaatgaattatcaatttaaaatagtgtttccataggcaaaac

SEQ ID NO: 724345 - DNA, 647 bp, Homo sapiens
tgagaaataactcacaacatgagtaagagtgctttatttcagaatagaatttttctcattgcataccaattttgtttttgaatcagtttaatctggaaatttatatggtatgaaatacatcttccaaataataactggtgtgaatatttgatacaattaaatgtataaatataaactgtttcaccttaacactcttcatataatttctggtgaatacattaggttgaaccacatgaattgacaatatctactgaaatttttacctacaaatgataatttcacatggttcaacttaattaaaaatgttttctwaaaaaattctaaatctacatgtatccgtacagtaatgttagtgtttcatttttaattgttaccaatattaggatttttaagttggtacaaattttacaagcttttaaaaatatatgcatgcactgggcacaatggctcactcctgtaatactagcactttgggaagccaaggtgagcagtttgcttcagcctaggagtttgaaactagcctgggcaacatggcaaaactctgtctctacaaaaaatacaaaaatttgcagggcatggtggcgcatgtctgtagtccccgctactcaagaggctgaaatgggaggatcacctgagcctgggaagat

SEQ ID NO: 724346 - DNA, 1440 bp, Homo sapiens
tatatatatcgtatataatttatatattatattgaatatattttttcagataaaatacatgaatttgtagaggggacttcagtcattttattttccttttctcaacttttattttaggttcaggaggtatatgtgtagttttgttagatggataagttgcatgtcattggggtttagtatacaaatgattttgtcacccaggtaatgagcatagtacccaataggtagtttttcaaccctcaccctcctcccaccttctcctctcaagtcagcctggatatctattgttaccatctttgtgtccatgtattcttgttgtttagcactcacttataactgagaacacgtgctatttggttttctgttctgcgttaatttgcagtcttgattcacaggagaaatatctcatgccacaattagtgaaaatatctccatgaagagtggtcattttgatgcactcatatcatactattagtctatgtttgtagttcattctgcatatgagtagaaacattaaaatgcagaatcaaagaacctcctgcaaggtgaattatttcacttccatgctcaaaagcctgaaggtcccttaatctgtgttcatactgacaaagcagcaaaaagaatatgagaccacattctttaccaataaaaattatttaaagctatgtacaccattagagaagagtaattagtcacggtcagtttggttaaagaatactatggttagttgataagtatgaaacataaatgttttgcagtacaaatgcattttatgctctctactacagtaatctataaaagatgattttaatgacatcagaattatttctaaatgtaaatgtttttctacttggccaccacaatcatcataaatgcaaataattatctttttcttcttattacactgatattttgggtaaggaggcattttagcttatttattatttaaaagataaaattggaaaccacattttttatgttttccagtgcttttactctcaaaagtagtcttcctttttaaaaaatgcaacatatttttatagtcatacatacctttaktatatataaggcaaaaaagcattcaatatatttaatactttaagtaaatagttatatatttataatggtaagttgttaaaattcactagaaatgaaaggaaaattaaaagaactgatgatgatgacaatgatgaagacagccttgaattttgtagatatttgatatccatcaaaaaaggagccaaaggaacaggtgaaaaactagtctggacttgaagcatcttccataaggcttgctattcttttactgggctatgaggcatcagtcgtgaattacagtacagtaagcttttaatgctgcagttctttgtccccaggtatctgttacaaaacattatgcttttttaaaaaacaaaaaaagcattaaataggcagtcagag

SEQ ID NO: 724347 - DNA, 1440 bp, Homo sapiens
tatatatatcgtatataatttatatattatattgaatatattttttcagataaaatacatgaatttgtagaggggacttcagtcattttattttccttttctcaacttttattttaggttcaggaggtatatgtgtagttttgttagatggataagttgcatgtcattggggtttagtatacaaatgattttgtcacccaggtaatgagcatagtacccaataggtagtttttcaaccctcaccctcctcccaccttctcctctcaagtcagcctggatatctattgttaccatctttgtgtccatgtattcttgttgtttagcactcacttataactgagaacacgtgctatttggttttctgttctgcgttaatttgcagtcttgattcacaggagaaatatctcatgccacaattagtgaaaatatctccatgaagagtggtcattttgatgcactcatatcatactattagtctatgtttgtagttcattctgcatatgagtagaaacattaaaatgcagaatcaaagaacctcctgcaaggtgaattatttcacttccatgctcaaaagcctgaaggtcccttaatctgtgttcatactgacaaagcagcaaaaagaatatgagaccacattctttaccaataaaaattatttaaagctatgtacaccattagagaagagtaattagtcacggtcagtttggttaaagaatactatggttagttgataagtatgaaacataaatgttttgcagtacaaatgcattttatgctctctactacagtaatctataaaagatgattttaatgacatcagaattatttctaaatgtaaatgtttttctacttggccaccacaatcatcataaatgcaaataattatctttttcttcttattacactgatattttgggtaaggaggcattttagcttatttattatttaaaagataaaattggaaaccacattttttatgttttccagtgcttttactctcaaaagtagtcttcctttttaaaaaatgcaacatatttttatagtcatacatacctttattatatataaggcaaaaaagcrttcaatatatttaatactttaagtaaatagttatatatttataatggtaagttgttaaaattcactagaaatgaaaggaaaattaaaagaactgatgatgatgacaatgatgaagacagccttgaattttgtagatatttgatatccatcaaaaaaggagccaaaggaacaggtgaaaaactagtctggacttgaagcatcttccataaggcttgctattcttttactgggctatgaggcatcagtcgtgaattacagtacagtaagcttttaatgctgcagttctttgtccccaggtatctgttacaaaacattatgcttttttaaaaaacaaaaaaagcattaaataggcagtcagag

SEQ ID NO: 724348 - DNA, 1440 bp, Homo sapiens
tatatatatcgtatataatttatatattatattgaatatattttttcagataaaatacatgaatttgtagaggggacttcagtcattttattttccttttctcaacttttattttaggttcaggaggtatatgtgtagttttgttagatggataagttgcatgtcattggggtttagtatacaaatgattttgtcacccaggtaatgagcatagtacccaataggtagtttttcaaccctcaccctcctcccaccttctcctctcaagtcagcctggatatctattgttaccatctttgtgtccatgtattcttgttgtttagcactcacttataactgagaacacgtgctatttggttttctgttctgcgttaatttgcagtcttgattcacaggagaaatatctcatgccacaattagtgaaaatatctccatgaagagtggtcattttgatgcactcatatcatactattagtctatgtttgtagttcattctgcatatgagtagaaacattaaaatgcagaatcaaagaacctcctgcaaggtgaattatttcacttccatgctcaaaagcctgaaggtcccttaatctgtgttcatactgacaaagcagcaaaaagaatatgagaccacattctttaccaataaaaattatttaaagctatgtacaccattagagaagagtaattagtcacggtcagtttggttaaagaatactatggttagttgataagtatgaaacataaatgttttgcagtacaaatgcattttatgctctctactacagtaatctataaaagatgattttaatgacatcagaattatttctaaatgtaaatgtttttctacttggccaccacaatcatcataaatgcaaataattatctttttcttcttattacactgatattttgggtaaggaggcattttagcttatttattatttaaaagataaaattggaaaccacattttttatgttttccagtgcttttactctcaaaagtagtcttcctttttaaaaaatgcaacatatttttatagtcatacatacctttattatatataaggcaaaaaagcattcaatatatttaatactttaagtaaatagttatatatttataatggtaagttgttaaaattcactagaaatgaaaggaaaattaaaagaactgatgatgatgacaatgatgaagacagccttgaattttgtagatatttgatatccatcaaaaaaggagccaaaggracaggtgaaaaactagtctggacttgaagcatcttccataaggcttgctattcttttactgggctatgaggcatcagtcgtgaattacagtacagtaagcttttaatgctgcagttctttgtccccaggtatctgttacaaaacattatgcttttttaaaaaacaaaaaaagcattaaataggcagtcagag

SEQ ID NO: 724349 - DNA, 755 bp, Homo sapiens
ctcattttaatgcttcyttcttgtttgtggagttgggtatttggaagagtggagaatatataaccttcttttttagtgtattttgtgaaacagtttttctctcctattttgttttaacatttaaaataagagacaaagtcatcagagtcaaattatgtatttacatttttattagaaaaataattggttagatgaactggcttattaatgtaacataatttattttggaaaattttttaaaagctaaaatctgtatttaatatatggattgaagaaactggaaatatatgaagatatactttgtattatacttttcatccttagaaatgcactgttatattgtttagggagacttcattcagttcctaagtaatttgtttttaattctggaatccttagaaataccatttcagtggtataactaatgggcaaactggaactaacggaaaggaattttatttctttattcctcccaccaaccccaattccttgcacagatttacatggcatggctcatgtaacacaatagaaagattcctgaaaattgtatccaacttttctatccctattttaaatgcactgaagaatagactacttaaattaatctaaaggtaatttttcttgtataactgtggcttgaaaacatttagtttatatatcaactgtgtttaatcattccaagttgtttttattcagaataaatccctaaagcaagctttgctgagtgtcaaccctttgctctctcttacgactga

SEQ ID NO: 724350 - DNA, 755 bp, Homo sapiens
ctcattttaatgcttccttcttgtttgtggagttgggtatttggaagagtggagaatatataaccttcttttttagtgtattttgtgaawcagtttttctctcctattttgttttaacatttaaaataagagacaaagtcatcagagtcaaattatgtatttacatttttattagaaaaataattggttagatgaactggcttattaatgtaacataatttattttggaaaattttttaaaagctaaaatctgtatttaatatatggattgaagaaactggaaatatatgaagatatactttgtattatacttttcatccttagaaatgcactgttatattgtttagggagacttcattcagttcctaagtaatttgtttttaattctggaatccttagaaataccatttcagtggtataactaatgggcaaactggaactaacggaaaggaattttatttctttattcctcccaccaaccccaattccttgcacagatttacatggcatggctcatgtaacacaatagaaagattcctgaaaattgtatccaacttttctatccctattttaaatgcactgaagaatagactacttaaattaatctaaaggtaatttttcttgtataactgtggcttgaaaacatttagtttatatatcaactgtgtttaatcattccaagttgtttttattcagaataaatccctaaagcaagctttgctgagtgtcaaccctttgctctctcttacgactga

SEQ ID NO: 724351 - DNA, 755 bp, Homo sapiens
ctcattttaatgcttccttcttgtttgtggagttgggtatttggaagagtggagaatatataaccttcttttttagtgtattttgtgaaacagtttttctctcctattttgttttaacatttaaaataagagacaaagtcatcagagtcaaattatgtatttacatttttattagaaaaataattggttagatgaactggcttattaatgtaacataatttattttggaaaattttttaaaagctaaaatctgtatttaatatatgrattgaagaaactggaaatatatgaagatatactttgtattatacttttcatccttagaaatgcactgttatattgtttagggagacttcattcagttcctaagtaatttgtttttaattctggaatccttagaaataccatttcagtggtataactaatgggcaaactggaactaacggaaaggaattttatttctttattcctcccaccaaccccaattccttgcacagatttacatggcatggctcatgtaacacaatagaaagattcctgaaaattgtatccaacttttctatccctattttaaatgcactgaagaatagactacttaaattaatctaaaggtaatttttcttgtataactgtggcttgaaaacatttagtttatatatcaactgtgtttaatcattccaagttgtttttattcagaataaatccctaaagcaagctttgctgagtgtcaaccctttgctctctcttacgactga

SEQ ID NO: 724352 - DNA, 2047 bp, Homo sapiens
tggctttggtgtgccatgccacttagttcagcccctactttatgtgacctttcagttcacgtacccagtcatagtttaagtgcatgggtatccgcggcccagatttctagggtgagcagtctgttggatcagttttatcagctggtcactcctgttccagtcagctgaggtcagcatagagagctgaggctcttggggcctgttgccaggggctgtggatgaattgacttctctagccctgacacaaggaygcagtgattagaatgctcagtacaatgtattttgccgattttttgatttgttgtattaatctttctcttatgggtacccaaaagccctttccatttgaaggatagtattgccttttgtataatgggtgtttttctatccatttatcattttaattttgcttagtggtgttgccatgtaatcaaggctcaattaaatcatgatttctgctagtttctaggttagaaataccttctttatgaggaaattatacattcaaatatattttcttcaagttctctacattcttatctttcatgtgctctttgaattggattacattttagagggattagtgagagaaacatctttacaatgtttattgcaggagcatagtgtttatttaactgtaattcacttctctcagcaaaattttgtactttccttattttagttttcttaagtttattcctagctacttcataaattttattcttggtagaatttttttcagttatgttttctaactggtccctcatgatttattaaagctattgtttttatatttttgtaactgactatcttactagttgtaattttttgcttaatatttttgggctttacatgtcaacagttatatgcaagtaattattttatttctacctttttctattttttctttcatttctttttctcaatttattgtgctagatcttttaaaatgaggataataattgtaatggcaggtagcacatgtcttacactgttgtattttttagtgataattattctgactagataactaaatgctgtctagataactggaatgctctggtaacttacacagcaaatacaggaatgaaactagtggaaaactcattttaaccccaaagattttctccactggcttgtcttggagccttaaaatttcactcatttatcagtctttctggtcaaagcactgcctccacaaagttcctgttaaaatgtattatacctgctaagatggcatgtcacatatttagttatctgattattttctaataaatggtactggcctattgggaaagtgcaagatggacctcaagcaaagggaaaagtgttttgatggtgctgtcagtgtgagccttcataatgaagcagctgctcacctccaccttcatcttctgcctgctctgtgttcttcacactgtctcacctccgtcccacaagcttcaacctgagtgaatgtcccttgctttttaaaatatgtcttgatatcttgcctggggctttcctgctcctggtcctcagtgtcagtttcgctgtcactttctccaggaaggctgatgtccttagactaggctatgtgttctattgcattgctcctttaaagtaacattttaaatctttaaaaataacattcatctttaacatagttgctttttaaaaatcatctctcatggctgctcaattataacctcaaactgccatgccagagagcatatctgccttgtttactgatatggtttggctgtgtccccacccaaatctcatctttaattgtagttcccataatccccgtgtgtcatgggaggcacctggtgggaggtaattgaatcatgggagctatgctgttctagtgataatgaataggtctcaccaggtctgatggttttataaagggcagttcccctgcacctgctcttttgcctgccaccatgtaagacatgcctttgctcctcctctgccttccaccatgacgatgaggcctctccagccatgtggaagtgtgagcccactaaacggctttcctttataaattgcccagtcttgggtg

SEQ ID NO: 724353 - DNA, 644 bp, Homo sapiens
cctggctgggctattgtgtaattgagaaataaacttttttaaaaaatgtgtgaagccattaaacttttgtggtttgttccaggaactttcattaccctaactagggggcaatgttctgaggctggagggatggcaaactttttctttagagggcaagatgktaaatattttttgtctttgtgggctgtaaggtccctttggcaattaatcaactctggtgttgcagtgggaaaccagtcatagaaaatacatgaaggaatgggtatagctgtgttttaataaaatttcgtgtatacagctaggcagctggaccacatgacttagtttgtcaaccgctgtcctaagggactgggcacaacctcaccaccttgttttagaggctgtatatgaaggaattagtcagatggacttcacttactattttatctccctagtctcagtttcctcgtctgcctcatctgtaagttggggctaagaatgtctactctcaggctgttgtgaagttcaactatcactctcacatggaggaaaaagcaagtcattctaggtctctgtctgatcgatacaggactccacattctgtccatgagggcagtgtgcttgtttgcctcattcacttctgaattcacatagtaaatgctcca

SEQ ID NO: 724354 - DNA, 651 bp, Homo sapiens
tctgcatgtgcttgtttctctatagcagaaatggggcataataataggtgattatgmgatgctctgcagaaccccacttgggccttgagtaatgcccattcagataagaaaattgagacccaaagaggttaagtaatgctagcacaaagcactctgagatgagatacaaaaccagcctcttctattaattcccaaaacctactccactgggaaggttggtaaaagtgtggggacattatggtcatcaaaactgaagctggggattactattggcatttagtgagccagggccaagaaggtcaaaactcacgttatgcacaaacatgcccacatatcaaagaagagagattcaagggagaagaagtgtatgtgttgctcaaatgccaacaatataccagatgaagcaataggggcatcatatataattaacttaatatttaaaacaacatgtgaactctttcattaaaaatgtcaagagctccctgctgaaatatttttctgagttttaatcagcgtccatgatcagactctttccaatggactaggcatgtctgtctctcaaattgatttcacaggacattttaattttttaaaaagtatttaaggggaatcgtctactttcaccatcatttcataaaacaacaaatgctg

SEQ ID NO: 724355 - DNA, 651 bp, Homo sapiens
tctgcatgtgcttgtttctctatagcagaaatggggcataataataggtgattatgcgatgctctgcagaaccccacttgggccttgagtaatgcccattcagataagaaaattgagacccaaagaggttaagtaatgctagcacaaagcactctgagatgagatacaaaaccagcctcttctattaattcccaaaacctactccactgggaaggttggtaaaagtgtggggacattwtggtcatcaaaactgaagctggggattactattggcatttagtgagccagggccaagaaggtcaaaactcacgttatgcacaaacatgcccacatatcaaagaagagagattcaagggagaagaagtgtatgtgttgctcaaatgccaacaatataccagatgaagcaataggggcatcatatataattaacttaatatttaaaacaacatgtgaactctttcattaaaaatgtcaagagctccctgctgaaatatttttctgagttttaatcagcgtccatgatcagactctttccaatggactaggcatgtctgtctctcaaattgatttcacaggacattttaattttttaaaaagtatttaaggggaatcgtctactttcaccatcatttcataaaacaacaaatgctg

SEQ ID NO: 724356 - DNA, 613 bp, Homo sapiens
taaaattagtttaaagatgtaactctcccataggtttccatattggaaaactctggtcaattttcctgacatcaagttaaatacttaaaattacccatgatgaataatcaggataytcaggaagtccattttctttatagaataaataatgtggcctctgaggagcctaaccgaagacttagttcatgtctctaagtcacaatatttaagtgttattagctgttcatctttttctctaaataaatgtctacttgtaatttatgtgcagatatttagaaaaatattctgcttcattttttttttgcctttaacagttcagattataaagactatatacttgccgagaatagcctcccagcaaattgcgatgaacaccgtgcagtggagaattccaacatgggtataatcaaaaataacattctcagtctagaaaaatatattccactatttcttcaaagagtgtatccttaggattttgtttcctaccacggaaactatttttgtacccaggagctaaaactcagatagtaacatcttttctatcattgcccaggggattttctcagttaattcccacaaatgtcaacaagaaatgttttgtgtaactctccat

SEQ ID NO: 724357 - DNA, 646 bp, Homo sapiens
tacaataaccataaatctgtgtaaaagagaaaataaatagaaattggccactgtttctaaaacaaaaacaaataaaacaatactttgggtcaactttacctcagttatctaaacacccttaatagcatcctatgtctttattgtcagttctcatttttaattccaacaaagctggctgtcaagccatattatgcagtgacttaatatgagtggacatttgaaaacatcttacaatgtagaatatatttttcctactcactattacgtatcatccttaccaatattgtataaatatccttaacttgttctggagtagcccaaggaacagaaatcgtaaatgctcatagaggtaaaccatcagtggctcatcgaggtaaatacagacatgagtttaaaaagccatggtcaaatgactatgcaattcctaatgggtattgttcttcagtatatgaaaataggtagtaattttgtgatstgaaatgacaataaaacaatttcagaaagaaagaaaaggaaggaaacttactccatcccactagattcttattaaccaaagctctggaaaatctcaaagaaagataaaaatgtgttgtgtttctctatttgtgtttggtggagggcagtggtagtggggtcagaagaggtg

SEQ ID NO: 724358 - DNA, 669 bp, Homo sapiens
caagatttctttttcattattttttacttaaaaaagccaaattaaatatatttcagaattagtttgatttacaaatacatacacagtcacagagccgaagtgtattttttttcttttttgagacaaacactcactctgtcgcccaggctggagtacagtggcatgatctcgactcactgcaacctccgcctcccgggttcaagagatttttctgcctcagcctcccgagtagctgggattacaggtgtgcgccaccacacccggctcatttttatatttttagtagagatgaggtttcaacatrttggccagagtggtctcaaactcttgacctcaggtgatccgtctgccttggcctcccaaatgctgggattagaggtatgagccactgtgcctggccacgtattttattttattttttctaaatgaatagaccttttaaggatacagagcttcacagttaaatttgatgattaaaaaaatttctgatatgtagaaataaagggggtgacccatcactactctgatgtctggcatacgattatgaacaaaagtgacaaatatgtatcttaagggactgtgggtcttcacagaatggaatccttcttcctaaggccaagagaagagtatttccatcagtaattgccatagtaccagcaattttatgct

SEQ ID NO: 724359 - DNA, 669 bp, Homo sapiens
caagatttctttttcattattttttacttaaaaaagccaaattaaatatatttcagaattagtttgatttacaaatacatacacagtcacagagccgaagtgtattttttttcttttttgagacaaacactcactctgtcgcccaggctggagtacagtggcatgatctcgactcactgcaacctccgcctcccgggttcaagagatttttctgcctcagcctcccgagtagctgggattacaggtgtgcgccaccacacccggctcatttttatatttttagtagagatgaggtttcaacatattggccagagtggtctcaaactcttgacctcaggtgatccgtctgccttggcctcccaaatgctgggattagaggtatgagccactgtgcctggccacrtattttattttattttttctaaatgaatagaccttttaaggatacagagcttcacagttaaatttgatgattaaaaaaatttctgatatgtagaaataaagggggtgacccatcactactctgatgtctggcatacgattatgaacaaaagtgacaaatatgtatcttaagggactgtgggtcttcacagaatggaatccttcttcctaaggccaagagaagagtatttccatcagtaattgccatagtaccagcaattttatgct

SEQ ID NO: 724360 - DNA, 690 bp, Homo sapiens
  misc_feature 550, 551, 552, 553, 554, 555, 556, 557, 558, 559, 560, 561,562, 563, 564, 565, 566, 567, 568, 569, 570, 571, 572, 573,574, 575, 576, 577, 578, 579, 580, 581, 582, 583, 584, 585,586, 587, 588, 589, 590, 591, 592, 593, 594, 595, 596: n = A,T,C or G
  misc_feature 597, 598, 599, 600, 601, 602, 603, 604, 605, 606, 607, 608,609, 610, 611, 612, 613, 614, 615, 616, 617, 618, 619, 620,621, 622, 623, 624, 625, 626, 627, 628, 629, 630, 631, 632,633, 634, 635, 636, 637, 638, 639, 640, 641, 642, 643: n = A,T,C or G
  misc_feature 644, 645, 646, 647, 648, 649: n = A,T,C or G
gaataatagaaataatagaaactaattatttaaagtcgtataaaatcagaatctggaaaagaaaaatttgttgaacacaaaacaagagggctctttgggggatattgggaacatatgtgtttgtttgtttttatttttatttatttagttattttttattttgagacagagtcttgctctgtcacccaggctggagtgcagtggtgcaatcttggctcactgcaacctccgcctcctgggttaaagagattctcctgcctcagcctcccaagtagctaggattacaggcacttgccaccatgcccagctcatttttgtatttttagtagagacagggtttcatcatgttggccaggctagtctcraactcctgacctcaggtgacccacctgtcttggcctcccaaagtgctgggatttacaagtgtgagccactgcacccagcctgtttgttttaattttttgagagacagggatctccctattcttgcccaagttggtcttgacctcctggactcaagtgatcctcctgcctcggccctttaagtgcnnnnnnnnnnnnnnnnnnnnnnnnnnnnnnnnnnnnnnnnnnnnnnnnnnnnnnnnnnnnnnnnnnnnnnnnnnnnnnnnnnnnnnnnnnnnnnnnnnnnaaaagtatcctgcttgtaaaataatgtaaaacagtttcttc

SEQ ID NO: 724361 - DNA, 345 bp, Homo sapiens
gtgtgtatactttttaaaaaaaattagtgactaatcttttttttttactgtctccatagttttgccttttccagaatgtcatatggttggaatcatatggtatatagccttttgagattggctgctgcttttttcttgctttctctctctctctttctttcttttcttttyttttcttttttttttttttgagatggactctcgctctgtcacccaggctgaagtgcaatggcatgatcttggctcactgcaacctctgcctcttgggttcaagcgattctcctgcctcagactctgtagtagctgggattacaggtgcctgttaccatgcccaggtaatttttt

SEQ ID NO: 724362 - DNA, 667 bp, Homo sapiens
taacaaaactacattctaaatagtttactttccctttttccttatattattacttttatattcattcttcccactcattttttcactagactctattaaatttaagatttaaatatggctaagcataagacaaaagagatgagtgtcaacaatatagctgaattttatcagtgtccaaggcacttaaagctgttctccaaaagataagttattcaacccaaggcaaacagagaaagttggatttgaatcttaggttctttatatttttaactgtcaggtccacaggaacatccaaggctcaagttttgaatgtctacatgtcatgaagttaactggaaaaaaaaaaaaaaaaagaagttaactggcactagtggaatgtcgattactgaagatgaacccctagacacattcagcaagacattcaacttgcagaaggcagggaatttggagtggtacacaatcagataacaaggtttcaagctctagtcgaagacaagatgatattatacctaaataacaatttctaaggaacttgaataacaatctctaaggactcttgtcactatatgaagaacttaagttaatggctccataatcttaattaaaaggacagccayttaatcaattttctgcagtgaattattagactaacttcctagcatctgga

SEQ ID NO: 724363 - DNA, 643 bp, Homo sapiens
taaattcttaataattactccatattcactacagagaacactgctagccattaaaacaaaaaaaatgggccgggcgcggtggctcacgcctgtaatctcagtactttgggaggccgaaaagagcagatgacgaggtcaggagtttgagaccaggctgaccaacatggtgaaaccccgtctctactagaaatacaaartattagctgggcgtggtggtacgcacctgtaatcccactactcaggaggcagaggcaagagaatctcttgaactccagaggtggaggttgcagtgagctgaaattgcgccactgcactccaacctgggcaacagagggagactgtcaaaaaagaaaaaaaaaaaggtggcgggggaggctgggctccgggcctcacatctgtaatcccaacattttgggaagtcaaggtgggaggatcacttgagcccaggagctccagaccagtatgggtaaccccatctctacaaaaaataaaaataaataaataaataaaaaaacgtagccgggtgtgattgtacatgcctgtggtcccagctactcaggaggctgaggtgggagatcactttagcccaggaggtcatggctacagtaagccatgatcatgctattgcactcaagtctgggca

SEQ ID NO: 724364 - DNA, 597 bp, Homo sapiens
aaaaaaggaacatcctctagtcttgaactcccgtggagggaaaaaaaccccaaaaaactcaaggagcaaacactgcattcacaccatcattttgacattctccaacacccccacaaaaaaacccaaaacaaaataccttactaattctggaggagctgaaaaagcgtaacatacaactgacaaacattatgactatttttaaatgaaagtgcttaaagataattwaaaaaaactaacagtataaaacatgcaaattaactagtagcatatttccaaaaatgaagatagcagttaaagtgataaaactgctggaaattgaaagaacatttttccacttaggtttgagggaccagagtcagagtgacgttgagggtatttctacagtcagctcctggttagtttctactaaatgacggtcaggagtaaatacaaactgtttcaactggtgctttttaaaatttgatttgacaggaaaaaatgtcgtaagagcaccatgtctaagcatatcacggcatgagaccctataagttacatccacagtaacatataaccacctttcctcatgcttgctatgacaggctttttaaacccagatta

SEQ ID NO: 724365 - DNA, 597 bp, Homo sapiens
aaaaaaggaacatcctctagtcttgaactcccgtggagggaaaaaaaccccaaaaaactcaaggagcaaacactgcattcacaccatcattttgacattctccaacacccccacaaaaaaacccaaaacaaaataccttactaattctggaggagctgaaaaagcgtaacatacaactgacaaacattatgactatttttaaatgaaagtgcttaaagataattaaaaaaaactaacagtataaaacatgcaaattaactagtagsatatttccaaaaatgaagatagcagttaaagtgataaaactgctggaaattgaaagaacatttttccacttaggtttgagggaccagagtcagagtgacgttgagggtatttctacagtcagctcctggttagtttctactaaatgacggtcaggagtaaatacaaactgtttcaactggtgctttttaaaatttgatttgacaggaaaaaatgtcgtaagagcaccatgtctaagcatatcacggcatgagaccctataagttacatccacagtaacatataaccacctttcctcatgcttgctatgacaggctttttaaacccagatta

SEQ ID NO: 724366 - DNA, 608 bp, Homo sapiens
tttcttttattattttactgttataaatgttgtttatgcaacagaaataggtacaactctcactatttatttgcccactaaattctcactaaatttatttcctgtgacttgggggtgggataaagggaagctccctccttttggtaaatattgctctgcagcatctcccccatattatgacagatgaggcggtttggtgggaagcccaggtgctgctcaggctggtgaatgttggatgccaatgcctcctaaagtggcaagatcagagacactcgactgagatctgccttgtggactragaccatctcaaacagacattcttgagacagtccaacccaaaagcgtcgtcagatacggcacagccttcgaaagcccaggcagcatcctcatcttcgatgatttcacacaaaatcttaaggcaagtgggggtgggggttaggggagaaggatagtttaaacatggtttttgtttgtttctacttttaagacggagtctcactctgttctgcagcctcaacctcccacgctcaggtgatcctccggccctccccgctgacccacctacagatgcctgctaccacgcccggctcatttttgtattttttttt

SEQ ID NO: 724367 - DNA, 608 bp, Homo sapiens
tttcttttattattttactgttataaatgttgtttatgcaacagaaataggtacaactctcactatttatttgcccactaaattctcactaaatttatttcctgtgacttgggggtgggataaagggaagctccctccttttggtaaatattgctctgcagcatctcccccatattatgacagatgaggcggtttggtgggaagcccaggtgctgctcaggctggtgaatgttggatgccaatgcctcctaaagtggcaagatcagagacactcgactgagatctgccttgtggactgagaccatctcaaacagacattcttsagacagtccaacccaaaagcgtcgtcagatacggcacagccttcgaaagcccaggcagcatcctcatcttcgatgatttcacacaaaatcttaaggcaagtgggggtgggggttaggggagaaggatagtttaaacatggtttttgtttgtttctacttttaagacggagtctcactctgttctgcagcctcaacctcccacgctcaggtgatcctccggccctccccgctgacccacctacagatgcctgctaccacgcccggctcatttttgtattttttttt

SEQ ID NO: 724368 - DNA, 608 bp, Homo sapiens
tttcttttattattttactgttataaatgttgtttatgcaacagaaataggtacaactctcactatttatttgcccactaaattctcactaaatttatttcctgtgacttgggggtgggataaagggaagctccctccttttggtaaatattgctctgcagcatctcccccatattatgacagatgaggcggtttggtgggaagcccaggtgctgctcaggctggtgaatgttggatgccaatgcctcctaaagtggcaagatcagagacactcgactgagatctgccttgtggactgagaccatctcaaacagacattcttgagacagtmcaacccaaaagcgtcgtcagatacggcacagccttcgaaagcccaggcagcatcctcatcttcgatgatttcacacaaaatcttaaggcaagtgggggtgggggttaggggagaaggatagtttaaacatggtttttgtttgtttctacttttaagacggagtctcactctgttctgcagcctcaacctcccacgctcaggtgatcctccggccctccccgctgacccacctacagatgcctgctaccacgcccggctcatttttgtattttttttt

SEQ ID NO: 724369 - DNA, 646 bp, Homo sapiens
attctggaaaagggtcctttaattgctgatgacttacccagcacagtggaagcctggcaggtggcctgtagacacagatctgccatgagcactagaaggacgattatcacaaaaatctttggaaaagtaggggggaaagcgaggaacaatggctgagatgtgttcacaagactgaattcatgagataagatttatttcttcccttgaaatatacgtaacctctcattggagaaakaatggatattaataaacataaaactcatcctgtgggacttcagattctccctactctggaggcacagttgtagacagataactgtagaacactgtctgggttgtttggctctgccactttctgtgacccctcagtaccttacaacgtgaggaggacactccagtgcacccaaagggacatggagtcatatgcttggcacttaggaaaccttagctattgttattatttcagtcagaaaaatgatgtggttaggggtttagactgcagaaccatactcgagttcaatttccgctctactacttactcgtggtgtgaccttggccaagttacttaccctctgtgtgcctcagtttcctcatgagtacatgaataacaacacgtacctctgatggtgtgcttcacatttggaaa

SEQ ID NO: 724370 - DNA, 646 bp, Homo sapiens
attctggaaaagggtcctttaattgctgatgacttacccagcacagtggaagcctggcaggtggcctgtagacacagatctgccatgagcactagaaggacgattatcacaaaaatctttggaaaagtaggggggaaagcgaggaacaatggctgagatgtgttcacaagactgaattcatgagataagatttatttcttcccttgaaatatacgtaacctctcattggagaaagaatggatattaataaacataaaactcatcctgtgggacttcagwttctccctactctggaggcacagttgtagacagataactgtagaacactgtctgggttgtttggctctgccactttctgtgacccctcagtaccttacaacgtgaggaggacactccagtgcacccaaagggacatggagtcatatgcttggcacttaggaaaccttagctattgttattatttcagtcagaaaaatgatgtggttaggggtttagactgcagaaccatactcgagttcaatttccgctctactacttactcgtggtgtgaccttggccaagttacttaccctctgtgtgcctcagtttcctcatgagtacatgaataacaacacgtacctctgatggtgtgcttcacatttggaaa

SEQ ID NO: 724371 - DNA, 646 bp, Homo sapiens
attctggaaaagggtcctttaattgctgatgacttacccagcacagtggaagcctggcaggtggcctgtagacacagatctgccatgagcactagaaggacgattatcacaaaaatctttggaaaagtaggggggaaagcgaggaacaatggctgagatgtgttcacaagactgaattcatgagataagatttatttcttcccttgaaatatacgtaacctctcattggagaaagaatggatattaataaacataaaactcatcctgtgggacttcagattctccctactctggaggcacagttgtagacagataactgtagaacactgtctgggttgtttggctctgccactttctgtgacccctcagtaccttacaaygtgaggaggacactccagtgcacccaaagggacatggagtcatatgcttggcacttaggaaaccttagctattgttattatttcagtcagaaaaatgatgtggttaggggtttagactgcagaaccatactcgagttcaatttccgctctactacttactcgtggtgtgaccttggccaagttacttaccctctgtgtgcctcagtttcctcatgagtacatgaataacaacacgtacctctgatggtgtgcttcacatttggaaa

SEQ ID NO: 724372 - DNA, 637 bp, Homo sapiens
ttggccctggtgacacagtagtgaatgagagtgacaagtccctgtgccacgatgctcatagtctcaggaaatgtcacagagagtccaggcagctgctaagagcactgcatgtattttatggtatttataataccgcttccctgtgttaggaagataaaatgagaattgggtaaagtatcaagaatgtcctgggactgttagatgcccagcaagtggtagttaatactaccaatagctatagtaataggggtgactgactgttcccattacttttataaagaatcagggccatggccaggcacagtggctcacgcctgtaatcccagcattttgggaggccaaggcaggtggatcacttgaggccaggagtttgagacccgcctggccaacatggtgaaaccccgtctccactaaaaatacaaaaattagctgggcatggtggtgcgcacctgtaatctmagctacttgggagactgagggaggagaattgcttgaacttgggaggtgtaggttgcagtgagctgaggtcaagccactgcactccagcctgggtgacaagagcaaaactccatctcaaaagaaaagaaaaaaagaatcagggtcatattttcaagcaaagctaatagccatgagagtg

SEQ ID NO: 724373 - DNA, 2515 bp, Homo sapiens
agcaatcagcttgcctgtgtttaccttgtccaattgttgtttgagtattaagacacttgcattaacttaaatctccaaatattgcttgtacactcatttaaaacagcttcacttgaactatcacactcatattctaatatatctaataattcataaattccagcgtaaaataaaatacaattgccaagtcaattattttttccaggaagacaatttttagtgcagttcttaaaaaggataaccttattctagcctctttttgttgtcagtgacagaaactccattcaaactgaattagatggcgaattccaaagtagcttcagtatagctgtgagcaaacgatgtcatttgcacccgagtctctccatcttgatctggcattggcctcagtcagggctcctgtgttggggtgaaggtggatacttaagttcaggctgacttcctccagcagagcaacacccagcaggtatagagcccttctttactgatagcacaagcaagaagtcctggaagtgatgggctgtcccaagggacctcatgcccctctctgaggtcactgtgaaaggaggatgtatccctcttgttttctaggtttaggatgcatrctggccagtaaaggcagggtatgggggtgcccccccaaccactggaatcaagtatgctggagaaatggttccccaaaagaaaactggagtatgtttgcaaaagacaggaaaggattaaaggcaagtaaaagcagcagatatctactactgcaagtgcaggaatttaaaagtcaacattttaccatatgcattaacagaatattcttctaaatgctgtcttcattcctactcgtaaaactttggtttggccctcaatactattgaagagtgacaataccacttttaagaatgtaaactaactcagttccaacagaacatgtgagaatcgtagaacagaaaaagaaagttgaagtagatatcagattccctacaagctactgctggtcctcctcatcaccactaccttttcctagctacccctcacggaagcactggtctactgctgtgtggctaggataggtcttctctcctggaaggttgtctcatcccatctagccttacacctggtgacttagaaaataaaagaaaagaaacctctcatcaaaggagttctttccagaataaaaggacaaataaactccaatcgttaatttccttcttccctagaatgccaaaatcaatcacaagtcaaaaatggaagtttctcaatttcaaccatatcagggcacggactcaactttcagtaacaggaaaacaacaacaaaataaaatgacaggcaactttgaaaatggatgtacggtttctgacactgcagaatgaaggcaaagaatgcatgcttgtcaagtctgtagatggccaagcacagaaaggacaacctttatcctgaatgaacaaggaccttgacatgattgtgaggagggaagtgaagagtctccatgctgaacaaaaccaatggtgggtagagattgagagaggctggcttcactttagtttggggggaaaaaagaactatggggtttaactgatcacagagctagtgtatgctgagcatgtgatctatctactgataaatgaaagcagtagaaggatgatgatgtcacagcagaggtaacagttgtggtcacatcagaccacatccaggggttcatttgctcttgtccagaggcgggcatttggcaagatgaggggtgtacaaatcccccatcacaaggccttgggtgcttaatctggagcagagaacttgtgttgaggtggtggtggtgatgacacataatagttcctcagatagttcaaagacttaaaacttgcactgtgtttttccatgttgggcaggatttgtagcagttggtgaaagttagggggatgcagactttaggccaatagcttgctactaagaacttgctcagatcccacccctgggggcagagatgatatgactccatgtcaaagaggccttggtgggattcctgctcacatgagaggtagcacaagatgatttcaaactcccttactgccccaggagaatgagctgtagaggtagaatataagacagtgtgtccagttcctcccagagccaacatacccattatatatgttggcacagtgcctagagcccatgatacttataggggcctacacactgttttaatttttgtctcacatcagaaaaagggcagggagtggtggctcatgcctgtaatcccagaactttgggaggctaaggcaggaggattgcctgaggccaggagtttgaaacctccttgggcaacataatgagatcccatctctaaaaaaaagaaagaaaatgtttagggcctacaaaaataaattacattttggctaagaaaaaaaaaagttgaagtatttaaagttatataaaaataatttttatagtgagattatggtggtgggaggaacctacggaggcaatagtcatgagtgccattgaaggtcataaggtggctctggc

SEQ ID NO: 724374 - DNA, 606 bp, Homo sapiens
tggagagctaaaaattaaaataattgaactaatggagatacagagcagaaggatgattaccataggatgggaagggtagtggaggtgttggggtgaagtggggatggttaatatgtacacaaaatagaaagaataaataagatctagtatttgataacacaacagggggactatagtcaaaaataatttaattgcacatttaaaaataactaaaagtaaaattggattgtttataacacaaaggatatatgcttgaggggttgaataccccatttaccctgatgtaattactgtgccttgyatgcctgtatcaaaatatctcatgtaccccattagtaaatacacctactatgtacccacaaaaattaaaaataaaataaaaaaggacaaaagaagaatatggaggatttaaaattccaaccagcttttacctgactctaagtctcacgatttttctcttaatacctgcttttgcccagaagtaagagatgaataggggtgtatgtatatgccttttacaagaaattcatgcctcagtaggtggcctatgcataaaggtggcggagtggttgtgtgaactaatgattaagaatgaagattctagga

SEQ ID NO: 724375 - DNA, 1174 bp, Homo sapiens
gagtcgagatcgagccactgcactccagcctgggtgacagagtgagacttcatctcaaaaaaaaaaaaaaaaaaaaaaaaattccttaggtcactccaaagcacagtaagatttattaagtgattctaattttctaaacagaagttaaatacattgtaatgtgttaccgaattatgtaatatatayggagctggcttaaaaaaatgtttctggccaggtgcagtagctcacgcctataatcccaacactttagggggctgaaaccagtggatcacttaaggtcaggagttcaagaccaccctggccaacatggtgaaaccccatctctactaaaaatacaaaaattagctggacgtgatggcacatgcctgtaatcccagctacaggggaggctgaggcaggagaatcacttgaactggggaagtgaaggttggagtgagccgagattgtgctactgcactccagactgggcaacagagcgagacctcatctaaaaaaatatataaaataaaataatgtttctattgaaagggttcacataatgttggttatcaaaagcccctctaactatgattaaaaataaaatttaaaagatggctgtgaaaataggtaatttggtaatttccttttgaaattaatttaaacaatatgtttttagatacttagcaaatgatttgtttattacaaatagattatgttcaaaataagcacattgtattaaaatataaatattcctcaaaaaacttttttttcttggataaatttaaaagattgcagaatgtggcaggtgggtgttacatgtagtcttacagcctaagcaaagaaaacttaggaacagattttaaaaaatagattaagtgttttctaagctactgcttgcctacactagccagctgaaggctttaaataatttaatccctacaacaactgccagctccaactggaagccttaaacaaggactggattcaccgaggactccaacaggtgcagtctaatagtgattccctaaatctgctactgttctatgtttgtacatgtgtaggaccctatattcttaacttcaacagagcactaatcaaattaattcaagtgctttttgttttgtcccatcttccactatcatattatttaaggcattcttctatttttctctggaggaatacttagtgcaat

SEQ ID NO: 724376 - DNA, 588 bp, Homo sapiens
cgagacgctttctcaaaaaaagaaagaatctaatataaatactaggcaggctagaagaaaatatcctaacatctacttttattttttatttattttttacagcaaacattgcctgacaactaacatctacttttagataaaagcaacttttataattaaggggccaacactaaatattagaccacatcaagaaacccaagagcatatccttatattgcatatactgcttatatgagtgaagatattttcaagaaaaaagaccttggccgggcatggtggctcacacctgtaatcccagcactttgggagatcaaggcaggcagatcacctgaggtcaggatcaagaccagcctggccaacatggagacacctcgtctctactaaaaatacaaaaattagccgcccgtgttggctcatgcctgtaatcccagctactcaggaggctgaggcacaagaattgcttgaaccttggcaggtggaggctgcagtgagccgaggtcatcctacwgtactccaacctgggggacagagtgagattctgtctcaaaaaaaaaaaaaaaaaagaaagaaaagaaaagaaaacaaaac

SEQ ID NO: 724377 - DNA, 1020 bp, Homo sapiens
tgcagtgtcatgatcatagctcactacagctgtgacatcctaggctcaagtaatcctcctgtctcaggcttctgagtagcagggactacacatgtgtgccaccacgtctggctaattttttttttatttttgtagatacagggtcttgctatgttgtccaggctggtctccaactcctggcctcaagccatccccccatatcagcctcccaaagcactgggattacaggtgtgagccactgttcctggtccctttgttacttactgaggaagataaatatagagatttcatgccttattccacgttcagctcctacatttgcagtgtcacctcccactaacttactctccagtcacagtgatatagatatataaggagttgtcccaaacccaccatgctgtacctttgcacatgctgttcactcttctttgaatgtcttcccaacttttgtatgccttgaaaatgtttattcattcttcaatatctaccttagactttagctttctccatgaagtcttcctgggggaagtcttccrtcctcaaacccctactcatttttttgtgtgcctttttcagactctattttcattcttgcatatcagtctcccttactacactgtgagttccttcaatacaaaatctccatattctttatgtttgtatttccaacactatgactatcccttttatgtgtgggtgtgatgaatgtttctgcaattttatattaaaagaaaaaaattcatgaagggaatttccgaacttattgtacgccaacaggttggcaatctacttgtagaattatccccatcttagttatttgttagaatgaaaattacacccttatgtggacactcccagaaaagcttgtaaattttctcaattctttgtttgtctataagatggcatgaagccataaaataaattatacctgtgaagtatataatatgctgtgtaattacagatgtgatgctagttgaacccacttctctgcaagggctgtctctaaacaattagtatttg

SEQ ID NO: 724378 - DNA, 774 bp, Homo sapiens
aatctttggaagagggatctgggcaactgtatgttttccaaagctccttcatataatctgatacatggcaagtactgagaatcattgctacaggcaatctagtgaatgagaacatctagagttgaacccatttctggctctttggctttgcaagccacgcataactgtaggatgaagagtcacctctgagcggccatgttgggtaatgaacagcagggctgagaacctgaaggcatgggtcaagtcttggctttgccatataacatttgctctgcaatgtcacacaaatcacgtaacttctctgggttaggagtcctgtccacctgcctaaaaatccagtgctctttctaccatacctctgtttttagactttttttctaccttaattgatattttactgttttgtttttgtttttgtttaatgatcagtacatagacctaatgattcatttctatatagttcttttattttttttcccaaacctccaggtagtatttatcccagattccaaactttcctgtggcctaaaagctatttagtctattggaaacattcagcaagctctttacaaaaatgactgcagtgtcttcaacgcgtttgagttgcactcatagtttgccccagtcacgtgcgagtttaacgtacaactctacatcacgtaatgggacatctttaacaacaaaamcttcccgtgcccaaggtcatgcacaggagaagaagggagtgaatttctactttatgcatattttagggaacaatactgtggctatcac

SEQ ID NO: 724379 - DNA, 1259 bp, Homo sapiens
ggaaagagccaaataaattacaaatatcttattttaaattttaaaggcatcagaaaagtacagaaagaagatatagtagacagattaaaattccagaaagggagaatcagtcagaggtcagctgatggactggcagctgtttttgtctctggggacatttgctgattcagggtgtgagctgaagatgagagtttggcttaggcagaaagtcactgccaggagaatgagaaataagcaaaacttttagtgattccacaggactaaaatgataaaactggagatttgagaagcctcaaacacatgaccaattcttctcacaaaactgaattctgatgctacagagaagctagagaggtagtgaaatctcccaggcttgtggtgctagcagaccatgatctgccaggggaaggggaccaaaacaaaataggcaaaggtgaagccctggagggtgtggtcaatttacactaaggaccaagagcaacttttcatctggggtcatctaccaattctggtcacagttctaggttgataatccaggtgtgatttctggcagaaggttgctactgagggacagagaaaccagcggatattttggcatgcttgggggctacagtgacaaaaatggatacctgaaggatgtctaacatatagccagtctcctgctcaaagaatttgccaaattttgaagcrgcatgagacagaagactaaatggctaagtggaaaagcactgaagggcaaaactggatctcccatcgtatttagggctatgaattattagagataaagaagggcgctgcattatgataaaagtgataacttgacaagagatacaagaaaaataaactgaaaatcggaatggaaatgttaatacctctctcaacagctgacagaataagtagaccaaaaaaattaataagaagaactgagcacaattaaacttgacctaactgacatacataggacactgcactcaacattagaaattgcattcttttcaaatgagcatggaatatttaccaaatctgaccataaaatggtcattaaaaaggcctcaataaactcagaggattgaaatcattcataatatgttatctgacaacaatggaagacagaaaccaataaaagataactagaaaagcatctgctgcctgaaactaagcaacatacttctaaataatgatcaattaaaatggaaattagaaaatattttgtgttaaataataaaaacacacaatattaaaaattttggagatgcagg

SEQ ID NO: 724380 - DNA, 1474 bp, Homo sapiens
ttgagcaccccaagtctacttcagactgctgtgttgccagtgagaatttcaagccagtggatcttagcttgctgggctctgtcggaatgggatctgctgagctagaccacttagctccctggcttcggccccctttccaggaaagtgaacagttctgtctttttggtgttccaggtgccactggggtatgaaaaaaactgcagctagctcagtgttttgtgcttgaaacccagggccctggtggcataggcacctgagggaatctcctggcctgtgggttgcgaagaccatgggaaaagcgtagtatctgggccagaatgcaccatccctcactrcagggtccctcgcacttctcttggctaggggagggagttccccaaccctttgagcttcccaagtgagttgatgccccaccctgctttggctcaccctctgtaggccgcagtcactgtctaaccagtcccaatgagatgagacaggtacctcagttggaaatgcagaaattacctgccttctgtgttgatctcactgggagcggcagaccagagctgttcctattcagccatcttgccagccacttcaatatttctttaaatgataattaactctctccctggctagaaagggcaacaccagcctagtcattggaaaaaggcagacgaagataaaccagacaaaaagggggactctgttacctactgtcagttgccaattaagggtagctcaaccatcaacccatttgttcccattaatatcataatttatttttattttctttctgagaccaggtcttgccctgtcacccaggttggagtacagtggcaccattgaggctcactgaggccttgacctcctgggctccagcgatcctcccacctcagcctcccaagtagctggaattataggcacaggccaccacacccagctattttttagattttttgtagagactgagtcttgctatgttgcttaggctggtcttgaacttctgggctcaagcgatcctcccacctctgcctccacctccaaaagtgctggaattacaagcgtgagccaccatgcccaacctcatgacttatcttttttatgaaaagggtaaataactgtttatctctgcttccagcccagaagaatttacagagactgaattatgctcccacttaaaacaactgaaaaaaataatcttaagaaatttgacatcagtcatcagagaacagtaatgtctgagacatggaaacaagtgaggtgatttccccagcttactaccttaaaaatttccaggctgcagctcagggtaaggggatgccgtcagagctatgcaaactcccaacttaaagaggtggagtgcagagtccagagagaccaaggcagctaaagttcatagaacagattaacagaaagcagagagctacagagagagagagatctacagacatctgtagagggtcccccttgagtattcgcagagtagtga

SEQ ID NO: 724381 - DNA, 1474 bp, Homo sapiens
ttgagcaccccaagtctacttcagactgctgtgttgccagtgagaatttcaagccagtggatcttagcttgctgggctctgtcggaatgggatctgctgagctagaccacttagctccctggcttcggccccctttccaggaaagtgaacagttctgtctttttggtgttccaggtgccactggggtatgaaaaaaactgcagctagctcagtgttttgtgcttgaaacccagggccctggtggcataggcacctgagggaatctcctggcctgtgggttgcgaagaccatgggaaaagcgtagtatctgggccagaatgcaccatccctcactgcagggtccctcrcacttctcttggctaggggagggagttccccaaccctttgagcttcccaagtgagttgatgccccaccctgctttggctcaccctctgtaggccgcagtcactgtctaaccagtcccaatgagatgagacaggtacctcagttggaaatgcagaaattacctgccttctgtgttgatctcactgggagcggcagaccagagctgttcctattcagccatcttgccagccacttcaatatttctttaaatgataattaactctctccctggctagaaagggcaacaccagcctagtcattggaaaaaggcagacgaagataaaccagacaaaaagggggactctgttacctactgtcagttgccaattaagggtagctcaaccatcaacccatttgttcccattaatatcataatttatttttattttctttctgagaccaggtcttgccctgtcacccaggttggagtacagtggcaccattgaggctcactgaggccttgacctcctgggctccagcgatcctcccacctcagcctcccaagtagctggaattataggcacaggccaccacacccagctattttttagattttttgtagagactgagtcttgctatgttgcttaggctggtcttgaacttctgggctcaagcgatcctcccacctctgcctccacctccaaaagtgctggaattacaagcgtgagccaccatgcccaacctcatgacttatcttttttatgaaaagggtaaataactgtttatctctgcttccagcccagaagaatttacagagactgaattatgctcccacttaaaacaactgaaaaaaataatcttaagaaatttgacatcagtcatcagagaacagtaatgtctgagacatggaaacaagtgaggtgatttccccagcttactaccttaaaaatttccaggctgcagctcagggtaaggggatgccgtcagagctatgcaaactcccaacttaaagaggtggagtgcagagtccagagagaccaaggcagctaaagttcatagaacagattaacagaaagcagagagctacagagagagagagatctacagacatctgtagagggtcccccttgagtattcgcagagtagtga

SEQ ID NO: 724382 - DNA, 2272 bp, Homo sapiens
ttttctgtaggtatttttttcttcaatgaatagtttaataaacacaaaaaagaaaatatggtcatcttatctttggacagtctctcaaatgttttataattaattaaattctttaacttatgtatttagttggcctgttttttctttgaatatgcatccagatatcccaggtcacaggaatttccacttatacttaggttacaaaaccatgctgatgcacacatttgaattttgttgatctactttttctggttccctttccctagagtgttctctttttttttctctgtagctgaagtcaacctattaattttaaagtatttgattaaacagaatcttctttatgaagcccgtcctgggccttctatgtggaattggccattctattgttcatgttcctatggtacaaagcacatctttcatctgatcctacagcattttagtgaacttctttgactccaattactagataataagctcatttgatgctagaggttatgcttaatcatctttttatcccaagtccccagaaaacatagtaaatgcctaataatttgttgaaggaatgtgcaagtgaatggaaatgtatgcaacttgtaactgcgtaatgcaattttcaatcatgacttaatatttgtcatagtttacagtaaaaacacattattttaaatggagagtctaatatcatttaaatattccacagaaataaagacagttttaggtctctggttaaattttttagtaaattagggatgaaataacagatttcaaagactcactttttaagtagtatttttctgtcactcgatgtctattttccttctttctacttttaaaatggcagctgcacttttaaatttatattatttccatcataaataacaaatgagtaagttcttactcattttcttgcatctcctgaataagagttattaagttaaacacaaatatcaaattataaaaacctacaaccaactaattatgtttttttttccttttgttttaaagaaagtactcaaattcaactttaatttgtggcattaatttattatagtggtgtggctgaggtaatgtaaacaggagaacttttctgcctttctttccttatttttccaattctcgttacacatttctggaggcaaatcttcatttaaaaggtgctgcaaactcaagcttccctcatgaatggcatgtgttaaatgtgagatactccgaaagagttctcacacatcactgctgtacagagcaaagtacactatcacgaatgcattgatttaataaaagggcagaaagtgaacgaatgaatcggtcaactcgggaacctggaagagcaaagccgcagcaggcgctgctctcacccatcctgccctcagcttcagcctgcaacgtgtgcattttccgccctgtgctctgctgctgaagggccttcgtcagaggatcgcctcctccaggagggctgttctcctgcttccctcctaggactgagctcttgactccaggagcagctaaccacacagtgtgacttgctgtcctggtctccctgcaagctcaggctgagtctgtggttgcgcttgaacctcctgctgttgagtgtcctcacttcctggccagttggtttctcctggaagaatttatttcacaaacacttgcacccaaaccctcgcctcaaattttgcttctgggagaactcgacctaagatggaaatgtacagatagagtctaaggaaagaaagaaatgtaggggcacaaacttaatgcaattgagaaggtgaggcaatataaggaattcacaaaaagaaggcagatgaacgtctcgaaatcttaataatgagaacttctctatgataccatgctcagtagattgggtgtggagctgggatggatggggacttaattcggatgacctgatcatgtgagcagtgtctagcagagcccaaggtcaaaatccttcaggaagatctttagaaccacaaatgggtttcagcaaattatgagccccctaggtgaaaatcttatgagagagcagtaaaatagaaggaagagaattaaatcatgcaaaggcagtgtattatcaaaggcttcagggtgtgaggtgagtggctgggtgcctatatttttcacagtagacttttctaaggtgagaggattttttattgtgtaaatatttatgttcctttgtttttggcaatgcttgcatatcaaaggtgtacaagaaaagtcaaayacatgagagctcagtaagaatggtcatagaatctcactttattttcta

SEQ ID NO: 724383 - DNA, 602 bp, Homo sapiens
tttctcaagcagcaatttctttatttcaaaacaagtttcagtgtaattcacctcactcacaagggtattctagaaacaagtgagttgcttgttgctctttttagctgacacaccgaataaaccttgacactttcccttcctggtttctcccttcccctcgccatcatagcaggaggctgctttgaaatatattatactgacagtgagcatatgtgcagcagtaaatattatggtttcatctaatgcttcaactgtgaaaacaaaagacagaaaatgtagttcacataacagatactgaggtcaaaaactatcggtacagatattccwcatggcaactattacacatttcatggagagcttatttatgggaacatattatgagtcatagcaattcataacatggtgtgctatggaaaattccattctccactccaactaaatagtagacacacagcactcatttttgattaatgagagtcataaacatatcccaccaggtataatacagtagtttacagctctaacctaaattgacagatatatttttttcttcataaaacaagaaaaatgggataagtaaaattactgcagttctcagccca

SEQ ID NO: 724384 - DNA, 602 bp, Homo sapiens
tttctcaagcagcaatttctttatttcaaaacaagtttcagtgtaattcacctcactcacaagggtattctagaaacaagtgagttgcttgttgctctttttagctgacacaccgaataaaccttgacactttcccttcctggtttctcccttcccctcgccatcatagcaggaggctgctttgaaatatattatactgacagtgagcatatgtgcagcagtaaatattatggtttcatctaatgcttcaactgtgaaaacaaaagacagaaaatgtagttcacataacagatactgaggtcaaaaactatcggtacagatattccacatggcaactattacacatttcatggagagcttatttatgggaacatattatgagtcatagcaattcataacatggtgtgctatggaaaattccattctccactccaactaaatagtagacacacagcactcatttttgattaatgagagtcataaacatatcccaccaggtataatacagtagtttacagctctaacctaaattgacagatatatttttttcttcataaaacaagaaaaatgggataagtaaaattactgcagttctcarccca

SEQ ID NO: 724385 - DNA, 639 bp, Homo sapiens
atatatatatatatattttacctygcaaacataaacagggtatagaattaacacaatttgttttgcttttgtttgtagaattcttgattttttagatcttttggaatgaaatgtatgaatgttgttctgcaaaagattttgtattttactcttacttgtaaactggatagacctatttattcaataatataaatgggaatattctgtgttacaacgacttatttcaatctacagttgcttgtggctttttgtccttgtagaatgtgacatctatattaacaaatattgtgatggaaaagtagaaataggtttattgacatttcaaagggacagttttatggcataattactttataagactagtacattcatttgaatgactagaactaattaatatggtgaataaaatttaacttccttgagaaaaatcattaatggccattttgaaagaagatgatgaaataatttgtgttatttcaaaataaaagaggattacattttaatctagatttctcaattataccaaatcagaaacatctatcattactctcttgctctgagataaacataaataaacacatcaaaactatttcatcaaactctaataccaaggcgctcaaatggagtaccatttccatc

SEQ ID NO: 724386 - DNA, 2430 bp, Homo sapiens
tacctctttcttgagctttggagcagtgaatcctaccagagatagtcctagcatccaagcagagctcactgtcattccaaagtcccacagagcgctcctcctcctttaagaggaagcccaggacccccaagtccacattccattgttggtttgcattcctccccctgcctctttccatccttcccaataatattcacatttcccttaattctgactccgtgttttcatcaactgcctttctgttctccggccttactatgtctgttcggcttctcctcataggtgatccgactcacctcgacactcacaggttggctcttcctgtctaaaatgttaccctgttttgatttattgctctgttaggtttattatttctgcaagcagtgtgttcttttttaaatgtacattttatgtttttattcccttacttaacaccctgccctgcctcccacagtcctgatggtgaaacctccctatgtcagggcgtcaggcgttgggctgaccctgacccttctgccatctcccttaagctctacccttggtctagaccaaatgaacgtcatagcatctcccccactttcctggccctaagttgcaaatttatcctgtaggaatgcatgtcctccttccttagggaacactcttycttcagaaatattatttccagttttaactggatcttcaggatgcggcaggtgttaacttttgcagaggcagaacccgtgaccacatctggctcagggatctggggacccaatgtgcctgcaagcagagacaacaggccagcagcctgaggagaaacaggcaacagtggctctttatggctgcaccttgttttaggggtctttttctatcatgggtaagtgcacaggccagcgagcagtgggcacgatcaacaagattttcaagatgcaagtgtatgaggcaatggatgccccatttaccctgatgtgaatgttccaccttgcatgcctgtatcaaaactctggtgtggctattctacattgcatgcctatatcaaaacaccttgtttatcccataaatgtatacaccttctatgtacccacaaaaattaaaaattaaaaaaaataaaagatccatcatctcaaacaaacacacaacaacaaaaaaggcaactgcagctccttgagggccaaaggcggggcccttctgctcgagggacccaatttcccttgataaagcgcacacactttgtaataatagaagacagcattcaccatgtatcacaatgatgctgtccagtggctttcagttttctatggcaaatctacaattttttttattagtgtctagagaagcaagtaaatattaactactattttaacattattggatgcactagacctcatggaagcaccaaagatttcacgttagatgtagactttagtataaagaataagacttctttaaagtactatccaagggagtttaattactaaactcccttttaattactaaaccctttgaaaaagaaaaagaccatcaccagaggttccaatgagagtccaagtggtgttagagtgcagttccactgggacatttctgagcagtttgaagagaagataaaacttcagtgctacattttatgaccctgttgcctttcactaaaatgaaggcattactatattacaggtatacttaggccttgaactacatacaaaggatttttactgtattttaatttaaacattgctaaaactacaaacaacattataaacagagaagtctataaggttgtacaaaaacagaatgcgggtgtaaaataccctttgtttaaaacctcagattggtcaaaatctctttttgatgttttcatattctcagatttggggtatggaagactccatgtcctacactagctgtgtacaacttggaaatattaattacagttcagacttttttcttttactttaatggaagccttatgtatgtgagattttccaaaaatgtgagactctccctgtcttcccttccccttcctctcatcccttttggaatccatgcaaaaacacttctaagtacagaatgtccttttctttagcacagtcaatttttcctaatgaccatttatataaaccttggtaatgttgagaacagagaattcctgcagtattataaatagcttgtgagaactctgccctcgacccgattgcaccgagggagtaagtgtttctaattactgcatgcagctggtgacctacaaccagcacaccctagcttggccattcaggttccacgcagctggtcagcagccacagcctgtgtcacacacagatcctagccccagtgacacaccattgatgggggaagcccagattttccagtaggaaaagtggtgttcaccaaataaatgaattaaccagggtaaaaatgtccacaagaaaagccccattcatcaccacgttagga

SEQ ID NO: 724387 - DNA, 631 bp, Homo sapiens
atcccagctacttgggaggctgaggctagagaattgcttgaaccgggaagcagagatagcagggagcctagatctcgccactgcactccagcctgggcaacaagagcgaaaactgtgtctcaaaaacaaaaaaaaaaaaaaaaaaaaaagaatcaatgaattgggtacctctagattcactgaacattgtattacatattttggggtctattagccattggaagtcccaaattacatagaaatttctctctacattctcaaccttcacatttcaytgtgccatcattaaagtgtttcgggggtgttacgacataaaagtccatcatactctaacgtagagcaacttctgtttggaaaacactttttaaagaaaggttccagaatctgtaagtatccaacaaacaccaggaatattttaaagaatgctttacctaggttaagatttaatatttcaaaatgacttcagtaaggtcaatacatctttactgagaactgaatcaagagaatatgcaatatgcaaaaataataaaacacaggaaggtcttatttctaatataactgataatctatatgaatgaaaataacagcatggttagtatgactacctgtatactaaattcattaaaaaata

SEQ ID NO: 724388 - DNA, 577 bp, Homo sapiens
caacttcagcctcccaaagtgctgggattataggcataaactgctgcaactggcctaaagctcacttttaaaatgtgcttgcttccctattaacaatgccatcacaaccatggtaacattttaccaagatacatctacctaaacattaactaccttgcacatatacacatctttaagccatttaaggtgttgggaaatcaagggcaaaaatataaacatatttagttttaaaattttaataataaaagtccaaagttgttctttggaactttaaccaaactaaaatctgtttttctagaatgctcagccggacacagtggctcacgcctgtaatcccagcactttgggaaaycgaggtgggcggatcacgaggtcaggatttctagaccagcctggccaacatggtgaaaccccatctctactaaaatataaaaattagctgggtgtggtggtgcatgcctgcaatcccagctactcaggaggcggaggcacaagaatcgcttgaacccaggaggcggaggttgcagtgagccagagatcatgccactgcactccagcctggtgacagagcgagact

SEQ ID NO: 724389 - DNA, 577 bp, Homo sapiens
caacttcagcctcccaaagtgctgggattataggcataaactgctgcaactggcctaaagctcacttttaaaatgtgcttgcttccctattaacaatgccatcacaaccatggtaacattttaccaagatacatctacctaaacattaactaccttgcacatatacacatctttaagccatttaaggtgttgggaaatcaagggcaaaaatataaacatatttagttttaaaattttaataataaaagtccaaagttgttctttggaactttaaccaaactaaaatctgtttttctagaatgctcagccggacacagtggctcacgcctgtaatcccagcactttgggaaatcgaggtgggcggatcacgaggtcaggatttctagaccagcctggccaacatggtgaaaccccatctctactaaaatataaaaattagctgggtgtggtggtgcatgcctgcaatcccagctactsaggaggcggaggcacaagaatcgcttgaacccaggaggcggaggttgcagtgagccagagatcatgccactgcactccagcctggtgacagagcgagact

SEQ ID NO: 724390 - DNA, 687 bp, Homo sapiens
ctgatactgccttaaaaaaagaaagtatttttgcagtctggttgtagctaaatacccatataatcagttaccactgttcactgagtgacttctatatgccaggcactgtagttgttaatagggataaaaagtaaatataaaaagtagagatctagggctgggtgtgatggctcatatctgtaatcccagcactttgggaggctggggtgggtggattgcttgaggccaggagttagagaccagcctggccaatatggtgaaaccccatctctacgaaaaatacaacaattagccgagcatggtggcacacacctgtaatctcaactactcaggaggctgagacacgagaattgcttgatcccgggaggcagaggttgcagtgagctgagaatgcttcactgcattccagcctgggtggcacagtcagactgtctcaaaaaaagaaaaaaaaaaaaaaagtagagaactagactataaaagctgagtaagcaatatttwaaaaaaaatctcaatccatctgggcatttatttccatctaaccctccttactcagcattattaaaaagtttcttggccaggtgcagtgacttacacctgcaatctcagcactttgggatgccgaggtgggcggatcgcttgagcccatgagtttgagaccagcctgggacaacacggtggaaccctgtc

SEQ ID NO: 724391 - DNA, 684 bp, Homo sapiens
tggtatttttgacatgtagaagagaaagaacatcaagataagtaattttttcccttgaaccaaagtcaggattcgtattaattctgtttggagggatttgggtagagaaaccacacatagtctttcccattgtcctttaatataagtgacaagagagaaagtaaagtttactacaaattctaatttttcagaaaagctaatcttcaacctgacattacttgtaaacacttaaaataatattaaatgttcttcagtctgtatacatacaaatatacatatatacacatctttataaacaattcctctttcaaagagctacacaacgcagtaatttcttgggcccagtgacatttgccaggttttattgtcgaagactacttagcacattgtaaaaaattgtattacagtacatgtttacattttataagcctcccttgggattaaaaggtaacactttctgtgagtactcctcttttaacacactattttattttttttttttttttgagacagtgtctagctctgtcgcctaggctggagtgcagtggtgcaatctcagctcactgcagcctctgtctcctgggttcaagtgattcttgtaccwcagcctcctgagtagctgggactacaggtggtgtacaccggctaattttttgtatttttcatagagacaggatttcatca

SEQ ID NO: 724392 - DNA, 638 bp, Homo sapiens
ccaggctggtctcgaactcctgacctcaagtgatctgcctgcctcggcctcccaaagtgctgggagttgttttgagaccaggtctcactttgtcacccaagctggagtgcagtggcctaatcatatctctgcagcttcaaactcccaggattaagcaatcctcccacctcggcctcccaagcagttgggactacaggtgcaagccagtgcacccagtaaattttaaaatttattgtagaagccrggcgcggtggctcatgcctgtaatcccagcaggcacatccattcaaaccatagcactcaggggtttgaactctaatctaatctgaggggaaagttgagtaaaagttacatcgccaaatttgcaatatgggaaatttcctctatctgaaggcagcgtgggaacttcttcaatttgggaagaagagccctgaacaagtagcagtgagcatctataagaggagcttgcatggaggaaatggactgggtaagctgcatatctgaaaggcctcacgggaggcaagggtcaatgagaatcctcaaaggtttcaaatttggaaacgacatgatccaatgtggagatggttggcatctacaacacaacatgtttcaagcaaatgccccattctactccataa

SEQ ID NO: 724393 - DNA, 1297 bp, Homo sapiens
ttaccagatgaatgatagaaacagattttttgaggcaaagtttttcatgttgccatatagtcccatgcaatattttggacatacttatactaaaaaattattatctgaaattcaaatgtaggccgggcacggtggctcacgcctgtaatcctagcattttggaaggatcgcttgatccttccagcaggttgtcccgggaacgcgcagcccaaggtggacgcacagacccgcgtacagagattttttattgtcatgactgggggtggtggcactactggcatttagtgtggagaggccagatatgctgctaaacatcttacaatgcaaagggcagcccctcaaaggcaaagaattatctggtctaaaatgtcaatagcgtggaggctgagaaaaactgaactagatggctatgaactttcagggtccctacctagtacacaggcagcgcctagaattgctaagttcatcttccgtttggaaaggcagcatggggttagtgagaggaaggcgyccggggctggtggctggctttaaaggcctacgtgcaaatcttcttgacgctgataacgggatgcgagagagccaggtaggttacctattgcagcaggtcaagtgatgatgtcgaaaaggatgcgtgtgccggacactgtggaaggtaaagcgctccgcacagcccgcctaagtgcgcccgggacagagccatcccccaggtgctaccaaacaaatcctccagctgctggtacggggaaggtgttcagtgacacaccggaagcagcctagtggctgaggcgtccttctccctaccaacgggttgcgaaggaagtagttgctgtagccgcgccctgtgcgcctgcgcggaggcgtcggctgctgacgtgtagctggggccagacgggactagccgggcgcgcggctgagtgctgcagaatcgctggggtggcagagccgccagcgaggctggggatgggggcgccgctgctctctcccggctggggagccggggctgccggccggcgctggtggatgctgctggcgcccctgctgccggcgctgctgctggtgcggcccgcgggggccctggtggaggggctctactgcggcacgcgggactgctacgaggtgctgggcgtgagccgctcggcgggcaaggcggagatcgcgcgggcctaccgccagctggcccggcgctaccaccctgaccgctaccggccccagcccggagacgagggccccgggcggacgccgcagagcgccgaggaggctttcctgctggtggcaaccgcctacgagacactca

SEQ ID NO: 724394 - DNA, 1297 bp, Homo sapiens
ttaccagatgaatgatagaaacagattttttgaggcaaagtttttcatgttgccatatagtcccatgcaatattttggacatacttatactaaaaaattattatctgaaattcaaatgtaggccgggcacggtggctcacgcctgtaatcctagcattttggaaggatcgcttgatccttccagcaggttgtcccgggaacgcgcagcccaaggtggacgcacagacccgcgtacagagattttttattgtcatgactgggggtggtggcactactggcatttagtgtggagaggccagatatgctgctaaacatcttacaatgcaaagggcagcccctcaaaggcaaagaattatctggtctaaaatgtcaatagcgtggaggctgagaaaaactgaactagatggctatgaactttcagggtccctacctagtacacaggcagcgcctagaattgctaagttcatcttccgtttggaaaggcagcatggggttagtgagaggaaggcgcccggggctggyggctggctttaaaggcctacgtgcaaatcttcttgacgctgataacgggatgcgagagagccaggtaggttacctattgcagcaggtcaagtgatgatgtcgaaaaggatgcgtgtgccggacactgtggaaggtaaagcgctccgcacagcccgcctaagtgcgcccgggacagagccatcccccaggtgctaccaaacaaatcctccagctgctggtacggggaaggtgttcagtgacacaccggaagcagcctagtggctgaggcgtccttctccctaccaacgggttgcgaaggaagtagttgctgtagccgcgccctgtgcgcctgcgcggaggcgtcggctgctgacgtgtagctggggccagacgggactagccgggcgcgcggctgagtgctgcagaatcgctggggtggcagagccgccagcgaggctggggatgggggcgccgctgctctctcccggctggggagccggggctgccggccggcgctggtggatgctgctggcgcccctgctgccggcgctgctgctggtgcggcccgcgggggccctggtggaggggctctactgcggcacgcgggactgctacgaggtgctgggcgtgagccgctcggcgggcaaggcggagatcgcgcgggcctaccgccagctggcccggcgctaccaccctgaccgctaccggccccagcccggagacgagggccccgggcggacgccgcagagcgccgaggaggctttcctgctggtggcaaccgcctacgagacactca

SEQ ID NO: 724395 - DNA, 1297 bp, Homo sapiens
ttaccagatgaatgatagaaacagattttttgaggcaaagtttttcatgttgccatatagtcccatgcaatattttggacatacttatactaaaaaattattatctgaaattcaaatgtaggccgggcacggtggctcacgcctgtaatcctagcattttggaaggatcgcttgatccttccagcaggttgtcccgggaacgcgcagcccaaggtggacgcacagacccgcgtacagagattttttattgtcatgactgggggtggtggcactactggcatttagtgtggagaggccagatatgctgctaaacatcttacaatgcaaagggcagcccctcaaaggcaaagaattatctggtctaaaatgtcaatagcgtggaggctgagaaaaactgaactagatggctatgaactttcagggtccctacctagtacacaggcagcgcctagaattgctaagttcatcttccgtttggaaaggcagcatggggttagtgagaggaaggcgcccggggctggtggctggctttaaaggcctacgtgcaaatcttcttgacgctgataacgggatgcgagagagccaggtaggttacctattgcagcaggtcaagtgatgatgtcgaaaaggatgcgtgtgccggacactgtggaaggtaaagcgctccgcacagcccgcctaagtgcgcccgggacagagccatcccccaggtgctaccaaacaaatcctccagctgctggtacggggaaggtgttcagtgacacaccggaagcagcctagtggctgaggcgtccttctccctaccaacgggttgcgaaggaagtagttgctgtagccgcgccctgtgcgcctgcgcggaggcgtcggctgctgacgtgtagctggggccagacsggactagccgggcgcgcggctgagtgctgcagaatcgctggggtggcagagccgccagcgaggctggggatgggggcgccgctgctctctcccggctggggagccggggctgccggccggcgctggtggatgctgctggcgcccctgctgccggcgctgctgctggtgcggcccgcgggggccctggtggaggggctctactgcggcacgcgggactgctacgaggtgctgggcgtgagccgctcggcgggcaaggcggagatcgcgcgggcctaccgccagctggcccggcgctaccaccctgaccgctaccggccccagcccggagacgagggccccgggcggacgccgcagagcgccgaggaggctttcctgctggtggcaaccgcctacgagacactca

SEQ ID NO: 724396 - DNA, 862 bp, Homo sapiens
tctatattaattagaaaaggagtattctgccctatattagatttacagctggagtctttccagtagctggtctgattgtatgaagtcacaggtggtaaaaaacttgagatttcttttagttccataatggaagagttgtcattcaaaatggtggttttgtcttcctgcactgtctctcctaatcctaaatactgataatattcattatgttcttgaatgacagagtctaaatcagaagctgaactttgagaagacaaggtactaatctgattcctattttcctgaggtgacgaaatttgcggtgattttgttatggaagaagaaccaatcttgaatagggaagtgatgctacaaaaatgctaaaaaatgaattaatataatgcaaatgtcagtttagtaaatataaataatgatgcttatctatatggaaagaaggcaaaatataaataggtagtctattcatagatattacattgatccaggtattaagaacatgaaatcattaggctctattaaaagaaaaattcattgtaattcatacttattttctaatcacttgtaatagaatttttaatagtctatttttcagaacaattttaggctcacagcaaatacaatagaattttagttatacaattcatacatgaawactatttccttgataagaattttaaaatattaccagtaaggctaaagttatctttacagctagaattaagggtatgttaggactgtttggaagaggtaacgtaaatacatgtgaatagggtatataactgaattttctatgagcacaataatattccaaaatgatttaaagctgactatattgaatttatctgtataaaatagctttagaatg

SEQ ID NO: 724397 - DNA, 667 bp, Homo sapiens
ccacactttgaaaaccagcaccccagaaaaagcacacagctctcctgcagcctgtaaagaagatactacccttctgcgtgtaaggaagaaaaagttttttggttgcctggttgattttcccaagtgtcctaattgactagaaactgacagaatgacacctcagcataggctttcaagttccaggaagtcaggcgaagatgcctggtgtgctaagacgagtggtggaatctagcttcagcatctttgaccactggcaccactcagcctaaagttcccactgattactttgaggaaagtaacattagcagttggaaatatgaagctttgtcctgaaccaaaagaaactaatgcaagagaatgagacagaaagagtgcttcttcagaagacccacatcaactattctttgtgagttagggattggaactctcatttcctcatcttaaatgaaagtgggatgggcatggtggctcatgcctgtaatcccagcactttggaagactgaagggagcrgatcacgaggtcaggaaatcaagaccatcctaacacagtgaaaccctgtctctactaaaaataaaaaaaattagtcaggcgtgacgatttgtgcctgtaatcccagctactcaggaggctaaggcaggagaatcgcttgaaccggggaggcagagg

SEQ ID NO: 724398 - DNA, 574 bp, Homo sapiens
aagtatgatattaaaaggaaactgaaagttaaaagtggtggacaacagttcaaaacccacaaacacacactgtgtttttcccttgtacaaataatgaatgttaatttacttaaaattaaggcaatgaataaaagtattaattatttaaatctataattacctcatcttctagagacaatctccgttaacatgtcagtgtaaacacatttatctyctcagtctttcgtttaacaaaataaacatttttacccacatagctcctttcacaggtctttttgtcctaaactttttgaggaatgtggtaatggtgatggccgatccacttctgtacctgctcccaggatatttcccacatggattcagttcagttccacctggaactatatcttgtctccatccaaacacaagttgcacacatttagaaccctctgttcagagtactttttagtgcccaggtctgtgaaaggcagataatgaattggtgacgagagggagaagagtggctattggaaacagttttgagcttcctcctctgtggcccttgttcctctgtaattaccccactagctcaccc

SEQ ID NO: 724399 - DNA, 655 bp, Homo sapiens
tcccaaaatgcttggattacaggcgtgagccaccgcgctcggccgcggtttttttttttttttttttttttaagtttccacaagtgtggaaacagaaggtgactgtattattgaaaaaaagtcttggatgacagaagacccaactcaaacaggcttaagggaaaaaagtactttggctcgccgtggctcatgcgtgtaatcccagcactttgggaggccgaggtgggcggatcacttgagggcaggagttcgagactagcctgggtaacatggtgaaaccctgtctctactaaaaatacaaaaattagtctggcrtagtggtgggcacctgtagtcccagctactcaggaggctgaggcaggaggatcgcttgaacccaggaggcggaggttgcagtgagccgagatcgcgccattgcactccagcctgggtgacagaacgagactctgtctcaaaaacaaacaaacaaacaaaaaaaaaataaaaagaaaaggcaagaaagtaataattggttgccagaaaaagtatactatttttatcctcaggaaaggtagtaaatggcctctgttgatattgtaaaattttcattttgtgaattagaatgagttatcctaaaaagaggactaatccctcatttcagcagagctagtcattc

SEQ ID NO: 724400 - DNA, 634 bp, Homo sapiens
ggaagattgaaagcaggtaataaggttagtgcaaggaccacggctgcaagaacacaggcacactgtaaagcaggaatagcgcayggcacttgcattcacacacgtgcacatcctgagctctaacagcaactgggacttgtcaaaaggagctgccctgcatcgattctgcgcctgctcagcctgtaattcctgagtctatgtgccctttcaaatgaaaatgctgtgaaatggcccataaaagaccaccagtctctgaatttgctaggtgaggcctggtgggggccaggttgattggccagggttctgcaatcagggctgtgttctggaagaaacttcttactgtgctgtgctacgtgaagccgggagcaaacccaagaagtcctgtgctggggccaaggtcagagtcagaaccagatagatagaaacaaccttgatcctgaacatatttgttaagctctttcctgtctcagcgattttccacatgctgttctctgttcctgagaggctgcctcacctactcttcatgtttttggtgatgatgtgccccctttcaccctattgtgttagtcttttttcacactgctgataaagacatacccaagactgggaagaaaaagaggtttaattggactta

SEQ ID NO: 724401 - DNA, 573 bp, Homo sapiens
aacaacgagaacacagggaggggaacatcacacactgggtcctgtcaggaggtagagggctaggggagggatagcattaggagaaatacctaatgtagatgatgggttgatgggtgcagcaaaccaccatggcacatgtatacctatgtaacaaatctgcacgtgcagcacatgtaccccagaaattaaagtataaaataaaaatttctggctgagcatgatggctcacgcctttaatcccagcactctgggaggccaaggcaggcagatcacctgaagtcaggagttcaagaccagcctagccatatggcgaaactccatctctactaaaaatgtaaaaattagctgggcgtggtgtaatcccagatacttgggaggctgaggcaggaaaatcgcttgaatccaagaggcagaggttgcagtaagccaggactgtgccactgcactccagcctgggcaacaagagtgaaactctgtctcaaaaaaaaaaaaamaaaaaaaatcttcctaacactgaatttgtccactaatttctgtaaaatggggttaagaacaccactttgtcagaggact

SEQ ID NO: 724402 - DNA, 1836 bp, Homo sapiens
ggcaatgatgacctttctaaatgctctctttaaataatcctccaatattctcagaaatttagtgtacctacagcaaactatttctcttagtaaaagccttctgtgagcaacttaactgtctgatgtctttatccgtgtgagcagggactgggtcctgtcctttttcttttttttttttgtttgagatggagtctccctctgttgccaagctggagtgcagtggcatgattttggctcactgcaacctccacctccagggttcaagtgattctcctgcctcagcctcccaaagtagctgggactacaagtatgcgccaccacgcctggctaatttttgtatttttagtagagacagggtttcaccatgttggccaggatggtctcgatctcttgacctcatgatcctcctgcctcggcctcccaaagtgctgaattacaggtgtgagccaccacgcctggcctggtcctgtccatttttacagagcagagagcatctagcatgccaccacattaatgtaatgataataatttccatttgtctagagacttatgctttacaaggcccttatagtttacttccccttaatggtagttcaagtagcagagaatgaccttttcattgtccttctctgtgataagccaaagtgaatgtaatgtacattcttcatagtgaaggctttctacctcattcatttattcacaaaatatttattgagcatgattatgtgttaagcactgaactgtgctctgtgctgctgggcactgtgtgttaggtacaaacacggcagatggagccccttcccccatgaaatgaacattctaatggggcgttagtcaataaacaaataaataaatagattgtcagggggtaatgagtgttatggggaagaataaagcagtgggagctgggaagcaatgggaggatgtcaatcttagggacatgagaaggcaccctcatgcagagacttgggcaaygtgaaggatcgccactgtgtgaccaactggaggaagcacgttccaagtcttgtggcagaaaggagcttggctgtttgagaatcagcagtgatatcagtgtggctggagggaagggaaggtgggacgagtgggtgggagataatttccagaggtggacaggatgcagattatatgggagtttggatttgattctcaagtgtgatgggacactattggagggttttgagctggggagagacatgccatgaaatgtgaagtctggcctgcagggaagcaggtacaccaactgaatgagttcaatttggagatatatatatttgagatggagttttgctcttgttgcccaggctggagtgcaatggcacgatctcagctcaccgcaacctccgcctcctggattcaagcaattctcctgcctcagcctcccgagtagctgggattacaggtgtgtgccactacgctcggctaattttgtatttttttagtagagatggggtttcttcatgttggtcaggctggtctcgaactcccaacctcaggtgatccgcccacctcggcctcccaaagcgctgggattacaggtgtgagccaccgtgcccggcccaatttggatatattttaaaggactacctgatgcgttaaatgtagaagatgggggaatgtagaatgctccacagagttttgtcctgagcagccaggtgagtggcgatgcttttatttacttacatgagaagaattgggaaggaatacgttagaagaggagacttgagaaaccaagagtaaatgttttggattagtattaattaaattggaaaagtctatgacacatcgaagttcagatgtcagataggcaggtggtta

SEQ ID NO: 724403 - DNA, 1125 bp, Homo sapiens
gatctttagcaaggcacttagcttctctgttctttggtctccccatctgtaaaatatgagcattatgtatatctccaaggtcccttctagtgctgatatgtcagaactcccaaagctctacccttaaagaggctttttagcagcaaggggagactcttcccagttcttggggccatgcaaacacttactgttgcaaatccgcactccaccttgctgattttttcaatggattccacagcatctcttccgagttctaggagggtgggatcccccgtggcacggtagaggtacattgcgctttcaataagttctgcaaagtccaaagcagaccctcctcactcagtggctgcacagagatggcctggggcctcttagggccgtgagggactactcccctccatatcttgtccataaggccccaactagcaggaacacaggatacctcacccagtgctgagtttcagagccagtatacccaaagcttgaagctcagtggagaccagcattaaggctgaccagtgacttccaccacaagggagagaaaggtggccaggttctggcatagagaaggtggcggaggttgttgcctaattcccaatatctgttcccygcttcctccttagtagcaggattcctaactttagctaagcacaggctgcctggctgccaacactaactattctaacagctaggtgggattaaggacaccatggcgagccatataagcccagaacatgagagagaaatacatttctatcctaattaagctactattttttttcctgtcactcagagtctaacctaattctaaaactcaaaagaagagtaagagcttggcatcataaggctcgttctaagataggatggaccaaaagaaaaggctgagatatccaagagcaggccaggcatggtgggtggctcatgcctgtaatcccagcactttgggaggccaaggtgagaggatcgtttgaacccaggagtttgagaccagcctgggcaacatggcgagatcttgtctctacaaaaattaaaaatgattagctgggtgtggcatgcacctgtagtcctagctactcaggaggctgaggtaggaggatcacttgagcccaggagtttgaggctgca

SEQ ID NO: 724404 - DNA, 1125 bp, Homo sapiens
gatctttagcaaggcacttagcttctctgttctttggtctccccatctgtaaaatatgagcattatgtatatctccaaggtcccttctagtgctgatatgtcagaactcccaaagctctacccttaaagaggctttttagcagcaaggggagactcttcccagttcttggggccatgcaaacacttactgttgcaaatccgcactccaccttgctgattttttcaatggattccacagcatctcttccgagttctaggagggtgggatcccccgtggcacggtagaggtacattgcgctttcaataagttctgcaaagtccaaagcagaccctcctcactcagtggctgcacagagatggcctggggcctcttagggccgtgagggactactcccctccatatcttgtccataaggccccaactagcaggaacacaggatacctcacccagtgctgagtttcagagccagtatacccaaagcttgaagctcagtggagaccagcattaaggctgaccagtgacttccaccacaagggagagaaaggtggccaggttctggcatagagaaggtggcggaggttgttgcctaattcccaatatctgttccccgcttcctccttagtagcaggattcctaactttagctaagcacaggctgcctggctgccaacactaactattctaacagctaggtgggattaaggacaccatggcgagccatataagcccagaacatgagagagaaatacatttctatcctaattaagctactattttttttcctgtcactcagagtctaacctaattctaaaactcaaaagaagagtaagagcttggcatcataaggctcgttctaagataggatggaccaaaagaaaaggctgagatatccaagagcaggccaggcatggtgggtggctcaygcctgtaatcccagcactttgggaggccaaggtgagaggatcgtttgaacccaggagtttgagaccagcctgggcaacatggcgagatcttgtctctacaaaaattaaaaatgattagctgggtgtggcatgcacctgtagtcctagctactcaggaggctgaggtaggaggatcacttgagcccaggagtttgaggctgca

SEQ ID NO: 724405 - DNA, 559 bp, Homo sapiens
atccgccagtcttggcttcctgaagtgttgagataacaggcgtgagtcactgcacccagcctctagttcttattttagagaaaaggtctctgcctatctccccagttctctcttacttcctcctcccctctcctcacaggcctctagacaattgctaatctaattgctcatattctaaggcacagactagggtacattcattactagatgaacacattctgtgtgttcaaaggcagaaaagacagtgccctcatgggaggcctcctcttctgcttcttttttcggcttcttcttytttttttttttttttttttgagagggagttttgctgtgttacccaggctagagtgcaatggcatgatcttggctcactgcaacctctgcctcccaggttcaagcaattctcctgtctcagcctcctgagtagctgggactacaggcacatgccaccgtgcccggctaatttttgtatttttagtagagacagggtttcgccatattggtcaggctggtctcgaactcctgacctcagttgatccaccgccttggcctcccaaag

SEQ ID NO: 724406 - DNA, 559 bp, Homo sapiens
atccgccagtcttggcttcctgaagtgttgagataacaggcgtgagtcactgcacccagcctctagttcttattttagagaaaaggtctctgcctatctccccagttctctcttacttcctcctcccctctcctcacaggcctctagacaattgctaatctaattgctcatattctaaggcacagactagggtacattcattactagatgaacacattctgtgtgttcaaaggcagaaaagacagtgccctcatgggaggcctcctcttctgcttcttttttcggcttcttcttttttttttttttttttttttgagagggagttttgctgtgttacccaggctagagtgcaatggcatgatcttggctcactgcaacctctgcctcccaggttcaagcaattctcctgtctcagcctcctgagtagctgggactacaggcacatgccaccgtgcccggctaatttttgtatttttagtagagacagggtttcgccatattggtcaggctggtctcgaactcctgacctcagytgatccaccgccttggcctcccaaag

SEQ ID NO: 724407 - DNA, 959 bp, Homo sapiens
ggtatgggattttgtttgggaattcaattttttgttatgagtttttaaagaaatgtgcagcaatggcaatgtggaaaaaaaacacacacagaacctttggaaaggaaagggcgggggggttractcacagaaactgaaatgcactacttgttttgggcaggcacagagaagttgaggaacactgtgtaggtgggcccaaaaaatctatcatctaggactgggactagagagttcagagctaaagtctttctgtcctgcctgaaatgccactaccactcatgctaaacagggcagttttattctactctcccatacatttaatagtcaaagaaatattatcatcgggttggtgcagaaagccagagattatactagttatgtgtgtgacagagggtgtataaggagaagtgatgagaaaatgatgtcaaaagtgattagctatcttctaaagagtgatgattgcaatgtcaacaaaattctcatcctgagaaacagctatacctccatacctaattacaaaactgagtcaagtagaacaatcaagtaatatacctttattcatttattcatccattcatgtattcatcctacaaatgtttattgagaacaacctgtgttcaagatatattcctagcactgcagctataatcttgaatgagatgaggaccttgccttcatgaagctgatattcaggtgatatacaataaataagtaaacaaataaatacacaatatatttcaagaagtgataagattagaaagaaatatgaaggaggaaagggggcagatgttgataacatgtgttgggggaggtgggcactctttcctattgggtgatatgtaaaggccaacctgaggaagtgaaatctgaagagaaacataaaggaagttaggtggtgaaccttgtgaagatcttagaaagaattttccagaaaaagaatggcaaatataaaggacttg

SEQ ID NO: 724408 - DNA, 646 bp, Homo sapiens
gaactgaagacccttggcttctgcaggtctggcttgaatttctcatagaggttggcagatggcttcaggtcaccacctgctgccttctcttcgtggggaagaggcatggtacatgtgggcggggcatatggaagccccactggaaccagcgaggcgtccacctggcccagggcctggggattcctcctgatgtaggtgatgatcttgggcctcacatgcttgggcttgggcataatgatgggcttagtttctgtcctctcctctgttttttcaacctgatagttctccattccctcctgcgaggaaggtgtgtccttggaatgtgtgaagacaggcttggggatcccactggggcaagtgttcttgtcaggcactttgggggacgtgttcaacaagcgtgcactatcagtagggggtggaactaccaagggggaccccgcatccataccgaacacgctaacatcctgaaaactgctactgggtgttgtaggctggtaggtcatgttcacagttgtctctgggtggaggggtgctggaatattgagaactgaayctgctcttgctgaggtgctttcaatcttatctgcattctctagaaggttcctgttttcagcaacagatgtggtgacctctttgctttcccgtg

SEQ ID NO: 724409 - DNA, 624 bp, Homo sapiens
atccgcagggctatgatataggatcactagaatgtgggactggcacctagaagaaacctcctgctgcccctgccacaagcatcagagaaccactggtttatctctctggtttttcttttctggaatctacgtgtgtttatccagaagagccgggggttgatgatcaaggaagcagctccttaatcagcctaaacgggaggagtaagaggaaggatgaaccagtgaggctgatctgagcttagagaaaactctgaaggacaaggcaggtgttttcacgaatgcattacccataaaatctcagagaggctgcaccttgcccttgggaatattccaaaccagatcctactggcatattcttccggatcacctaaagacttcayataagaaaccttccctcttcacatcaggtgctcaattttcctgtttctgtctgaactttgctcatttaaaaaaaaatacaatagatttcacactaaagtttttatcttcctccagggtatttttcttccatttacttgaggaacggtgcccagaaaatattttgagaatgaaattatagcaagagtgaaataacttacagagcctcaaccttttggggcatgatttcatattactcatttataa

SEQ ID NO: 724410 - DNA, 1360 bp, Homo sapiens
  misc_feature 601, 602, 603, 604, 605, 606, 607, 608, 609, 610, 611, 612,613, 614, 615, 616, 617, 618, 619, 620, 621, 622, 623, 624,625, 626, 627, 628, 629, 630, 631, 632, 633, 634, 635, 636,637, 638, 639, 640, 641, 642, 643, 644, 645, 646, 647: n = A,T,C or G
  misc_feature 648, 649, 650, 651, 652, 653, 654, 655, 656, 657, 658, 659,660, 661, 662, 663, 664, 665, 666, 667, 668, 669, 670, 671,672, 673, 674, 675, 676, 677, 678, 679, 680, 681, 682, 683,684, 685, 686, 687, 688, 689, 690, 691, 692, 693, 694: n = A,T,C or G
  misc_feature 695, 696, 697, 698, 699, 700: n = A,T,C or G
tcattcgaatccagttcctygtttattcacaattaaaaccttagtgataaaacagaggcgacgcgcggacagctcctggaagcagaaacacgattggggtaaaatccggcagctatcaggacgggaagggatgctgcccttctttgcttttctggtcttattttattttattttatttttattttgtcgcgtgtgctttcggtgtcgcagtgaagtcatagccaaatacaatgttaggaagattttcctctatgttttctcctaagagttttataatttaaactcttagacctttaatccattttgagttaattttcatatgtggtatgagtccacatttactctttttcatgtggatatccagttttcttagtaccatttgttgaaaagacattctgtgcccgtttttaagacattgacctgaggttcggagattgtaaatcatttgccaagaaaggccatgcagtttgggagcagcagtgcctggggctacagaagacccttgcttctgggacaccctctaatgtcatgctttgcaaggttttgctctgtccctctttgagcacctgctagaagcaggtaaaagaactggtagttttgnnnnnnnnnnnnnnnnnnnnnnnnnnnnnnnnnnnnnnnnnnnnnnnnnnnnnnnnnnnnnnnnnnnnnnnnnnnnnnnnnnnnnnnnnnnnnnnnnnnnctcatgattggactgaagctgtggatgtttaggaagaatgctacagagattatgtgcctttctcattgcctggtatctgtgggtacacggtatcaacatgacctatcactgatcactggggaactgatcatttgttgtttcttgtcttttaaacctaagccactgcaatagtttctgaaattcctgttctggggatgctaccagatttctgcttcaatatcatttccatgccatttgttttcatatacatctaaaatggcctttgattgtttattgcaccaagttcaagcttcgcaaactggcattttgaagtctcattttatccagccaactttaccttccactgttcctcacacattccctttgtcctcatttcttctctccaaaccaccatttccagtctgtccttaggccaaggcccggggttcctttaatttcttgttcaagtcaacatgaagttcctttgacttcttcacacagcagtgagtttttctcttttctaaatttctggtcagttcctacaatctcactttaatgtggttttactttttttctccaggtgtttaatgtgtgtttttggtcttctccccaagcaatggaaacagagttgctgcttcagtggtagtagtacttgcaattcaagtaacactaacttaaaat

SEQ ID NO: 724411 - DNA, 1431 bp, Homo sapiens
tctctaatctcattgggtcaaactttaacacatttttatctcttttgactgggaggaagcacgtattaraaacagcacactgtctgagaccttgggcaagagtcttggttcctctgtggtataattcctcattctatgtcagaagagacaatataataatctactctcccaaacttgcaaaacagtttccaaagagattgctctctggtgatacaatgatggattgggcaggcctggaaaagatgcttcgtcgaacaacagtgggcaggagctgggtatgcagatgcccctgtccatagaatgatggactgggaagtactggaagtagtggtaggtactaatggcattcaaggaacatttttgtggggagctgagcagcctgttcattcccataaaagggaacccagctgatatgtaaggaagactgacattaccatgcctgagtttcccccttccctttgcagaataattcacacgtatcttttttttttaatactttaagttctgggttacatgtgcagaacgtgcaattttgttacataggtatacacgtgcccttgtggtttgctgcacccatcaacccatcacatacattaggtatttctcctaatgttattcctcccctagtcccccacccactgaccagccccagcatgtgatgttcccctccctgtgtccatgtgttctcattgttcaactcctacttatgagtgagaacatatggtgtttagctttttaatcttgtgatagtttgctgagaatgatggtttccagcttcaaccatgtccctgcaaaggacatgaactcaccttttttttatggctgcatagtattccatggtgtatatgtgccacattttcttaatccagtctgtcactgatggacatttgggttggttccaagtctttgctattgtgaatagtgctgcaataaacatatgtgtgcatgaattaacatatatctttaagggcagccagcatcaatcatatcttttccatgtgcctggcattgtataactattaaatctcatttaattatctcaacaatcctatgatgtagagtaagtactttttaaatctctatattacggaaggtacaatcaaagatttgagtgcatgtcttgctcaagttcacagaactggtaggtgaataaatcaccttgttttaattatgaacccatctgtagtactcccataggcttccgtgtatttttacaaaattgtggagctcttgatttcccatagctgagagaagctaaaggacaagctttaaaataggtcagcaacataatcccattttcatgagaattactaatataagattaacctgattttatcgtctcagccctgtaaccttcaacctgtcccagaccattgtgcctgagaatctgggccttcaaaagagacagaaatgttactcagcactcaacgg

SEQ ID NO: 724412 - DNA, 623 bp, Homo sapiens
taaaaaaaataattagttaagatatccaagtacagtttaagtataaaaagtattataatagaaaattcatataagtggaattgtgcactatatgtgtttctgtgactgccttatttcactcaatgtcctcaagtttcattcatgttcttatatattacagaatctaaaatagtcaaattcatagaatcagagagtgaaatggtggttgctgggggctgggggagggagaaatggggagttcctaattaatgggcgtaaagtttcagttaagcaagacaaataagctctggggatcttctgtacagtattgtacgtagagtcaacagtactatactatatacttaaaaaattgttaacagagtagatttcatgttaagtgttcttaccaaaatgaaatcaaatgaaaaaggatttgaataaacatttacaggtttgcagcttttaatcctcacaataattctatgagatagatgccatgagacaartgaagcacagagggatgcagcactttgcccgaggagtgcagctgtgagcagcggagctggggttcccacttgggctgtctgcttccagagcaccctcgctgaacactcactgtgctagacagcacagccataaatcct

SEQ ID NO: 724413 - DNA, 611 bp, Homo sapiens
acttatttattgatttgaatgtaaataacttattcatttcacctggtaccaaataactccacacaatttctgcacaaatctactttcaaagcgaaaagattcattattatgaagaacattcagagattgccctatgacaggttattgaagaaagatmccagaggagaatttttaaacgttctaagccatagcagaaatctttcaaaagtgaattttatattttatactgataaattttatattctggtatatctgttttatttatttttatttttatttatgtatttatttagttttgtacttcatggttatttttattgacacaacagaacctcaacttccactgcttggttaggcagccattttttaaaaagcagttaagaaataataattaaaagaactaaaataattatgtgcataaaatatgctgtctatgcatttaaatacatgcaggattgtcctcttttgtgatccatttcaaatcccaaatgtctcattttatttatttatttgtttatttatttttattttatgattttttaaaatttttttattttttttctctttatttcttctaaaaacaaaatccaggatacatgtgcagaatgtgc

SEQ ID NO: 724414 - DNA, 611 bp, Homo sapiens
acttatttattgatttgaatgtaaataacttattcatttcacctggtaccaaataactccacacaatttctgcacaaatctactttcaaagcgaaaagattcattattatgaagaacattcagagattgccctatgacaggttattgaagaaagataccagaggagaatttttaaacgttctaagccatagcagaaatctttcaaaagtgaattttatattttatactgataaattttatattctggtatatctgttttatttatttttatttttatttatgtatttatttagttttgtacttcatggttatttttattgacacaacagaacctcaacttccactgcttggttaggcagccattwtttaaaaagcagttaagaaataataattaaaagaactaaaataattatgtgcataaaatatgctgtctatgcatttaaatacatgcaggattgtcctcttttgtgatccatttcaaatcccaaatgtctcattttatttatttatttgtttatttatttttattttatgattttttaaaatttttttattttttttctctttatttcttctaaaaacaaaatccaggatacatgtgcagaatgtgc

SEQ ID NO: 724415 - DNA, 633 bp, Homo sapiens
ccaccatgccctgctaatttttaaaaaatatttttagtagagacagggtttcaccatgttggccaggctggtcttgaactcctgacctcaagcgatccacctgtctcggcctcccaaagtgctgggattacaggtgtgagccactgcgccyggctgaatcagaagagttttgttgggggcgggaaataatcacaaatataaaaccagttcagaaccgtggccatttgaatatccagaggaaacaagaattatcttgaatctggtgtgttatgggggtacaagttattgtaaaaaaataaactaactagaggaaatcagggtgttggagctggctacctccacagggctcagtccctacccctcgcttggcctgcctggttgaggtctctcctgggacctgcatacttgatatcacacagtgcccaatcgccaagagaaaaaggaaagtctgtcctgagctgactccatggctgaggctcctgagaaaagaagggtcaggctacctttgtacgttggatgctgcttctttttggtgagagcaggtgacttgctgggaggagccagtgctgtggggccggggacatcagagaggtcgtctcccccgagttcactgtccgagaccccaggctgatt

SEQ ID NO: 724416 - DNA, 668 bp, Homo sapiens
ctttcagaaacccaggaggaagaaacacatcccagtgcattttatgaagtcagcctgatcctgatactaaacttgacacagacatttcaaataaagaaaatgaaaacacgagtcatgttaagttgattttctttccccatcactaacaggaaggcaggagggcctgagtttgcgggtagggagtgcgggctagcttgctggtagggctacaacatcaaacttgtatgcagttcccaactgcacatggaagaaaatgaagcccaatctggccttcaggttactacaagaccttgaaagaagcctgaggtgggtgaagaaatgtagaaaaattaacttacaaggtaaaacacctgattggctgagtaaacattattgtcaaacactttgagaactctatgatttataaaactagtacttacagragagttatttgcaattatgctatgccagcaatggttgattttactggtcatctgaacaatccacatggtggacattgaaaataaataagataattgagtgataattcaatcaggacacaaatggaaaaaatgatgaaactcctgaatagaaacaaaccaataaagaaacaacagcaatacacagaactccaatgcagaagaagaaagtgaagaacaaaatgaaggcatttcacccctaaactttga

SEQ ID NO: 724417 - DNA, 1637 bp, Homo sapiens
cacaagccccaattagacatcctctcaattgcttttactattgtatataaatcttttgacactaaaagccaaaaaaagactggagattactaagtaaaagaataattggagagaagtccacttttaaacaaagttgtgtacatgatctgcttttaattgaaatattttaagtttcaaaatatttatggcatgtgtaaaaacaaactcagacctaagcatattgaggatgtgtgtttgtgagtgtgtgtatgtgtgtggttgcataattattccatataaaaatgtttattggttataaatcttatataagatcatataaaaggaatactggggttactcaatgctactgttaggatttatttattgatttttatgtatgccttatatttacaaggaccgcattttatgaacctataatctgtaaaatgcaaatgcccttatggatcacaggatagaacatttgaagttgagatatcttgagataactgttatatttaattgacctgaattgtcatatcttattctgaaatgtctgtcccagctcttctcaccaccattctcatggtcacctgttcagaccacaagaacagcttcctaattgactgtataactgaggtgaatctgggaggcaggagagtgcagtggttaaaagaatgggttctggccgagcacggtgactcacgcctgtcatcccagcactttgggaagctgaggcaagtggatcacttgaagtcaggagttcaagaccagcctggccaacatggtgaaaccccgtctgtactaaaactataaaaattagccaggcttggtagtgtgtgcctataatcccagctactactagggaggctgaagcatgaawattgcttgaactcgggaggtagagattgcagtgagctgagatagcaccactgccctccagcctcagtactgagtgagactccttctcaaaaaaaaaaaaaaaaaaaaaagacaggggttctggaatcaaattattgaagtccaatcttattttgtccatttattagatggatggctgtagacaaattacttcacctctgtaaacttcagttttctgtcctgtgaaatgggagtagtactgatcttatagagtctataaaattcagtatgaaatttctactgaattaaggagtaaatgaacttgtgttcaaggagtagaaaggccagtgtctggaacatggtaagtgagcagcagagttaagatctgaaagactggcaggacaagatcatgcaggactctgaaggccttggtatagggtcagactggaggcaaaaagtgcattttctgaattaaggctatggatatgaaaaagtgatgttggggctagtagtataaagaaatagcatttacaagacttgtgatattttttggatgttggggaaggcaaggcagaagcctgaatgactgtgtttctgacttggaggtctggggactggggacatcattctctgagatagggaatataggaagacaagcaggtttgggggaagagacaatgagtgcagtttgggatagaaatgtaaagtgtctgtgagatgttcaattgtagatttatatataaagatggatgtgtagatatgaatcttaacagagggtttgggctagaagtataggtttg

SEQ ID NO: 724418 - DNA, 1281 bp, Homo sapiens
atattaagttatgtaatttaaatacatgtggtttattttaggtcaattatacctcaataaagcagtttaaagaaaaagcaggttattaaacagtaagtaaggtgtcttagtcctttcctgatgctatagcagaaactccttagactgggtaatttataaataatacaaatatttcccacagttctggaggctaggaagcccaagatcaaagtgccagcagactcagtgtctgaggagggcttgcaccttcttgctgcatcttcacatggcagaaggggcaaaagggagaaacactgtgtcctcacatggcagaagatatggaagggccaggcagtttactgaagcctctttttaagggcatccatcccattcacaagggtagagaatttctgacttaatcacttccttaaaggacccacctcttaataccatcaccttagggtttaggttccaacatatgaattctggaggaacatactttcaaaccataktagacagcctatccacaagattttacagtatgttgtttctaaaaacaatgaagttgctatatatgtagtgacatagaaatgtcatgttattttttaaaaaggcaaaatgcagaatggaatgtatcatatggccccattttcgaagcagaatacatgtttttgaacagtatgtaaaaaaatctataaaatatatgccaataattaatagagcatagctggataagcaggcacggaccaggggtgatggagatacaggattatatcaacatctatattataacattctcctggttcgatttttctttaaaaatttacatgagttttgctaccagaaaaatgagatattttagaaatataaagaatgtattgttcaaaataatcttttaaatgatgaaaataatacttttgatttaaaaatatttaaatatatcgttgaatttaaaaaccatagtatcaaataatattcacatatatatgtgtgaaaatttatgaaggataaaaaccacaaatatttacagtaggcatctctggtgtgttatactgtcttccttatatatcttgtatttttgcatttttatattttctatgagcatatataattattttacagagaaatattgacaataaagacattataatcctattgtatctgattctctcagttctttttccattcttctgtattataagtaatggaagcccatagactacttcgcccagactcccttgctaccttgatatctgttagattatgtaaatgggagaaactggtaggagattgggaaggtgg

SEQ ID NO: 724419 - DNA, 987 bp, Homo sapiens
tacctctagcctaatgcctatattaccaataggagcatccgtgccattcaacctataatgcttagacattgtgaagaaaaattgacaaggatgacaatttttatctgaaaagaaacatacattaaaatctgggcttgtttttgttttcacttgcttaacatttttgttcatcgtttatagcacatcgtcagcaatgaggaatgatggtaatgaatctctttttttccttgctcttgctttttaaccctttttagtctcatctatctatttctgtttttaattgtggaagggaaagttacaaaaatgctgctttaaaattattagaaaggagacatgacagatcattttttaatgttttgcattttctcaaagtattagcagaactcaaaaatggttgttttgtgataaatagccatcatctactttggtaaagtggcatgcaaaattgctcctgtgaatgccagacatagtcctgactcagggactttgcaattgctattccttctgcctgagcacctttcccatagatatttatctttctggctttctcacctccttcaagtctttactcaaatgacatatcttagtcaagtcttccctaattaccccgttttacattgcaatctgccctagcatgccctactctctttttcgactttatttttcccataaaatcattgaattttaagatcctgtataatttacttataagctggaggcgggagacctgagtgattgaaaggtggactctagagccaacctgcttgggatcaagttctagttctgcctcttattacttctcaaatcttgggcarattacaaaatattgtctataaaatcggaatgatagtagtaactatgtcatcaggtgattatggggattaaatcaatgcctggcacataaaaaaagaagtactatatgtgttagtaattatacaattatttctggccattggaacatatattctgtgcaggtggtagattttg

SEQ ID NO: 724420 - DNA, 1543 bp, Homo sapiens
ttatttttgtattttagtagagatggggtttcaccatgttggccaggctggtcttgaactcctggcctcaagtgatccatccactcagcctcccaaagtgctgggattacaggcatgagccactgcgcctggcttatcctctcatttctattggccctgagcaagtttgacawctgaactaaacttctttatgtaatgtttgttttgttttgttttgttttttcctctgattgtaaaagtggtatatgtccattatagaaaatttagaaaatgcaagtgtatataaagaagccactcaaatgaaccaaatttcttagtgtttgatctggactcagattcaaggctcatttggctcttaataaaattcagagttgtttttgtgagggactacaaggataaacctttggattctagtgtaatttaagatattttactggtggggcacggtggcctatgcctgtagtcccagcactttgggaggccaaggtaggcagatcacttgaggtcaggagtttgagaccagcctgaccaacatggtgaaaccccgtttctactaaaaatacaaaattagcctggtgtggcggtgcatgcctgtaatcccagctacttcagaggctgaggcaggagaatcacttgaacctgggaggcggaggttgcagtgagccgagatggcgccactgcactccagcctgggcaacatgagagaaactccatcttaaaaaaaaagatattttaccataagtcattttaaagaagtcaagttagaaaagaatttttttatctgctcctaagtgttatgggtgaatatccagagaaatgttgaatggggaaaaagtaagcctatgacattcttcaatgctttctattgtatagcaaactggattcttgccttctctgagctttcaaagctatggtttaaaaagacaactagaaatgtgatttcctactcctcattgtttttccatttttcttcctatttataaaggattaaaatgttatacctaaaaaaaagaaaattgcaaaaatcaggttatatctataccatttttggatatttgcagtatttaatatttccatcttatctgaatatgattcaaagaacaaattacttccacatatatttctttcttcctataatggccatcagacactttaaatctatttaaaagttattttcatgtattggctgcatatgaacatgtaatggaaaaagatcaaaccatttaattttccatgttcttaaatcaatcatattgaattgacattgtgtgttcagaatgtccccaatcatatgtaaaaaagaaataggtagacattaacctaattttcttctttctctttcacttggtttcaaagtcaaattagaggggagttgattacatattacacagcactacttcccatgttatctgtgagccaaaatttcataaggcaattagtattctcaaatttacaatccacaacttcagaggcattaactgctcaggtaattatttatttatgtaatatttacttacttgcttatcacttcatccgagaacct

SEQ ID NO: 724421 - DNA, 2247 bp, Homo sapiens
tgctcacctcctcccaacttygcattcaaagaaatcatattcataagccaaaattggtcatagaggaaatattcaacaccactaaattaagcaaactaaaaatacagcagtttttctcagtgaactggttgttaaatacatactaaatcaccactaggtggtataggccctcataaatcgcaaaataaaaatgggactgcttagtttctattttgttactttctttatttctgaagagaatgagctcaaattttaacagcagagaaaaaaatatagttatgagagaatcagactttcaagtatgtggggctattttaaggaaggacatagatgttctaaatttatcctagccaagaaaaaaaatgtgcttggttggctacaaatgaaaatcaataaaatcctcccataggattattgatcagtctaaaccaagtgtcaatttttttttttttgtaaagggtcatattgtaaaaatgttggtctttatcagcctgtttctgtctcaactaacaaactctgctgcattagtgtaaaagtaaccataggcaaagaatgtaaatgtaaatgaataaatataattgtgttctaataaaattttatttgtatatcaaaatttaaattttagcatgtcatgataagttattctttgggtttttttcaatgagtaaaaaatgtataatctacatttagtttgcttgctctactaagtgagttgggggccagattcagcttgaggagggtggctagctaactcttagtgtaaacaatatatattatttagtattcctttgaagtgatcaacttggttataatcatggtaagctggcaagtgagttgtaagataaggactatgttacttaagttctccagagaaacagaaccataaatgagatagatagctgagatagatagctaaggtagatgtagacatagaggtagagatggagatagagatagatgagataaagatacagatgatagagatagatatagatgacacagagatacatatactgatacagatgagatagatagagatagagacagagatagctagaagaagataattcttgggaggaattggctcacaaggatgtcgaggctgagaagttccacaatctcctgcctgcacgatggaggcccaggaaagttagtgatatagttcaacctaagcccaaaagtctgagaaccaggtgttccaatatcggaggacaatagaagatggatgtcccagctcaagaagacagattaaattcacccttcctctgcctttttgttttatttgggctctgaatagattgaaggatgcccatagatactagtgaggatgatcttcttcacccagtctacctattcaaatactaatttctctggaaacacagacacactcagaaataatgtttcatcagccatgtgggcaacccttagcccagtaaaactgacacatgaaattactcatcacagggaggtctgggacaattcacgtctttgttaatttaaatagacacatgaagaaattatttttcctctatcttttttccttcttctttctctttctttctttctctctttctctttctttttgtttttaactaaaggacattttgtaagcacatgaaaccagggaattgcagtagccatatggctactatgagatgagaaaaaggaacgtttttgcatcctgcagatctgccccatctatggtctttgtgttaactgagacgacaaatacgttactgtctaagcttcctttagtaacgtcttccactacctttatgttaaaacattttaaaagataaaattaaaaatataaaatgttgtccttttagagtggaataaagttggcttccataagctccgatgtgaattttacactgattctggccaaatttttcagacaattttagaaaattgcctaaaaatactctgtaaatctagtgttaattattagacattatttttttcaaatgttattaatattatagtgttagatgaagaaagtataatcactagggatgagtttaatttccttaagacagacagatatcaggatcctctaataatacattaaaggcccactaaagtcagaggtatgtatttggtaatgtacctcactatattcttgtggacaagaaggagcaatatggattaggtaatggaataatttggtaaattatttaatggttaatagttacatattactaacaaataaaatggttttaacctgaaaaattcatttttgtttat

SEQ ID NO: 724422 - DNA, 2247 bp, Homo sapiens
tgctcacctcctcccaactttgcattcaaagaaatcatattcataagccaaaattggycatagaggaaatattcaacaccactaaattaagcaaactaaaaatacagcagtttttctcagtgaactggttgttaaatacatactaaatcaccactaggtggtataggccctcataaatcgcaaaataaaaatgggactgcttagtttctattttgttactttctttatttctgaagagaatgagctcaaattttaacagcagagaaaaaaatatagttatgagagaatcagactttcaagtatgtggggctattttaaggaaggacatagatgttctaaatttatcctagccaagaaaaaaaatgtgcttggttggctacaaatgaaaatcaataaaatcctcccataggattattgatcagtctaaaccaagtgtcaatttttttttttttgtaaagggtcatattgtaaaaatgttggtctttatcagcctgtttctgtctcaactaacaaactctgctgcattagtgtaaaagtaaccataggcaaagaatgtaaatgtaaatgaataaatataattgtgttctaataaaattttatttgtatatcaaaatttaaattttagcatgtcatgataagttattctttgggtttttttcaatgagtaaaaaatgtataatctacatttagtttgcttgctctactaagtgagttgggggccagattcagcttgaggagggtggctagctaactcttagtgtaaacaatatatattatttagtattcctttgaagtgatcaacttggttataatcatggtaagctggcaagtgagttgtaagataaggactatgttacttaagttctccagagaaacagaaccataaatgagatagatagctgagatagatagctaaggtagatgtagacatagaggtagagatggagatagagatagatgagataaagatacagatgatagagatagatatagatgacacagagatacatatactgatacagatgagatagatagagatagagacagagatagctagaagaagataattcttgggaggaattggctcacaaggatgtcgaggctgagaagttccacaatctcctgcctgcacgatggaggcccaggaaagttagtgatatagttcaacctaagcccaaaagtctgagaaccaggtgttccaatatcggaggacaatagaagatggatgtcccagctcaagaagacagattaaattcacccttcctctgcctttttgttttatttgggctctgaatagattgaaggatgcccatagatactagtgaggatgatcttcttcacccagtctacctattcaaatactaatttctctggaaacacagacacactcagaaataatgtttcatcagccatgtgggcaacccttagcccagtaaaactgacacatgaaattactcatcacagggaggtctgggacaattcacgtctttgttaatttaaatagacacatgaagaaattatttttcctctatcttttttccttcttctttctctttctttctttctctctttctctttctttttgtttttaactaaaggacattttgtaagcacatgaaaccagggaattgcagtagccatatggctactatgagatgagaaaaaggaacgtttttgcatcctgcagatctgccccatctatggtctttgtgttaactgagacgacaaatacgttactgtctaagcttcctttagtaacgtcttccactacctttatgttaaaacattttaaaagataaaattaaaaatataaaatgttgtccttttagagtggaataaagttggcttccataagctccgatgtgaattttacactgattctggccaaatttttcagacaattttagaaaattgcctaaaaatactctgtaaatctagtgttaattattagacattatttttttcaaatgttattaatattatagtgttagatgaagaaagtataatcactagggatgagtttaatttccttaagacagacagatatcaggatcctctaataatacattaaaggcccactaaagtcagaggtatgtatttggtaatgtacctcactatattcttgtggacaagaaggagcaatatggattaggtaatggaataatttggtaaattatttaatggttaatagttacatattactaacaaataaaatggttttaacctgaaaaattcatttttgtttat

SEQ ID NO: 724423 - DNA, 2247 bp, Homo sapiens
tgctcacctcctcccaactttgcattcaaagaaatcatattcataagccaaaattggtcatagaggaaatattyaacaccactaaattaagcaaactaaaaatacagcagtttttctcagtgaactggttgttaaatacatactaaatcaccactaggtggtataggccctcataaatcgcaaaataaaaatgggactgcttagtttctattttgttactttctttatttctgaagagaatgagctcaaattttaacagcagagaaaaaaatatagttatgagagaatcagactttcaagtatgtggggctattttaaggaaggacatagatgttctaaatttatcctagccaagaaaaaaaatgtgcttggttggctacaaatgaaaatcaataaaatcctcccataggattattgatcagtctaaaccaagtgtcaatttttttttttttgtaaagggtcatattgtaaaaatgttggtctttatcagcctgtttctgtctcaactaacaaactctgctgcattagtgtaaaagtaaccataggcaaagaatgtaaatgtaaatgaataaatataattgtgttctaataaaattttatttgtatatcaaaatttaaattttagcatgtcatgataagttattctttgggtttttttcaatgagtaaaaaatgtataatctacatttagtttgcttgctctactaagtgagttgggggccagattcagcttgaggagggtggctagctaactcttagtgtaaacaatatatattatttagtattcctttgaagtgatcaacttggttataatcatggtaagctggcaagtgagttgtaagataaggactatgttacttaagttctccagagaaacagaaccataaatgagatagatagctgagatagatagctaaggtagatgtagacatagaggtagagatggagatagagatagatgagataaagatacagatgatagagatagatatagatgacacagagatacatatactgatacagatgagatagatagagatagagacagagatagctagaagaagataattcttgggaggaattggctcacaaggatgtcgaggctgagaagttccacaatctcctgcctgcacgatggaggcccaggaaagttagtgatatagttcaacctaagcccaaaagtctgagaaccaggtgttccaatatcggaggacaatagaagatggatgtcccagctcaagaagacagattaaattcacccttcctctgcctttttgttttatttgggctctgaatagattgaaggatgcccatagatactagtgaggatgatcttcttcacccagtctacctattcaaatactaatttctctggaaacacagacacactcagaaataatgtttcatcagccatgtgggcaacccttagcccagtaaaactgacacatgaaattactcatcacagggaggtctgggacaattcacgtctttgttaatttaaatagacacatgaagaaattatttttcctctatcttttttccttcttctttctctttctttctttctctctttctctttctttttgtttttaactaaaggacattttgtaagcacatgaaaccagggaattgcagtagccatatggctactatgagatgagaaaaaggaacgtttttgcatcctgcagatctgccccatctatggtctttgtgttaactgagacgacaaatacgttactgtctaagcttcctttagtaacgtcttccactacctttatgttaaaacattttaaaagataaaattaaaaatataaaatgttgtccttttagagtggaataaagttggcttccataagctccgatgtgaattttacactgattctggccaaatttttcagacaattttagaaaattgcctaaaaatactctgtaaatctagtgttaattattagacattatttttttcaaatgttattaatattatagtgttagatgaagaaagtataatcactagggatgagtttaatttccttaagacagacagatatcaggatcctctaataatacattaaaggcccactaaagtcagaggtatgtatttggtaatgtacctcactatattcttgtggacaagaaggagcaatatggattaggtaatggaataatttggtaaattatttaatggttaatagttacatattactaacaaataaaatggttttaacctgaaaaattcatttttgtttat

SEQ ID NO: 724424 - DNA, 2247 bp, Homo sapiens
tgctcacctcctcccaactttgcattcaaagaaatcatattcataagccaaaattggtcatagaggaaatattcaacaccactaaattaagcaaactaaaaatacagcagtttttctcagtgaactggttgttaaatacatactaaatcaccactaggtggtataggccctcataaatcgcaaaataaaaatgggactgcttagtttctattttgttactttctttatttctgaagagaatgagctcaaattttaacagcagagaaaaaaatatagttatgagagaatcagactttcaagtatgtggggctattttaaggaaggacatagatgttctaaatttatcctagccaagaaaaaaaatgtgcttggttggctacaaatgaaaatcaataaaatcctcccataggattattgatcagtctaaaccaagtgtcaatttttttttttttgtaaagggtcatattgtaaaaatgttggtctttatcagcctgtttctgtctcaactaacaaactctgctgcattagtgtaaaagtaaccataggcaaagaatgtaaatgtaaatgaataaatataattgtgttctaataaaattttatttgtatatcaaaatttaaattttagcatgtcatgataagttattctttgggtttttttcaatgagtaaaaaatgtataatctacatttagtttgcttgctctactaagtgagttgggggccagattcagcttgaggagggtggctmgctaactcttagtgtaaacaatatatattatttagtattcctttgaagtgatcaacttggttataatcatggtaagctggcaagtgagttgtaagataaggactatgttacttaagttctccagagaaacagaaccataaatgagatagatagctgagatagatagctaaggtagatgtagacatagaggtagagatggagatagagatagatgagataaagatacagatgatagagatagatatagatgacacagagatacatatactgatacagatgagatagatagagatagagacagagatagctagaagaagataattcttgggaggaattggctcacaaggatgtcgaggctgagaagttccacaatctcctgcctgcacgatggaggcccaggaaagttagtgatatagttcaacctaagcccaaaagtctgagaaccaggtgttccaatatcggaggacaatagaagatggatgtcccagctcaagaagacagattaaattcacccttcctctgcctttttgttttatttgggctctgaatagattgaaggatgcccatagatactagtgaggatgatcttcttcacccagtctacctattcaaatactaatttctctggaaacacagacacactcagaaataatgtttcatcagccatgtgggcaacccttagcccagtaaaactgacacatgaaattactcatcacagggaggtctgggacaattcacgtctttgttaatttaaatagacacatgaagaaattatttttcctctatcttttttccttcttctttctctttctttctttctctctttctctttctttttgtttttaactaaaggacattttgtaagcacatgaaaccagggaattgcagtagccatatggctactatgagatgagaaaaaggaacgtttttgcatcctgcagatctgccccatctatggtctttgtgttaactgagacgacaaatacgttactgtctaagcttcctttagtaacgtcttccactacctttatgttaaaacattttaaaagataaaattaaaaatataaaatgttgtccttttagagtggaataaagttggcttccataagctccgatgtgaattttacactgattctggccaaatttttcagacaattttagaaaattgcctaaaaatactctgtaaatctagtgttaattattagacattatttttttcaaatgttattaatattatagtgttagatgaagaaagtataatcactagggatgagtttaatttccttaagacagacagatatcaggatcctctaataatacattaaaggcccactaaagtcagaggtatgtatttggtaatgtacctcactatattcttgtggacaagaaggagcaatatggattaggtaatggaataatttggtaaattatttaatggttaatagttacatattactaacaaataaaatggttttaacctgaaaaattcatttttgtttat

SEQ ID NO: 724425 - DNA, 2247 bp, Homo sapiens
tgctcacctcctcccaactttgcattcaaagaaatcatattcataagccaaaattggtcatagaggaaatattcaacaccactaaattaagcaaactaaaaatacagcagtttttctcagtgaactggttgttaaatacatactaaatcaccactaggtggtataggccctcataaatcgcaaaataaaaatgggactgcttagtttctattttgttactttctttatttctgaagagaatgagctcaaattttaacagcagagaaaaaaatatagttatgagagaatcagactttcaagtatgtggggctattttaaggaaggacatagatgttctaaatttatcctagccaagaaaaaaaatgtgcttggttggctacaaatgaaaatcaataaaatcctcccataggattattgatcagtctaaaccaagtgtcaatttttttttttttgtaaagggtcatattgtaaaaatgttggtctttatcagcctgtttctgtctcaactaacaaactctgctgcattagtgtaaaagtaaccataggcaaagaatgtaaatgtaaatgaataaatataattgtgttctaataaaattttatttgtatatcaaaatttaaattttagcatgtcatgataagttattctttgggtttttttcaatgagtaaaaaatgtataatctacatttagtttgcttgctctactaagtgagttgggggccagattcagcttgaggagggtggctagctaactcttagtgtaaacaatatatattatttagtattcctttgaagtgatcaacttggttataatcatggtaasctggcaagtgagttgtaagataaggactatgttacttaagttctccagagaaacagaaccataaatgagatagatagctgagatagatagctaaggtagatgtagacatagaggtagagatggagatagagatagatgagataaagatacagatgatagagatagatatagatgacacagagatacatatactgatacagatgagatagatagagatagagacagagatagctagaagaagataattcttgggaggaattggctcacaaggatgtcgaggctgagaagttccacaatctcctgcctgcacgatggaggcccaggaaagttagtgatatagttcaacctaagcccaaaagtctgagaaccaggtgttccaatatcggaggacaatagaagatggatgtcccagctcaagaagacagattaaattcacccttcctctgcctttttgttttatttgggctctgaatagattgaaggatgcccatagatactagtgaggatgatcttcttcacccagtctacctattcaaatactaatttctctggaaacacagacacactcagaaataatgtttcatcagccatgtgggcaacccttagcccagtaaaactgacacatgaaattactcatcacagggaggtctgggacaattcacgtctttgttaatttaaatagacacatgaagaaattatttttcctctatcttttttccttcttctttctctttctttctttctctctttctctttctttttgtttttaactaaaggacattttgtaagcacatgaaaccagggaattgcagtagccatatggctactatgagatgagaaaaaggaacgtttttgcatcctgcagatctgccccatctatggtctttgtgttaactgagacgacaaatacgttactgtctaagcttcctttagtaacgtcttccactacctttatgttaaaacattttaaaagataaaattaaaaatataaaatgttgtccttttagagtggaataaagttggcttccataagctccgatgtgaattttacactgattctggccaaatttttcagacaattttagaaaattgcctaaaaatactctgtaaatctagtgttaattattagacattatttttttcaaatgttattaatattatagtgttagatgaagaaagtataatcactagggatgagtttaatttccttaagacagacagatatcaggatcctctaataatacattaaaggcccactaaagtcagaggtatgtatttggtaatgtacctcactatattcttgtggacaagaaggagcaatatggattaggtaatggaataatttggtaaattatttaatggttaatagttacatattactaacaaataaaatggttttaacctgaaaaattcatttttgtttat

SEQ ID NO: 724426 - DNA, 2224 bp, Homo sapiens
tttagattggaatttttctctaacttacattcatgaatacagtcactgttactacctttattaccttctaacctttcttggtgatacagaaaaaacaatttgggctttttatatagtcctaaagccattatgtatatgctacttcagcttccaatgtctaagagatgacttagtttgagatatggatgtcttaatctgccatgatttaaatagtagcaactggaataacccacagaaggataacatctgttattaggcttattttttcccccaccatcagaagatttattttatttctaattaaacaacatacagttgactttggcaaactcaggtttaaaactaagcatgccaataataaatgaatcatttctccaagtacatagtgtttcccttgggaaggactgttattttacaacatttttttctctaatttagaaaaaaagataacatttaaaatattacaatgcctaaacagtgataccagtaatctagtttttatactgatgtttgtatttcaacgtttattatcaccaagactaacttaaacccaactcctttagtgaagagatttctttccctatttcagtactagactcatagttctgaatgtcactgagcaagtaatggatatgagttattgattaattatgaatgaagagtttttatactatctcctttataattagctagttcatagacttaagaaaacaaaacaatgaacaaaaacaaaaccctggttcttaccctctaaatgcttacatttccctctcacttaccagaaaatatgagaataaaaatgaccatgtatagagttgcaccactgaatctatttgaatggttctgtttttgtatttttttacttatttaatttgaaaaaaattagaaaagtattagtttgaaatcagagcagctaacacactgggggcaacaaattaaaaaattcaaatggctaaaaataaaaacacgaagtatctttccttctagatagaaaagattgttttctttctagaaagccaaaaataaggcaactaatgatttgagaataaaatcaaacataactggtattcaccacagcaatgtctaaataaatgacccacataacacaaaacttcctcattcacaatcacatatagttaagttgcttttccctcagytacataatagttgtcttcaaacaatctccttttagaaaactatcacattagttaaacctatctattctaactatgaagttattaatttcatttatataggccacacaggtttaattggcacactttacttaaaaataagacaaaataagtcactctgctttaaaaaaaattatggtcatctgttttcaaagaataatcccagatacttaattcattaaagcaaattttctaccatcagcagtgagctttttaaatgattactaactgttcacgtgaagattatcaatgctatatgaagtgtaaatttgttttgcagatttgtgtccattttataacaagatacaatttgcactgaagagtttttaaaaagataacctacacacatacacttaatttgcctcaaacaacttctttgaaatacagtataaacatttaagaaccatgacaaagttgtggttcaaacttcaacaaagattttcttgaaacccagtacaaagattactggctcaagaccataccccaaagtgacatcagcaggagatttgattgtaagactctaccttttaaaaaaagagcacacttggttatacatggcttttaaacttgagctacagttatgctacaaatccccccaccctcccaatctaaagtcagtcgtgtagagatatgtacattctctgagcattgtttaagagtccttggttttccagctttgatggagatctagaaggcgttcagaagtctgtgtgcttacattcagagcaagatgaacttaacaaattccactttcctccattagtgacaggccacagatcccaaagtatgcatgcaaagcacctggattactggccacttggcaaatccccctacaaggcgatcttgagttgataagatgtaatttctatttttctcaaagttagtgtattggaaaatttttagaagctttagagttgctcccacccaaaaagaataaccggtgtctacaggcttattaggtcttccacgataactattttattgcctcatacaccacctctttatcctgttcaattctttttctgaaaaaa

SEQ ID NO: 724427 - DNA, 1798 bp, Homo sapiens
aaattcgtccctggttcagttcatcttggcatcagtacacgggtgggattcagagacatgtaggtgtggaataccagattccaccaaacttaaaaagctggcatactaagttgataaaacgatgtagagtgtgaagttgagttgagaatgcttatgccatacagtttatgtatcttataatagccttaatcacacttccagtaattttccccatcattgggtgctaaaaaataaaattaaagaattagaataaaaaatatatatacctctttgagtggaagaatgctgtcagcacattttgttattttattccattgtataaagtctccgtagtgctctcttcataaatgtattgaaggtttggctaaattgtatcaaatttgtgattaaatacaaatgtgaatagtataaaacattacaaagggcaatctgaatactatgctataccaattttacaattttacagtgacttacagatgccataaatatttactttaagggagtaaaataagttataaagtcatatttaagaacacctaaatccttgaataaatttaaaatggtattattatttacgtatgaagtcagctgactattgaaagcttatttttcaataacagaaatatatgcattatctaaaacacatattccaatattttcaagaaacaaaatactgaattaaattatctgtatttaaatgtttattttgcttataaaggtccatgaaaatgcttaaaattggtttatttgatctaaaaagttaatatgcaatttttatttttaatgtatcatttttcccatgtattgttttctaaataacactttcatcctaagtagatcactgaagaaacaaaatgctgttttctttatgaactcgtaatacatttcactaataattaggatgctgttcaaggtgttgaagtgtacaatataacaaattgcatttgcagttgaatagtagcagagtagaagctgaaaaaataaatcatgtataaaagtagcttaaaacagatgatagcagagcaaagagtttcctgccaacgccctctaaaaatcggtccttttaggcttttgtgctggtattaggtttcagttatagacaagacatatatatatgtgacctttcctttccttttctataccctggagtcaaagtctcctataaaaggacatttgcagcaagtattttcagctggagtaggaggaaagggcaggagtaggagagcagtatgatcacctcttgccaatgcaatttcacttgatttgcaactggtgtttagtaaagaattttgctatgcaaaaatagtgtcttaattggattattgtaagacaaagtatgcatttttcatgtcgtattagtattttattaataaggctagggaaacccactaaatccctatactaaagtgaatttgattctcccatagaaacttaaatcctcagtgtgacacaactcagtccttctactgcagcagctcttttataaaagcctcccaaagctccaagaaggaacaaagaatgtgacccagtaagctcacaccataaatctatattgcagaaacctttgttcaagaaaacggcagatgctctgttgaatccactggagattgtyctgatactaaggacaagtatgtaagttaatgattttatttatcttaacattttaaaatgttttcctttggggaattccaatttatatatcaatattcaggtaatatttgctgaaaacacaaacagagtcaaaatgatctgcattcacattctcattttctattataacatagagacaactacttta

SEQ ID NO: 724428 - DNA, 2800 bp, Homo sapiens
tgctgtggcagggggcagatacacaatatagaggggtcaatggattaagaaaaataaaaggtcagcagccatatgcttgaaagaaattagctcaggaaaactaatttgcttgagttgggagaagcaagggagattcagagagaaccacaaagaggaaacattgagcatctattctgtaccatcccttattgacattgcatttcattctcataattctaggagatagacatgctatctgtatttcacaaaagaraaaacggaaattcagaaaggccaagtgagttgccaaatgttacacagcttgtaggtgttgttagcacaattcaacaccaactctgtttagccttgaatgccatacatactctttctaaaatcaccctgcttccaaaaacggatagaaaaagaaaatggaccatgaagaaatcatggattctaggatatcaatttttgtaaagtaataaaagtggcatttgttcaaagttaaacaagagttctgtagaatcatattaggctggtgcaccaactttacctatgaccacttttccttaagaaccacaggtagcaggattgttcagactatgcaactggcaaactgagaaaagatttaagtcaaacttactcaggtatccagaaatgggattattttaattctatgggaaagttcatttcaagaatggtcatggtctgaggaaaagaggaaaaatagaaagtagaacatgtatttatggtttatacctcctgaggatattgtggtagaaaacaatttaaatgcctgtaaactttggcaggtgatactgactttatctgaaatctcctctatcacctttttcatctccttgaagaactcctatggatccttaaaagctaagctcagacgttacctgctcaatgcttcagagttaatcagcctgttccttatcatcatttctgtatttctctcttattttgaggctcctgttggctcatgtactacagctctagcattcttcactgttgacatagatggattctactgacctcctactgcaagtgatggtgatgactagtgatgtcatcactatcatggatagctcataatctcttctctagaagtgttacatcaccctgtgtctctcatgcccagaaggaaagcccattcagtctccaatctgtgcaacacctctctctaaccacagcccctgatcctttcagctttcttacttttaatcccattctttcacgtgaatgagctgtccaagtcatttgcttagacgctgtcaattgcttagaccctgtgtcttatctctctcactactcttttgtcaatattcttaactatcatccagtttttgagttcattgcacctgcccagaaaagtcataaccttggatcaatcaagctactcaccttctcactgccatacttgaattgctgagtgccaggaaaaaaaggtaacatacccatgcagattattgacagtatgaagtcattcttttaaactttagcttgaccatgtagctatgcagcagtccttctctgagactcaagtcagcccaatcctattactctacagtagctcttacagatccttaccattttttagaagccacctacctaccaccctctccattattcttggatgccacagctctcacctaccgcatagaggcttcttgactgcaccctgccccttccctcatgcctttagaaacactgcatagcagtgacccctgggtgaagcccctgtcacctatgtaagatcaggaggcaaaaccttcaactgatgacttggaggataagaaggaatgagaatatgttaaactcaaagtcattggacaggatagcagcgagattcacttcaaagtgaaaatgacaacacatctcaagaaactcaaagaatcatactgtcaaaggcagggagttccaatgaattcactcagatttgtctttgaagatcagagaattgctgctactcatactataaaagaactgggaatggagtaagaagatgtgattgaagtttatcatgagcaaatgaggtcattcagtagtttaggtattcttttatttgtttttcttttccctcaatcatttttttatttttaaaatagttcttttgtaatgtggtgctcaaaatggaattgaaaactggcactccatctctttaaaacatctggtaatttgaattctagtgctcattattcattatcatttgctttcattgtgctgatttttggtgatcaagcctcagttcccttcgtattgccctctcctttttaaaaattacatgtgtgcacagagagaccaccttttttaggactatgcattttcaggcttgtagcaataagtaagatcgaccaaggcaagtgtttgtaaagacttcccaattggccctaaagttctagcatgtgattgcttcactcctggactgtgactttcactgggagatgtaagcttttcagagaactgaactgtggaaaaatgacctttccttaacttgaagatagctttaaaattagagtctagaccaaaagaagaggaatagcatattggagtcaagatgacagataaggtgagagtaatgactaactccaaagatggcttcactgaaaagaatgcattttaagatctaaaaaataaaaatcttgtcagaagattccatcatcctgaatcataaatcagacaatgtgactctcttcctgtcctcaagatccttcaacatagccattggaggagtatgattattttttagttattgaaggattgtaaggtaaaataaaagatgaatggatgaaaatggctagaattttaacattgaata

SEQ ID NO: 724429 - DNA, 2800 bp, Homo sapiens
tgctgtggcagggggcagatacacaatatagaggggtcaatggattaagaaaaataaaaggtcagcagccatatgcttgaaagaaattagctcaggaaaactaatttgcttgagttgggagaagcaagggagattcagagagaaccacaaagaggaaacattgagcatctattctgtaccatcccttattgacattgcatttcattctcataattctaggagatagacatgctatctgtatttcacaaaagagaaaacggaaattcagaaaggccaagtgagttgccaaatgttacacagcttgtaggtgttgttagcacaattcaacaccaactctgtttagccttgaatgccayacatactctttctaaaatcaccctgcttccaaaaacggatagaaaaagaaaatggaccatgaagaaatcatggattctaggatatcaatttttgtaaagtaataaaagtggcatttgttcaaagttaaacaagagttctgtagaatcatattaggctggtgcaccaactttacctatgaccacttttccttaagaaccacaggtagcaggattgttcagactatgcaactggcaaactgagaaaagatttaagtcaaacttactcaggtatccagaaatgggattattttaattctatgggaaagttcatttcaagaatggtcatggtctgaggaaaagaggaaaaatagaaagtagaacatgtatttatggtttatacctcctgaggatattgtggtagaaaacaatttaaatgcctgtaaactttggcaggtgatactgactttatctgaaatctcctctatcacctttttcatctccttgaagaactcctatggatccttaaaagctaagctcagacgttacctgctcaatgcttcagagttaatcagcctgttccttatcatcatttctgtatttctctcttattttgaggctcctgttggctcatgtactacagctctagcattcttcactgttgacatagatggattctactgacctcctactgcaagtgatggtgatgactagtgatgtcatcactatcatggatagctcataatctcttctctagaagtgttacatcaccctgtgtctctcatgcccagaaggaaagcccattcagtctccaatctgtgcaacacctctctctaaccacagcccctgatcctttcagctttcttacttttaatcccattctttcacgtgaatgagctgtccaagtcatttgcttagacgctgtcaattgcttagaccctgtgtcttatctctctcactactcttttgtcaatattcttaactatcatccagtttttgagttcattgcacctgcccagaaaagtcataaccttggatcaatcaagctactcaccttctcactgccatacttgaattgctgagtgccaggaaaaaaaggtaacatacccatgcagattattgacagtatgaagtcattcttttaaactttagcttgaccatgtagctatgcagcagtccttctctgagactcaagtcagcccaatcctattactctacagtagctcttacagatccttaccattttttagaagccacctacctaccaccctctccattattcttggatgccacagctctcacctaccgcatagaggcttcttgactgcaccctgccccttccctcatgcctttagaaacactgcatagcagtgacccctgggtgaagcccctgtcacctatgtaagatcaggaggcaaaaccttcaactgatgacttggaggataagaaggaatgagaatatgttaaactcaaagtcattggacaggatagcagcgagattcacttcaaagtgaaaatgacaacacatctcaagaaactcaaagaatcatactgtcaaaggcagggagttccaatgaattcactcagatttgtctttgaagatcagagaattgctgctactcatactataaaagaactgggaatggagtaagaagatgtgattgaagtttatcatgagcaaatgaggtcattcagtagtttaggtattcttttatttgtttttcttttccctcaatcatttttttatttttaaaatagttcttttgtaatgtggtgctcaaaatggaattgaaaactggcactccatctctttaaaacatctggtaatttgaattctagtgctcattattcattatcatttgctttcattgtgctgatttttggtgatcaagcctcagttcccttcgtattgccctctcctttttaaaaattacatgtgtgcacagagagaccaccttttttaggactatgcattttcaggcttgtagcaataagtaagatcgaccaaggcaagtgtttgtaaagacttcccaattggccctaaagttctagcatgtgattgcttcactcctggactgtgactttcactgggagatgtaagcttttcagagaactgaactgtggaaaaatgacctttccttaacttgaagatagctttaaaattagagtctagaccaaaagaagaggaatagcatattggagtcaagatgacagataaggtgagagtaatgactaactccaaagatggcttcactgaaaagaatgcattttaagatctaaaaaataaaaatcttgtcagaagattccatcatcctgaatcataaatcagacaatgtgactctcttcctgtcctcaagatccttcaacatagccattggaggagtatgattattttttagttattgaaggattgtaaggtaaaataaaagatgaatggatgaaaatggctagaattttaacattgaata

SEQ ID NO: 724430 - DNA, 2800 bp, Homo sapiens
tgctgtggcagggggcagatacacaatatagaggggtcaatggattaagaaaaataaaaggtcagcagccatatgcttgaaagaaattagctcaggaaaactaatttgcttgagttgggagaagcaagggagattcagagagaaccacaaagaggaaacattgagcatctattctgtaccatcccttattgacattgcatttcattctcataattctaggagatagacatgctatctgtatttcacaaaagagaaaacggaaattcagaaaggccaagtgagttgccaaatgttacacagcttgtaggtgttgttagcacaattcaacaccaactctgtttagccttgaatgccatacatactctttctaaaatcaccctgcttccaaaaacggatagaaaaagaaaatggaccatgaagaaatcatgrattctaggatatcaatttttgtaaagtaataaaagtggcatttgttcaaagttaaacaagagttctgtagaatcatattaggctggtgcaccaactttacctatgaccacttttccttaagaaccacaggtagcaggattgttcagactatgcaactggcaaactgagaaaagatttaagtcaaacttactcaggtatccagaaatgggattattttaattctatgggaaagttcatttcaagaatggtcatggtctgaggaaaagaggaaaaatagaaagtagaacatgtatttatggtttatacctcctgaggatattgtggtagaaaacaatttaaatgcctgtaaactttggcaggtgatactgactttatctgaaatctcctctatcacctttttcatctccttgaagaactcctatggatccttaaaagctaagctcagacgttacctgctcaatgcttcagagttaatcagcctgttccttatcatcatttctgtatttctctcttattttgaggctcctgttggctcatgtactacagctctagcattcttcactgttgacatagatggattctactgacctcctactgcaagtgatggtgatgactagtgatgtcatcactatcatggatagctcataatctcttctctagaagtgttacatcaccctgtgtctctcatgcccagaaggaaagcccattcagtctccaatctgtgcaacacctctctctaaccacagcccctgatcctttcagctttcttacttttaatcccattctttcacgtgaatgagctgtccaagtcatttgcttagacgctgtcaattgcttagaccctgtgtcttatctctctcactactcttttgtcaatattcttaactatcatccagtttttgagttcattgcacctgcccagaaaagtcataaccttggatcaatcaagctactcaccttctcactgccatacttgaattgctgagtgccaggaaaaaaaggtaacatacccatgcagattattgacagtatgaagtcattcttttaaactttagcttgaccatgtagctatgcagcagtccttctctgagactcaagtcagcccaatcctattactctacagtagctcttacagatccttaccattttttagaagccacctacctaccaccctctccattattcttggatgccacagctctcacctaccgcatagaggcttcttgactgcaccctgccccttccctcatgcctttagaaacactgcatagcagtgacccctgggtgaagcccctgtcacctatgtaagatcaggaggcaaaaccttcaactgatgacttggaggataagaaggaatgagaatatgttaaactcaaagtcattggacaggatagcagcgagattcacttcaaagtgaaaatgacaacacatctcaagaaactcaaagaatcatactgtcaaaggcagggagttccaatgaattcactcagatttgtctttgaagatcagagaattgctgctactcatactataaaagaactgggaatggagtaagaagatgtgattgaagtttatcatgagcaaatgaggtcattcagtagtttaggtattcttttatttgtttttcttttccctcaatcatttttttatttttaaaatagttcttttgtaatgtggtgctcaaaatggaattgaaaactggcactccatctctttaaaacatctggtaatttgaattctagtgctcattattcattatcatttgctttcattgtgctgatttttggtgatcaagcctcagttcccttcgtattgccctctcctttttaaaaattacatgtgtgcacagagagaccaccttttttaggactatgcattttcaggcttgtagcaataagtaagatcgaccaaggcaagtgtttgtaaagacttcccaattggccctaaagttctagcatgtgattgcttcactcctggactgtgactttcactgggagatgtaagcttttcagagaactgaactgtggaaaaatgacctttccttaacttgaagatagctttaaaattagagtctagaccaaaagaagaggaatagcatattggagtcaagatgacagataaggtgagagtaatgactaactccaaagatggcttcactgaaaagaatgcattttaagatctaaaaaataaaaatcttgtcagaagattccatcatcctgaatcataaatcagacaatgtgactctcttcctgtcctcaagatccttcaacatagccattggaggagtatgattattttttagttattgaaggattgtaaggtaaaataaaagatgaatggatgaaaatggctagaattttaacattgaata

SEQ ID NO: 724431 - DNA, 2079 bp, Homo sapiens
gcacaacagaggtaaaaacagcagcaatagccactccagtttctcccttagggccttgaagaacgacagctacctggagatttctcttcaggtggcacctaaggtggagccgcccagccctgcacatcctagggaactagtcacctaggagacagcatgaaaggggccagcaaattgggtctttaataacctgtgggtatttccacttcacaaaacttagaggccagaggagcaagtgaacataatatctcacatatatctaacactgtgtactttaccaaaggcctctgtgcccaactaaagaaatatttatgaagcatttaacagaagtcaagtaatgtgctggcactttcggatctattactttgttataaatttgatactcaccctgttggctaattattgtcagaactgaatcagagaaattatgagtttgatacaagttcaaatttctcaaaagtggcagcagaattaaatattctggctctattaaatctcctttgttcattgtgttgcctccaagccccttgcccacaggcggcctaagaggtgaacatcgctttagagtaaatgtcattaatagtttgaatctcatactacagcctgaagaaatggtgaggggagctaacattgactaagcacctcgtgtgtgctgagccctttcatatgctacctgccatgggctgaactgtgagccctccatctctgtacgtggacgctctgatgcccagtaactgggaatgtgactgtatttggagatggggcctttaaagaagtaattaagtaaaatgcagccatatgggtgggccctaatccaatatgactggtgtccttataagattaggacatagacaacacacagtccgaggagcagccatgtgaggacacagtgagaaagtggacttatgcaacctgaggagagaggcctcagaagacatcacacctgccaacactttgtttcttgggctcccagcccccagaactatgagaatataaatttctgttgctgaagccacccagtctgtggtattttgttatggtagccctggcaaacgaatatattacstcattttatttttatagtatctctataaaaataggcataatgtccatgttcaagatgattgaccagaagcttagaaaggtaaagtaactttacaaaggtcacagagccaggaaacaggaaagccaaaacctaattctaaattctctttttttacaccctacctggcctctcagaccacactccattctagcccagaaacttcccctgtgccttattccaaaacccctggcatagacattcccctgagaatgtcaacattcccagagagcatcacacaggagcctgtgccgagaatttcgaagactctagactgggcaggctgcttgagtaagatgagatgccatgctaactgcaatatttctagaaaggcaaggaggagacagacttctcagcccttctttgaaccacaggcttttaagttaaggaatttctcacgtctttcttttgaggagagtttaccacattttctgggttcataagactcaactgataattgtgatttttagctggaaaatctcccagatagctctttgcatatctgcttgctacctaatcaacattagtatggctgctgaaaatactcaatttgcaagttacatgatccaaatgtgcaaaataataacgataataactttctttactcttctgtaactcaacttctgttttatgcaccaattctgcctattggcagaaacttgatcacgtcccctgaggtaaaaacactggtcacttcaaatttaaacatgatcatttccatattccgctcccccatcttcctcacccttaggtggcatctacattctaggggtctgcatggcatgatggcctgggacacatgggacctctgcttgttggcagccatccatgctaccctcattcattcatggacacctgtccccaccagcacttgctggaaaatctaagactcttggattttagcccttggtgcatctgggtctctctgtttctgcctcatccaggtttcaaagtatacagcccatcacttggttaac

SEQ ID NO: 724432 - DNA, 2079 bp, Homo sapiens
gcacaacagaggtaaaaacagcagcaatagccactccagtttctcccttagggccttgaagaacgacagctacctggagatttctcttcaggtggcacctaaggtggagccgcccagccctgcacatcctagggaactagtcacctaggagacagcatgaaaggggccagcaaattgggtctttaataacctgtgggtatttccacttcacaaaacttagaggccagaggagcaagtgaacataatatctcacatatatctaacactgtgtactttaccaaaggcctctgtgcccaactaaagaaatatttatgaagcatttaacagaagtcaagtaatgtgctggcactttcggatctattactttgttataaatttgatactcaccctgttggctaattattgtcagaactgaatcagagaaattatgagtttgatacaagttcaaatttctcaaaagtggcagcagaattaaatattctggctctattaaatctcctttgttcattgtgttgcctccaagccccttgcccacaggcggcctaagaggtgaacatcgctttagagtaaatgtcattaatagtttgaatctcatactacagcctgaagaaatggtgaggggagctaacattgactaagcacctcgtgtgtgctgagccctttcatatgctacctgccatgggctgaactgtgagccctccatctctgtacgtggacgctctgatgcccagtaactgggaatgtgactgtatttggagatggggcctttaaagaagtaattaagtaaaatgcagccatatgggtgggccctaatccaatatgactggtgtccttataagattaggacatagacaacacacagtccgaggagcagccatgtgaggacacagtgagaaagtggacttatgcaacctgaggagagaggcctcagaagacatcacacctgccaacactttgtttcttgggctcccagcccccagaactatgagaatataaatttctgttgctgaagccacccagtctgtggtattttgttatggtagccctggcaaacgaatatattacgtcattttatttttatagtatctctataaaaataggcataatgtccatgttcaagatgattgaccagaagcttagaaaggtaaagtaactttacaaaggtcacagagccaggaaacaggaaagccaaaacctaattctaaattctctttttttacaccctacctggcctctcagaccacactccattctagcccagaaacttcccytgtgccttattccaaaacccctggcatagacattcccctgagaatgtcaacattcccagagagcatcacacaggagcctgtgccgagaatttcgaagactctagactgggcaggctgcttgagtaagatgagatgccatgctaactgcaatatttctagaaaggcaaggaggagacagacttctcagcccttctttgaaccacaggcttttaagttaaggaatttctcacgtctttcttttgaggagagtttaccacattttctgggttcataagactcaactgataattgtgatttttagctggaaaatctcccagatagctctttgcatatctgcttgctacctaatcaacattagtatggctgctgaaaatactcaatttgcaagttacatgatccaaatgtgcaaaataataacgataataactttctttactcttctgtaactcaacttctgttttatgcaccaattctgcctattggcagaaacttgatcacgtcccctgaggtaaaaacactggtcacttcaaatttaaacatgatcatttccatattccgctcccccatcttcctcacccttaggtggcatctacattctaggggtctgcatggcatgatggcctgggacacatgggacctctgcttgttggcagccatccatgctaccctcattcattcatggacacctgtccccaccagcacttgctggaaaatctaagactcttggattttagcccttggtgcatctgggtctctctgtttctgcctcatccaggtttcaaagtatacagcccatcacttggttaac

SEQ ID NO: 724433 - DNA, 2079 bp, Homo sapiens
gcacaacagaggtaaaaacagcagcaatagccactccagtttctcccttagggccttgaagaacgacagctacctggagatttctcttcaggtggcacctaaggtggagccgcccagccctgcacatcctagggaactagtcacctaggagacagcatgaaaggggccagcaaattgggtctttaataacctgtgggtatttccacttcacaaaacttagaggccagaggagcaagtgaacataatatctcacatatatctaacactgtgtactttaccaaaggcctctgtgcccaactaaagaaatatttatgaagcatttaacagaagtcaagtaatgtgctggcactttcggatctattactttgttataaatttgatactcaccctgttggctaattattgtcagaactgaatcagagaaattatgagtttgatacaagttcaaatttctcaaaagtggcagcagaattaaatattctggctctattaaatctcctttgttcattgtgttgcctccaagccccttgcccacaggcggcctaagaggtgaacatcgctttagagtaaatgtcattaatagtttgaatctcatactacagcctgaagaaatggtgaggggagctaacattgactaagcacctcgtgtgtgctgagccctttcatatgctacctgccatgggctgaactgtgagccctccatctctgtacgtggacgctctgatgcccagtaactgggaatgtgactgtatttggagatggggcctttaaagaagtaattaagtaaaatgcagccatatgggtgggccctaatccaatatgactggtgtccttataagattaggacatagacaacacacagtccgaggagcagccatgtgaggacacagtgagaaagtggacttatgcaacctgaggagagaggcctcagaagacatcacacctgccaacactttgtttcttgggctcccagcccccagaactatgagaatataaatttctgttgctgaagccacccagtctgtggtattttgttatggtagccctggcaaacgaatatattacgtcattttatttttatagtatctctataaaaataggcataatgtccatgttcaagatgattgaccagaagcttagaaaggtaaagtaactttacaaaggtcacagagccaggaaacaggaaagccaaaacctaattctaaattctctttttttacaccctacctggcctctcagaccacactccattctagcccagaaacttcccctgtgccttattccaaaacccctggcatagacattcccctgagaatgtcaacattcccagagagcatcacacaggagcctgtgccgagaatttcgaagactctagactgggcaggctgcttgagtaagatgagatgccatgctaactgcaatatttctagaaaggcaaggaggagacagacttctcagcccttctttgaaccacaggcttttaagttaaggaatttctcacgtctttcttttgaggagagtttaccacattttctgggttcataagactcaactgataattgtgatttttagctggaaaatctcccagatagctctttgcatatctgcttgctacctaatcaacattagtatggctgctgaaaatactcaatttgcaagttacatgatccaaatgtgcaaaataataacrataataactttctttactcttctgtaactcaacttctgttttatgcaccaattctgcctattggcagaaacttgatcacgtcccctgaggtaaaaacactggtcacttcaaatttaaacatgatcatttccatattccgctcccccatcttcctcacccttaggtggcatctacattctaggggtctgcatggcatgatggcctgggacacatgggacctctgcttgttggcagccatccatgctaccctcattcattcatggacacctgtccccaccagcacttgctggaaaatctaagactcttggattttagcccttggtgcatctgggtctctctgtttctgcctcatccaggtttcaaagtatacagcccatcacttggttaac

SEQ ID NO: 724434 - DNA, 1625 bp, Homo sapiens
ctgcattcaacagaggaaaataagaggaaggggagatgttaggcaagagggaggaatggaagtcagcatcttcccaggtttctgccatgtatcctgcagagctaagaatatggtggttgagactagagtgcgagattaagaagaccctcagcataaatggagtctccccttgttcaaacatgttactgaccttcccttaaacgaaccaaccaaagaacacagcactgagattcacatacacaataagttcagaactgatgttcagaagtataagttaagcattcctaattcgaaaatttgaaatccaaaatgctccaaaatctgaaactttctgagtgctgacatgacactcaaaggaaatgcacattagagcatttcagatttccaatttcctgattagttatactcaaccagtaggtacaatgcaaattattccaaaatcttgaaaaaaaaaataaacaaaatccaaaacacttctggtcccaagcattttatataaggaatatacaacctataataacaattataataaaagctaacgttaactacccactatgtgacagcatgccagctgaggggaacactgaaatgaatcacgcacaattattattatttattattattattatttgagatggagtcttgctctgttgcccaggctggagtgcagtggcgcgatctcagctcactgcagcctccacctccagggttcaagtgattctcctgcctcagcctcttgagtagctgggattacaggcgcccaccaccatgcctggctaatttttgtatttttagtacagatggggttttgccatgttggccaggctggtgtcgaactcctaacttcaggtgatctgccctcctyggcctcccaaagtcctgggattaccagtgtgagccatcgcacgcagccataatgcacgatttttaacaaaaagcccatagccaagtggggtagatagacaaagaaagtttaattcaatagtaagcgtcactgttgacttacagacaaagtgctgctgaattctcatgccttagtggcttcatctatgaaatggggattagaattctaagctatcttgagcagcaccttggagttaactagagaattaaaggagatgtggcctgaggagcagaagaattttctcttctctaggagactacagtgggagttactctgagctatagaaggagaatatctgttgggaagttgctggaggacagagatgtgatgcttacttatctctgcatccccaataataccaacatacgatggatgttcaaacttaagtttattgagtgtaactgaagcaaatagaatatgctgtgtcgcaagaatttctgccaaacaacagctctgccagaggcagcaggaatgcaagctttcatttgcactccaccaaaaaaatgcaactcctgatgtaaaggtggagagttagtaaaaatagaaagtggtaagcagaaatcctcttctcataattcattgtcagggacagagaaaaaatactggcatctcaaagaggggcctttagggagattgatgcctaacagaataatacctcagtgtgccacacaaagccacagaaaagtggtcggtaaccttattcgctgatttttctgagaca

SEQ ID NO: 724435 - DNA, 1625 bp, Homo sapiens
ctgcattcaacagaggaaaataagaggaaggggagatgttaggcaagagggaggaatggaagtcagcatcttcccaggtttctgccatgtatcctgcagagctaagaatatggtggttgagactagagtgcgagattaagaagaccctcagcataaatggagtctccccttgttcaaacatgttactgaccttcccttaaacgaaccaaccaaagaacacagcactgagattcacatacacaataagttcagaactgatgttcagaagtataagttaagcattcctaattcgaaaatttgaaatccaaaatgctccaaaatctgaaactttctgagtgctgacatgacactcaaaggaaatgcacattagagcatttcagatttccaatttcctgattagttatactcaaccagtaggtacaatgcaaattattccaaaatcttgaaaaaaaaaataaacaaaatccaaaacacttctggtcccaagcattttatataaggaatatacaacctataataacaattataataaaagctaacgttaactacccactatgtgacagcatgccagctgaggggaacactgaaatgaatcacgcacaattattattatttattattattattatttgagatggagtcttgctctgttgcccaggctggagtgcagtggcgcgatctcagctcactgcagcctccacctccagggttcaagtgattctcctgcctcagcctcttgagtagctgggattacaggcgcccaccaccatgcctggctaatttttgtatttttagtacagatggggttttgccatgttggccaggctggtgtcgaactcctaacttcaggtgatctgccctcctcggcctcccaaagtcctgggattaccagtgtgagccatcgcacgcagccataatgcacgatttttaacaaaaagcccatagccaagtggggtagatagacaaagaaagtttaattcaatagtaagcgtcactgttgacttacagacaaagtgctgctgaattctcatgccttagtggcttcatctatgaaatggggattasaattctaagctatcttgagcagcaccttggagttaactagagaattaaaggagatgtggcctgaggagcagaagaattttctcttctctaggagactacagtgggagttactctgagctatagaaggagaatatctgttgggaagttgctggaggacagagatgtgatgcttacttatctctgcatccccaataataccaacatacgatggatgttcaaacttaagtttattgagtgtaactgaagcaaatagaatatgctgtgtcgcaagaatttctgccaaacaacagctctgccagaggcagcaggaatgcaagctttcatttgcactccaccaaaaaaatgcaactcctgatgtaaaggtggagagttagtaaaaatagaaagtggtaagcagaaatcctcttctcataattcattgtcagggacagagaaaaaatactggcatctcaaagaggggcctttagggagattgatgcctaacagaataatacctcagtgtgccacacaaagccacagaaaagtggtcggtaaccttattcgctgatttttctgagaca

SEQ ID NO: 724436 - DNA, 2506 bp, Homo sapiens
tatagtcctttaaaaaacctgatgataaacactgtcaaagaaagtcctttagaaaatggctgcaggatgttcttgtttgttttgttttgtttttgatacggagtctcactgtgttgcccaggctagagtgcagtggtgcaatctcggcctcctgagtagctgggattacaggcacccactaccacgcccggctaatctttgtatttttagtagagatggggtttcaccatgttgctcaggctggtcttgaactcttggcctctggtgatccacccgcctaggcctcccaaagtgctgggattacaggtgtgagccaccacgcccggccagtatgttcttgaaaccaaggcatttcagggtattttctgctactcgagaattctggccatcaggctatggaacgttgagcatggttgcacacactcacatgcactcacgcgtacacacactttcatagagttattacttttttaaagtctaatgcctagagtggtctggaatgaatgctgacatactgtgagaaataaagaatgagaccggacccacgagtaaccaaatgagcatttcaccagtcagagtgagtgaccaaaggacagctaagaccgttgcattccaccttcccctctggccaagtttgcttcccaatctaagtttggcttctcggtcttccctgaccttcactatcaaaccaagtcttcacaggagatgaaacacctttctgtgaaacacagtagatgttcaccaggtagatgcagggagagggattgccagccaaagcagcagcaatgaagtcacggggctgggaatggagccacatgttggggagttataattagttcattactctaaaaaatagagttactcaactcaaaaaaaaaataaggatggacagatagaccaagttcacctcaagaggaattcatatgttaggtaggagtttgaaattaaatagctatcaaaggtttcaatcaaggaggtgatacgattccatgatgttgatagaagctcatttgggcagcagtgtggacaatgaccagatggatcagtaatggaggcaaaaacactagacagagctgttgtgatgtaagtgtccaggtcagagggtaagagccaaaatataggatgagaagagagggtggatcacagtcccattggttggtagaactggcaggaagaaagggtttctagtggatatgtcattgtgcgtacacatggtgctgtggcagkcgtctacaaagccggtctcctgggacctgtcctcatctctgaaatgagggccagttttgttatgggtgctcactaattacttgctaactcatttgatctgacattcatccctcatctcaaccattcttcaggagatgcccttacagtcagtaaaatgatgaaacagcgaataatgtaacttcagtgagtctcctaatttttttgaatctccgtttctacatttataaaaggaggctaagcaagaatccttactgatcgcttccagctcaagtactccaagtcagccagttctcaggagagtgagctggcagctgcctcctgggggaatattgttggaattcttgagagatgatcaggctgggggagcatctccccacagctcccctccaaacccagggttaaccaagagacagctacacttaagaactgtatttgtattattcacaggcactgaaacagtcattgttttggcaattccctttagtggaggaaataaaatgagccatattgtggggaaggtggggctgtgtttccaaggtaagcttgctggtagtataaaattgtgtttttatttaaagtgaatttccagttggctgaatttatgctgcctttgatgcctactcagtgctttgaatacaacctgcttgtcctcgctttgttttccccacgccctgagaggggatccctagattgctgattaaaagctattcagcaacagcctgcaagtgctacaccgataacattatctttactgattcatcagggctgccctggtgcaggtgggagactgtggctgagtctctccagacaagtgttgtcagctctggcttgagccttcagaatcttgtggacaaagaaccttaagggaggacagaaagtttccgagggcggtcttgtcccagacttcacccttgcttgaatcaccttcccattttgtacttggctcaccagagcactgctttcccttgtcaattccgtgaagtgagtaggaggctctatggtgaacactgtgtgctcctgctttgaaagagaaagaagtgagaggttctgtacagttctgcagggatttcaaagctaacacttgatgactgtgttaagggaaggcagggctcacatgcaagtgagccctcagggctagaatttcccttgatcgaagtgctggcctgaaaagaccactggactcagaagctttgcttccaacttcatagctccttcatctataaaatcatggagaaacattacttaatctccactacctcttacaggtctgagtctttta

SEQ ID NO: 724437 - DNA, 605 bp, Homo sapiens
tgcaatataacatggctcacaggttccagggattagggggtggacatctttggggggccattagtctacctaccacaagtgatagcccagctttccaccggaggtggatgagcagcactctgaagtgataacttaaggtggattcttgcccaaattctaggcttgtaagttaaatctggttagtgaagtacgagcagaagggtgggaaatcattagtaacgtgtatgaattcactaagaacaagccatactctgctaacctcactttttggttcaattttaatttttttattcaaatataatatacagaaggaacagtgcaatctcmtaagtttatggcttaatgaattgtcactagttgagcacatgtgtaactagcacccttgagcccttcttatgctcttcccagtccctgcctctccaccccacacaaagggaaatcactattctgacttctagtagcattgattagttttctctgattttatgtaaatggatataatctatatgtacacttttgcatctggcttgcttattatgtttgagattcttctgtatttttgtctgtagtcgtagattgttcactttttttttttttttttccca

SEQ ID NO: 724438 - DNA, 605 bp, Homo sapiens
tgcaatataacatggctcacaggttccagggattagggggtggacatctttggggggccattagtctacctaccacaagtgatagcccagctttccaccggaggtggatgagcagcactctgaagtgataacttaaggtggattcttgcccaaattctaggcttgtaagttaaatctggttagtgaagtacgagcagaagggtgggaaatcattagtaacgtgtatgaattcactaagaacaagccatactctgctaacctcactttttggttcaattttaatttttttattcaaatataatatacagaaggaacagtgcaatctcataagtttatggcttaatgaattgtcactagttgagcacatgtgtaactagcacccttgagcccttcytatgctcttcccagtccctgcctctccaccccacacaaagggaaatcactattctgacttctagtagcattgattagttttctctgattttatgtaaatggatataatctatatgtacacttttgcatctggcttgcttattatgtttgagattcttctgtatttttgtctgtagtcgtagattgttcactttttttttttttttttccca

SEQ ID NO: 724439 - DNA, 1170 bp, Homo sapiens
ttattgatttttttctataatggaaatatattcgttttataagcaggagaagaaatgtagagcacatgatccttataaacagtaaacaccattaagcattttgatagagacaagccagcagtttggcaaaataatttccttttcttctgagggaagaaatgtagttcatttcattgatgagctacgttgtccacctcacttggggttaggtgtggctgtgtgattgttgcagtaaatgaacgtgagtggaaatgatgtgggcaccttccagacctggcccagaacacactcctatgcctgatcatctaggcttttcctcttccatggtttgatgcagaagaagttggggaaggatctttagagaactgagcctggatctcttaatcctgggctgaccatgtaatttgttggccaaactggaacacgtaagaataaaaggatgcaactgttcactgggaatattcattttgtactgtgtgtgggcaagataccaacttcggccgggcgtggtggctcacacctgtaatcccagcgctttgggaggccgagacgggcggatcacgaggtcaggagattgagaccatcctgtctaacacggtgaaaccgcatctctactaaaaatacaaaaaattagccgggcgtggtggcgggcgtctgtaggctcagccactcaggaggctgaggcaggagaatggcgtgaacccgtaaggcggagtttgcagtgagccgagatcgtgccactgcatttcagcctgagcgacggagcgagactctgtctcaaaaaaamaaacaaacaaaaaaagaacagaaatcaacttctgttgtgctagtcactgaaattctgaagcttatttgttataatagggttatcttaattcacacatgtacaaacttaagccaacctttttctcatatggaatattgttaaaaaataaagttaatataataatcgtaaaatttaaaaagttgaatacattacaaaatagaaagaagaatcatgtcagccttaatcctaccacccagctgacagttaacagagatgtactttcacccagattgtttctttgtatatttttacatagatgtgactaaaatatatttatttttgaatcatatattttaaattaacataaacattttcctcattttattaaaaatctattagtgaat

SEQ ID NO: 724440 - DNA, 1170 bp, Homo sapiens
ttattgatttttttctataatggaaatatattcgttttataagcaggagaagaaatgtagagcacatgatccttataaacagtaaacaccattaagcattttgatagagacaagccagcagtttggcaaaataatttccttttcttctgagggaagaaatgtagttcatttcattgatgagctacgttgtccacctcacttggggttaggtgtggctgtgtgattgttgcagtaaatgaacgtgagtggaaatgatgtgggcaccttccagacctggcccagaacacactcctatgcctgatcatctaggcttttcctcttccatggtttgatgcagaagaagttggggaaggatctttagagaactgagcctggatctcttaatcctgggctgaccatgtaatttgttggccaaactggaacacgtaagaataaaaggatgcaactgttcactgggaatattcattttgtactgtgtgtgggcaagataccaacttcggccgggcgtggtggctcacacctgtaatcccagcgctttgggaggccgagacgggcggatcacgaggtcaggagattgagaccatcctgtctaacacggtgaaaccgcatctctactaaaaatacaaaaaattagccgggcgtggtggcgggcgtctgtaggctcagccactcaggaggctgaggcaggagaatggcgtgaacccgtaaggcggagtttgcagtgagccgagatcgtgccactgcatttcagcctgagcgacggagcgagactctgtctcaaaaaaacaaacaaacaaaaaaagaacagaaatcaacttctgttgtgctagtcactgaaattctgaagcttatttgttataatagggttatcttaattcacacatgtacaaacttaagccaacctttttctcatatggaatattgttaaaaaataaagttaatataataatcgtaaaatttaaaaagttgaatacattacaaaatagaaagaagaatcatgtcagccttaatcctaccacccagctgacmgttaacagagatgtactttcacccagattgtttctttgtatatttttacatagatgtgactaaaatatatttatttttgaatcatatattttaaattaacataaacattttcctcattttattaaaaatctattagtgaat

SEQ ID NO: 724441 - DNA, 1814 bp, Homo sapiens
aggataaaagcactttctacattgtaggatgttttacatatagtattgtttcttattgattgcttggttgaggcgaaggagggaaattagttttatacccttaatgcgaaaagggcttagagctgctagagcttttgcctttagccagcaatgagtagctgacgtgctctgagaattctcataggacctgacttcctggggaagttccaagtctccaaagtggttcagaatatgctgtgggaaagtcagatttattttatcagcctgctatattacatgagattaattagaaaaaaggttgtgaattctccatggcctatccagtctgtgcatacactcctcaaggttacctgccagcattcccagttaaggttatgtacttgtacaaaatgttaatattatttattaattcttagactgcttcaatatttgctcagctgtctttattccatctgtccatatcagcattctgggtcattgtcagagatttccaagttgcagaaaacctgtttgctctgcattgcagcacagcatagcactcaacagaggtaggtaataaacaccttttaatgcagatgacactgatgtaacctcatgccattgaaatgaatcaagcaattaacaaatgctgagaacctgaacgtgttgaggacataaatccarcttgcttttcacttaaggatggtgagacaacctccagagacttttcctgagaatggggcaattgtcaccaactctagtgggatatatcctttcctgtgcttttctttgcgttccatttgaattggtaataggcaagactgtcagcatttgtattaaggtatttgccagggcaggattagggagaagcaagaagcagaatatttttcccttcagggcttagaaaagaatgtactttctttcctatagatgaggtaaattaaagttttcatgcataaatgaaaatataaactcttgcattatatagtgagatagaacctggcatcttcttatttatattctgagctcttggagtaaatgaacaatggacttatacctcatcttatccctcctaacttcaggacagcatatggcaggtgatcaaagtgatcaaattaataagttttgggtgttcatgccagtttccatgattataattaagagcattaagtttggattgcagatcatagattgtggaggagtatgtttgatctacctaatgtttgaagctgatagaagatgaaaggggggagggagcctcaggctgtttaccaagtttcatcgtgaggtgacatttgctctggacatgtgtgttctctgagcagtgttgactcataccagataaaggaaaggccaggatatgtttttaccctaaataactggacaggcatccttgggtccaatattttcataaatttgttaactgctagttccagggagagactggattataactaaatttaaataagaactcgatgaagtgaactttataaggtagagataaacagcttagagctcccattaaattcagttaacccttgagtagatagcaatgtatttaattagtgaatgttgcattaggaacattattttcacaggtccttccttccttccacaaatatacaggaacattcctgtagttgagcacattggctttattactcattgcagtgtggaaaaaaaatacaccataaggtatctccgtaggagggtattagaaagaacctatcttagaatttgggctttgattgggtgatttgtcagagactaaggaagttgggtttgctctagattggatgctgttagaagtgcccctgccttctatcgggggaacc

SEQ ID NO: 724442 - DNA, 584 bp, Homo sapiens
ggcgggggactcctacctttcagactgcatcgattagctgctccatctgccactctgcaaacaagcagcatggctctccattggatgaaaatgtcacccatggtaacagatcctcacagttggcgcctgaccacaggaccctccgaaggggaataatcagatcctgaaaagcagtcagcccaccccaagctaaatgcaaaatgaaaaataaatgtctattctaatctcctccctcccttctcaaccctkactccaatgagatggccccagagcacaaggcgtgatttgcaagctgcactatcacagaaggggactggtggcccccaaggcagattgctcggtcctgagtatagtctgtggaaagtgtaactgggagacctcccccatatggttctgaagctacagatgcaaaaaaaccttgctccagccactccaaactccagttctttccatggagagattctgtctctttctctctttctacctctctccctccctctctccttccccatcccctctttccttccccatcccctttctcctgccccatcccctctctccttccctatcccctctttccttcc

SEQ ID NO: 724443 - DNA, 648 bp, Homo sapiens
tgtactcctttaaagcttgaaatagtctttcttgtcatatccttgtatcatcagcaagaaccttctcttgggttcaaagaaaacagccacctatttgagcatttactatattcctggcactggactaagcatcttactttcattaaattctctaatttaattctctgtaagatatataaaaatgtcatctcaatttaatgaatggtagaactgaggttagaaatgtgcccaagatcacatgagctgagatttaaatgagatcttatgtgtgtcttctaaaacttatgctcttaacagatatgctgtattctacaataagagagattttgttttctttattctctgaaaagaatgaaagctttacaacttttcctgattcaccagattctcctgtaatcactgacagattcctgactcccaggtcaggcacattcccaccggaggaccacatgcagagcaagttgtctgtgcccaccctttgtggcacatggcaacttgatttaatgtcctayaaaacaactgttccctcatcaccaacccatgcacattcacacacagccacggttagagattacagaatgggaagttaccttagtacacctcaaagatggggactgaatgcaagttgatcttctgcataaaggggaa

SEQ ID NO: 724444 - DNA, 612 bp, Homo sapiens
tgaatatgaatgtgagagatctctgcatttgatgtctagctgttttatttcatttatttttagtcaaggtcatacattcacatgattccagaataagtcgctctctcgccccttccttagctacctgcatctcctctttcactctgctctgcctcttccctcacttcacaatacatcttgaagatagttctttctttgcataaagattattccagttcttttatacagctgtataacgttccacggcttggaaatrccagcatttcttgagccagtgatctgctggtggatattcaggttgtttccagctatttgctagtatcagtgaggcttccatcaataacctggtacatatatcattttgtgtatatgtgatctgtaggataagttctctcagtgaatctctgggtcgaagaggaggtaaacttgtaaatttggatgtgctgggtaattgctctccacagaggttgctaattgctgtttaaggatctggttatttggaatgcttgcctacaggacatttgtctggagacagttgagtgactcacaggaaacctgtggtccaggatgtccacaagcagcttacagggttgtcagcagcatcattctcac

SEQ ID NO: 724445 - DNA, 1327 bp, Homo sapiens
aagacaacatccattctgtagcccatggatcaaggagtaattttgacttttaagtcttattatataggaaacacattttgtaagacagtagcttctataaataataatttctttgaaggatccgggcaaagtaaattaaaaactttctggaaaggatctattattctagatgccattaagaaattgccacattccccaccccagccttcggcaaccaccaccctgatcgtcataagtcatactgaaagctcagatgatggtattttttggcaataaattatatttaaattaaggaaagtacattagtttttggacataatgctactgaacacttaatagactacagtatagtgtaaacataacttttatatacactggaaaataaaaaaaaatttgtgcgactcactttattgtgctatttgctttattgcagtaatctgaaaccaaatctataatatcccctatttgttgtaatgcttgtaatttgtcgtgtgccggagtaattgaaacaaatatgtaatatactacatattttacttatttattgttccccactataatgcaagctctatgaaggcaggacgttttatatattttgtttacagatatgtgcccaagacctcccagaccgcctagaatgtaataggcgagtactcagtaagtatttattaactgaaaggatatattgaaaaattgtttcacatacttctgtgctagtttggttgaacattgaattctaggtttaaaataatttaatttcacaatttcaggtgtgttttattaccttctccttcccactgcgactgagtaattttgatggcctctaatactcattcttttgtgaaactccatttttcccgtgggaggtttgatactttttttcttatccctggatttatgaatatctgaaattttaccatgttatgagattttctctttatcttttagtttaatctctttgacgctcagaggattcagtctaaagatttatctycttttagctgcagaaaatcattatctatcttttctctgattacaatatcttcttttttattgtaagggcctcttcttagagttttctgtgtcaaaaataccttagctggttcttcccatgctttcctttttattttgtttttaaatttgtggagaatttatgtacaattcctcaataatcccaaccgtccctgtactagcatctttcttaaaatattaagcccagggcaagattccttctgccaactgagaacttgcctgccccaactttaataaatcaatatttcagttaataacctttggtcacctcaaggctgactcaggtctttgttct

SEQ ID NO: 724446 - DNA, 1368 bp, Homo sapiens
caatgatagaaccaattcctgtgcatagccccaccctgcctctccttctgccagtaccactcagctgaagccacactactcaagagggaagatttcccttcacccacacaccctctgggaccatgatccaaatttatattcctaaaagagagcttctgggtattcctaaaatctcacagagrgtttgtgtgaaatccacattttgagtttctgcctgaagcctctcttcctaagaatcagaggtaaagccatggagactgactggcagagaaaatctccgagaaaaataaagtgtttttctctgaattcctttctactccccctttccttatctctgtcatccacattccccccctggagttccattgcaggcccaatcaacaaagggcttttgtttcacagtgaagctttctgtgcagtttggtagtgaacacaagtcagtaaatcaaagcctggtcccaacactggtgaccttgagaagccactgctcttctgagtggcatatctcatagggctcctctataccagggctgttgtgagagctgtccaagatgaaacagctgggatagtgctgtgaattgccaagcattacatatgtgcaagctcctcaagggcagagatcttggctgtgtcacctagagaaaattaattaaccttccaaacctcaggttctcaatctataagatggggctgatatggatcatctcatagggctttcatagagaagtaaatgatgtatggataatgcctaatagttacatgttactggaaagtagtcatacattccagtgtcaccacagtggtgatggtggtggtgatattccatgaaagaagataatgatgatgtctccattctgaaaactgaaggtatcatcctgcttatataaaagtccagctgtactttcattgatgtgctgatcttaccccaaaacacaaagtaccaattacactagaaattctccaaatagttccctggttgctcataaaacatctgaagattttctactaaaggagtttttaaatttttctatattaggatgttatccaataaccataaaatatcattatttataatggcatatataatttgaatgtttcaaaatctatttaagatactacaaaaattctattgctataaaaatatatttgcaatgttggcatattatatagacgtacttttataacaccagtttaattgttcagagccaagtttaactccttttttgtctggtatatttttgcccaagacttaatctggggctaaacagtccaatataagaagatcaaaaaagtcaccatgtggtaattttatattttcagcacattgtgtctggccatacatttttaatatcataaaattgacttgtt

SEQ ID NO: 724447 - DNA, 1368 bp, Homo sapiens
caatgatagaaccaattcctgtgcatagccccaccctgcctctccttctgccagtaccactcagctgaagccacactactcaagagggaagatttcccttcacccacacaccctctgggaccatgatccaaatttatattcctaaaagagagcttctgggtattcctaaaatctcacagagggtttgtgtgaaatccacattttgagtttctgcctgaagcctctcttcctaagaatcagaggtaaagccatggagactgactggcagagaaaatctccgagaaaaataaagtgtttttctctgaattcctttctactccccctttccttatctctgtcatccacattccccccctggagttccattgcaggcccaatcaacaaagggcttttgtttcacrgtgaagctttctgtgcagtttggtagtgaacacaagtcagtaaatcaaagcctggtcccaacactggtgaccttgagaagccactgctcttctgagtggcatatctcatagggctcctctataccagggctgttgtgagagctgtccaagatgaaacagctgggatagtgctgtgaattgccaagcattacatatgtgcaagctcctcaagggcagagatcttggctgtgtcacctagagaaaattaattaaccttccaaacctcaggttctcaatctataagatggggctgatatggatcatctcatagggctttcatagagaagtaaatgatgtatggataatgcctaatagttacatgttactggaaagtagtcatacattccagtgtcaccacagtggtgatggtggtggtgatattccatgaaagaagataatgatgatgtctccattctgaaaactgaaggtatcatcctgcttatataaaagtccagctgtactttcattgatgtgctgatcttaccccaaaacacaaagtaccaattacactagaaattctccaaatagttccctggttgctcataaaacatctgaagattttctactaaaggagtttttaaatttttctatattaggatgttatccaataaccataaaatatcattatttataatggcatatataatttgaatgtttcaaaatctatttaagatactacaaaaattctattgctataaaaatatatttgcaatgttggcatattatatagacgtacttttataacaccagtttaattgttcagagccaagtttaactccttttttgtctggtatatttttgcccaagacttaatctggggctaaacagtccaatataagaagatcaaaaaagtcaccatgtggtaattttatattttcagcacattgtgtctggccatacatttttaatatcataaaattgacttgtt

SEQ ID NO: 724448 - DNA, 619 bp, Homo sapiens
ctggatgtcacataaagtaggtagatgcctattgccctaacatgtgcagatagacttgggcttggcttgttgtccaaattcctaaaatccccaagcctggaaaatggcaatcgagactgattttcataactgtattataaaaggaagtacgacagatcattttacttttcctgctcgtattatatagtcccccaaaaaaagctttctcaaaagagttaaagcataacctaaataacttaatttgaatacctaaacactcaggctatttaacaatgatagtaattgtttattcttcatacttctayagattttcttctctgtccaaatcaattccactattctactaaacattgacattacttttgacatttattacctaggtgtttctagcttttccaaaggctaatattttacctagtttatttccctaaattctatagatatacctaaatcttcctatagaaagctccttcctgtactgccttctagttttgattagcagggctatttcttaatggaaagccaaagttataacatgttttcttccctgctttttatcgaaagctcttttggagaactctttattgccttttaattgtctgagtttattttcttcact

SEQ ID NO: 724449 - DNA, 1344 bp, Homo sapiens
  misc_feature 1056, 1057, 1058, 1059, 1060, 1061, 1062, 1063, 1064, 1065,1066, 1067, 1068, 1069, 1070, 1071, 1072, 1073, 1074, 1075,1076, 1077, 1078, 1079, 1080, 1081, 1082, 1083, 1084, 1085,1086, 1087, 1088, 1089, 1090, 1091, 1092, 1093, 1094: n = A,T,C or G
  misc_feature 1095, 1096, 1097, 1098, 1099, 1100, 1101, 1102, 1103, 1104,1105, 1106, 1107, 1108, 1109, 1110, 1111, 1112, 1113, 1114,1115, 1116, 1117, 1118, 1119, 1120, 1121, 1122, 1123, 1124,1125, 1126, 1127, 1128, 1129, 1130, 1131, 1132, 1133: n = A,T,C or G
  misc_feature 1134, 1135, 1136, 1137, 1138, 1139, 1140, 1141, 1142, 1143,1144, 1145, 1146, 1147, 1148, 1149, 1150, 1151, 1152, 1153,1154, 1155: n = A,T,C or G
atccagttatagattttaatacttcttccctctgaaccatatttattagattgattaattccccaaatgtgcttttttgaagtttaataccctaagtctttgaagtcactgcttacttaaagaattcaagaagatcatgatcactagtaacaaggaggctgtcttggaattaactacataattcagctgttgctattcccagtagctccagttactgtaccactcatagcttgatttcccagtcttagtcaaaacacgatctttaacccacgtgttgtaggcaaaaccatatccatcacaatgagaagtttcacaaaaaaagacaaattaagtaagcatttacttttttattattgtttattctcatcttggatgattggtaataaattggggtractcacattatttatctggaccttcatttccatataaatgaaatgaggaaggaggactagatggcttctaagatatcttctagctcttttaaataccattcttctacaattctaatttattctccaaaattatggagttgaatttctggcacattaatgtgaactatggaacattttattgcttaaaaaaaattttatttcagatacagtgagtagttagacccaccttaactttttaatggctttataagggaaaactggcatacaataatatgtacataaagtttacagtttggtaagctttgttatatgtatatactcatgaagccattagcacaatcacgataaagtttatatccatcaaccttacattgggattagttaagtatcccttatgatcccatgttatctaccataacatggttggctttttaactatgagtctctgcggtgttaatttagtggtggttctaagactgataatatacatctttaacttaccactgtctcccttcaagtgacattatatcatttcatatatagtacaagaatctaataaccatataattgtatctctcctctcctggcttttgtgatattgttgttatacattttacatatatatatatatatatatatatacatatatatatatatatannnnnnnnnnnnnnnnnnnnnnnnnnnnnnnnnnnnnnnnnnnnnnnnnnnnnnnnnnnnnnnnnnnnnnnnnnnnnnnnnnnnnnnnnnnnnnnnnnnnactacacggattagaatgaaagcttgtttgggagagagatggactaacaaaatgaaggtattacaataataaatgctcagtgatcaggctcttcaccacgtaggggctctgggtaaaacagaccccaccttgtaatcctactcaagaggcaaagaagctggtgtatgtatctccaactgccactggtca

SEQ ID NO: 724450 - DNA, 688 bp, Homo sapiens
ttttccccagcacagaaatttgcattttgcacagaatttgcctggtgcagcagatctttatagttatggaaactgtcatcattatcggaatgtgctgctgctcaactccccagacataatttaatatggtgaggagaatatgacctgcctggctctatgggtgatcatatttctactrctgcagcaagctgggcttgtgtatttttcctcacttcagttgttcttcccatagttcatgtagggaggcactttggcttttgaaacactacatttctcaatatttaagcacaatttattgtccttatttttcagaacccattaaatataagggtcagaacctagaaaatcttatgtgctggatttctaccctgtatgattcttttcatccatgctttgcacttacgtaggaatatacataatttggtctgaagaagtataggaacagttgagcacattacttcaccactggaagaataggaaccagggaaaaacatcagcctctgccacttggagcactagaggatgacggaatgtcttgtatatgcggtcaactgttcaggatttactactcaattggttgttcacaatcagggaaatgattggcttcttggttgtttgttgaactttctttctttatatggttaaattattttgttttgataaaaataaaacttaaaatgcaaatgtc

SEQ ID NO: 724451 - DNA, 584 bp, Homo sapiens
aaaaaaaacagatttaaaactattactgagagaggcaaagtttcaaaaaaaataggatagtacagaaatactctagatttggctagaggtggaaaaaatatatttttctcttcctttcatgaatctctcagtttttctgtgcctgaaaaactaaattttagttactggtgtgtgaggatttatctctgtctttcagcaacctgttctgatcttctggtaagaggactgatttgacttttagttttgcctgagcatattcaggtataatacactttgggggttttcctcattattttgagtytgaattttagaaccaatatgattatgtgtctcttatttttctttccaactgataacgcaatatcatgtttgttgcaaaaaagaaagtagcattgacttatccaaggaaagcctgacaacttccagccacactgcccctgaggccatcagagttaggttggcacacatccttctacatctttctccactcataaacaaatacagacagacaccttttgttgttgttttttacacaaaggctcataccagatgtagtaatcgccaattcttttcttcttaatatg

SEQ ID NO: 724452 - DNA, 317 bp, Homo sapiens
aattgtaataccttatattaaaattaaattaaaataaacaaaataaaataaaaatattatctgtatttttctgatgtttaaataaatttatatattatatatatatgtgtgtgtatatatatatakagagagagagagagaatatatatacacaaaatgtccagcgcatatttgagactcaaaacatgatggtgagtagtgttgttatttttttaactttactatagaaaaaagttaaaatcttatccttaaaagctataaaagaagtgtgtattatgcatttatgcatataacatagggtatatatcttgctatgc

SEQ ID NO: 724453 - DNA, 317 bp, Homo sapiens
aattgtaataccttatattaaaattaaattaaaataaacaaaataaaataaaaatattatctgtatttttctgatgtttaaataaatttatatattatatatatatgtgtgtgtatatatatatatagagagagagagagaatayatatacacaaaatgtccagcgcatatttgagactcaaaacatgatggtgagtagtgttgttatttttttaactttactatagaaaaaagttaaaatcttatccttaaaagctataaaagaagtgtgtattatgcatttatgcatataacatagggtatatatcttgctatgc

SEQ ID NO: 724454 - DNA, 661 bp, Homo sapiens
gagaaaagagattccagttggtccataaaaggggagaccagatgctgccaagtgtatgctggaggagagggcactcattctccacggagggaccagactgaatgacagcctccatgaggaagataggacacatgcttgtgatttgtaaaactctaagtagcctagagtggctgcaacgtcacggcactgtgggaaggagggggaaaggcattagacagtggacagctaggctgaaaaatgaggtaggaagccaagcatggagggcaatgatgtcagactataaaaygtcctttactggacacgtttgggcaaaagacctagtacaggtgaaatgtctatatctaaatgattttaagatgatgcctcttatatgtttaatattatattaagagtatcacctgtaatcccagcactttgggaggccaaggcaggcggatcacgaggtcaggagttcgagactagcctggttaacatggtaaaacccgtctccactaaaaaatagaaaaattagccagccatggtggcacacacctgtaatcccagctactcaggaggctgaggcaggagaatcacttgaacccaggaggtggaggttgcagtgagccaagatggtaccactgcaccccagcctgggtgacagagccagactccatctccaaaa

SEQ ID NO: 724455 - DNA, 2155 bp, Homo sapiens
cacatgcaaaacatagtacacgtaggacacattcagtcacatagctgcattagaatgattgcatgtgaggagaggagaatgagattggggaaaaggataaaagggagtgaaaattgtcatcattttagaattaggaaagtttatgttatatatttttttaaaaaaatgaaaatactgctaattcagcttgtattctcaaatagaaacaactggatctgtgccctagttcaacatagtttggcttctacctactatacatattcttataatcagttctctacagaaccgtcttagagttcaatgacaatgggactaatatagtaattttggcctttcagaatgcttaaacaagcctgaaatccatgcagttcggagctaacaaacattagatttacaatagataaagaaaatggataggaatatattcagggtggcatgaaaagtctcactgaaactaaatccctttaaatgacagattccaggtttgtctctgctttatcaatgtgacctatattgaaaacttaatatataattatcctcttctataatttcccaattaaaaattttttatcaaagttgcatggagaggcagcctggtggcatatatagggttcttttaaaaagtaggaaacaggctggtcgctgtggccgaagcctataatcccgtcactttgggaggccaaggtgggaggatcacctgaagtcaggagttcgagaccagtctggccaacatggtgaaaccccctctctactaaaaaatacaaaaattacctgggcatggtggcaggtgcctgtagtcccagctacttaggaggctgaggcaggagaattgcttgaagccaggagacagaggctgcagtgagcggagattgcgccacttcactccagcctgggcaacagagcaagactccatctcaaaaaaagaaaaaaggtatcagtcatgaggtacagaaaaggctatgttcccatcagctacataattcctttaactagaagggtagtgttaaaagaatgatgtctaattgactctcaaaggcatttatccaatgggtgatttttattaaattcaattaaacaagaggtaaataatctgctatgggaaccatttcacatgctaaatgctatggaggacaaaatgtaactcccattcctagaatcctatctttcagtcatttctagtgtcattaagaagacaaggcatataaaatacacaaagctgttaagtaataacatgagtataccagattatctgattatgtaattagttaagtcatgcagaccgaggtcagaaggacaaaggtgtgggcctgaaaaactaaagaagtctttgtggaagagctgggattagactcagatttagaatggcagagaacaaagagctcactagaaagaagaacaagagcaaaagttgggaattaggaacaagtatggcatgtttgggggcgcccaagagatggtggctaggcagagagtttgtattagacagtaataggaaattatgggagtaactttcagaagtcctctcaaccagggcctccttttaagtagctaagataaatcaaaattatatatttataatggatggagttaaaatatcagaaattcagaaagttatttcttcgtcaagggcaattgcatattaccaataggtggcaggtaatatcaaaacaggacatcttttgacttaacaaaagctttctactsagctcttgaacccaaggaaccaggttctgaaagtctaaatatgttagttatccttcagactggctttcatagtttgatcttgcccttgcctgttagatgaatcttgaacaccccttagacctttagtgttccagaaagttgaatgtatttcctcactttctgtgcatctttgttggctcactcagtcattcgaataatattaatcgaacatccatatagatgaaggaaacaccatgctaggcaatggagatctgaaactactataagccccatatctcaaagactttacaatctgatgagatcaacatacagatcaatgaaatagaacaaattgtccagaaatagatgcacacatatgaggtcatttgatttttgacaaaggtaaaaaagcaatttggtggagaaatgattgtctttttaacaaaaggtgctggaacaattcaatagccta

SEQ ID NO: 724456 - DNA, 727 bp, Homo sapiens
gtctctaggaagttccaaactttcccacattttcctatcttcttctgagccctccaagctgttccaacctctgcctgttacctagttccaaagttggttccacattttcgggtatcttttcagcaatgccccactctactggtaccaatttactgtattagtccattttcacactkttgacaaagacatacacaagactgggaagaaaaagaggtttaattggacttacagttccgcatgtctggggaggcctcagaatcatggtgggaggtgaaaggcactccttacatggcagcagcaagagaaaatgaggaagatgcaaaagtggaaacccatcagatctcgtgagacttattcattatcacaagaatagcatgggaaagaccggccccccatgattcagttacctccccctgggtccctcccacaagtaggaattctgagaaatacaattcaagttgagatttgggtggggacacagccaaaccatatcagctgctttctccactacacagtaaagagggttaggagaaaacccataattcattagtgcaaagatatgggatagaaactgagactagcaaatgtattcagaaacaaacttaaaattcctaattcaattttgataggtagaactccatacccataattcttaataatctgtcttattgtcaagaccaatgcaaagatttggttttactgtcagttctgcatctaatatctacca

SEQ ID NO: 724457 - DNA, 727 bp, Homo sapiens
gtctctaggaagttccaaactttcccacattttcctatcttcttctgagccctccaagctgttccaacctctgcctgttacctagttccaaagttggttccacattttcgggtatcttttcagcaatgccccactctactggtaccaatttactgtattagtccattttcacacttytgacaaagacatacacaagactgggaagaaaaagaggtttaattggacttacagttccgcatgtctggggaggcctcagaatcatggtgggaggtgaaaggcactccttacatggcagcagcaagagaaaatgaggaagatgcaaaagtggaaacccatcagatctcgtgagacttattcattatcacaagaatagcatgggaaagaccggccccccatgattcagttacctccccctgggtccctcccacaagtaggaattctgagaaatacaattcaagttgagatttgggtggggacacagccaaaccatatcagctgctttctccactacacagtaaagagggttaggagaaaacccataattcattagtgcaaagatatgggatagaaactgagactagcaaatgtattcagaaacaaacttaaaattcctaattcaattttgataggtagaactccatacccataattcttaataatctgtcttattgtcaagaccaatgcaaagatttggttttactgtcagttctgcatctaatatctacca

SEQ ID NO: 724458 - DNA, 1455 bp, Homo sapiens
gatcttggcccactgcaacttccacctcccctgctcaaatgattctcctgcctcagcctcctgagtagctgggactataggtgcatgccaccacaccaggctaatttttttgtattttagtagaaacagggtttttttgtattttagtagaccagtgttggccaggctggcctcgaactactgacctcaggtgatctgccccagctcagcctcccaaagtgctgggattacaggcatgagccatggcccccagcccagaaatcctaatctaagagcacagcgaaamtgagcttcaaagaataatttgcttgctgcatttgacatttattggctcagtcacaaatgtgggtgttgacaccccaggttaaagcaaataatttttaaacatctacttacatagaattttcatatagattatgaaattgaagccacaaacggttcagtaaaatgagtaacatttcctaaatatatcagagtctcagttgtgactagaagttttcattcaaactcaggtattctgactctaaatcgtgtttggagttttagttatgctatgtctctgggaaatagctgtatattaattatttaggtcaagtcaaaaaatttggatgacccatagtaagggctattcttaagagattggtgcaataagcttctgcagaaattaaagtttgctttgcaacagaaattgctcataattttgtaaatcaagttaactgagccatttggataatgttaaaaactatttacctaaacatgttttaaaatttcctggaattcaagtattcaaataactacactgtggtaaacacatgaacgtaatttttgctacagagtttattttggccagaagccatcagattagttaattagtggaaggatgacgtagtccttggagagaaagtatttaaatatgacatttgaaaaacctttttaaacattaatggtaagttttaaaaatatttagagagaaaaattatagggctgtaacactggggaagttgcagaagtttgatctgttctagtacaaaataattatcatgtaattcttttaattcatccagctttcaaataaactaatcagtatgacaaaaacacagggaatttgataaatataaagtctcaattaggggcaaaagaatttattttgatggcatttttatttgtactgcttgttctaatgaagataatcttcatatttcttgaaactttgcagttttgattttgcttctttgtgttttctacaaaatgacaataaaaatcttactgacagccttgggcaacagccagagacccatctcttaaaaaacaaaaacaaaaacaaaaacaaaaaacaaaattggccagatgtggtggcacatgcctgtggaggctgaggtgggaggatggcttgagcccaggaggtcggggctgcagtgagccaagattgcaccactgcactcagcctgggagaca

SEQ ID NO: 724459 - DNA, 654 bp, Homo sapiens
tattttcaataaaacttactatgcacactaaacttcaaattttatataatttcctatgtcacaaagtattatttttctttccagtttcccccatcatttgtaactgtaaacactgttcttagytccagggctatgctaaacaggtcatggggaggatttggcccataggctgtagtttgcccaaatccggtctaacattcattttttttggtgtcccccgagcatccttttcactctactattctgcaaacacacacagatttttctttagagactcacttctttccacattttatgctgtttggtttggataagatggactctatccttagttctggaggtgggctctgttaactttagccaataagacaatttcatcttactggccacagagttgattcaggaatgggcccatggctaattttaatccaacaagatttgaggaatatttgaaagggcttctgggaaataagctttccctcttttctttctaccctttccacaccccaagccattcgagaagagagagcatatcctctgataattcaaggaatgaggattgagactaggaactgccacagtcagggaaaaagcctgtagcttccaggaaaccaccttttgaagcctgggaatggagccaatgtaatgacctga

SEQ ID NO: 724460 - DNA, 654 bp, Homo sapiens
tattttcaataaaacttactatgcacactaaacttcaaattttatataatttcctatgtcacaaagtattatttttctttccagtttcccccatcatttgtaactgtaaacactgttcttagctccagggctatgctaaacaggtcatggggaggatttggcccataggctgtagtttgcccaaatccggtctaacattcwttttttttggtgtcccccgagcatccttttcactctactattctgcaaacacacacagatttttctttagagactcacttctttccacattttatgctgtttggtttggataagatggactctatccttagttctggaggtgggctctgttaactttagccaataagacaatttcatcttactggccacagagttgattcaggaatgggcccatggctaattttaatccaacaagatttgaggaatatttgaaagggcttctgggaaataagctttccctcttttctttctaccctttccacaccccaagccattcgagaagagagagcatatcctctgataattcaaggaatgaggattgagactaggaactgccacagtcagggaaaaagcctgtagcttccaggaaaccaccttttgaagcctgggaatggagccaatgtaatgacctga

SEQ ID NO: 724461 - DNA, 654 bp, Homo sapiens
tattttcaataaaacttactatgcacactaaacttcaaattttatataatttcctatgtcacaaagtattatttttctttccagtttcccccatcatttgtaactgtaaacactgttcttagctccagggctatgctaaacaggtcatggggaggatttggcccataggctgtagtttgcccaaatccggtctaacattcattttttttggtgtcccccgagcatccttttcactctaytattctgcaaacacacacagatttttctttagagactcacttctttccacattttatgctgtttggtttggataagatggactctatccttagttctggaggtgggctctgttaactttagccaataagacaatttcatcttactggccacagagttgattcaggaatgggcccatggctaattttaatccaacaagatttgaggaatatttgaaagggcttctgggaaataagctttccctcttttctttctaccctttccacaccccaagccattcgagaagagagagcatatcctctgataattcaaggaatgaggattgagactaggaactgccacagtcagggaaaaagcctgtagcttccaggaaaccaccttttgaagcctgggaatggagccaatgtaatgacctga

SEQ ID NO: 724462 - DNA, 2414 bp, Homo sapiens
aagacattaagagagaaagatataaagatatttggggatatgcaaagccaagttaaagaaaattacctttcatgtactcatatgaaaaaagtgcttgaataaatactccagaaaaacatgaggaatacccacaaaaacatgaatgagataacaagaatgagtgggaacaagaaaagctgacaggaaaataagggattctattggactgtgagactgtattattgttaaacagagaattgtaacataaaataacattccttttttttattattatactttaagttttagggtacatgtgcacattgtgcaggttagttacatatgtatacatggaatactatgcaacattcctttttttaatgggcccattcatatcagtttttctgcagtatagaatacttacatccaaattacacttcaaacagtttcatttaattttaaagaactgggctacagaaaaaaagcacagaagacccatacaatacagagtgtatattataaatttttaatgtaaaaataataagataaccagcagatagaaagagaggaagggaaagtagtgttaaatacactgacattgtttgaggttgatgtactaagaaatgtcagtataaatttcagctcatactgaaatttcagttgtttcatttatgtgaaatgacaattataattgcaaaargacctaaaaaaaaaaccagaaactgttcaaaaagaattatctttaggactggagctaggaatagaagtgagagaagggatatttttgtttttcattttcgatcctttcatatgattcaaatgttttaaaactattttgaaataccccaaatactaagctctccattgaaaatattttttaaagttcaatctttgcttgacttgcatggtagttgcatttctgacaatttacattcagtacaaatattttgtttttatatgtaatatggagtgaggtcctagtttcaataagtataaacaagtttttcagctacatgaatgtccagtgagacaatcaaaagtcatttatgacatggggcagtttttattgtgtgtagttctcccatgcagtacaggacatctagaatccctgacactaacagtgacttctcccttccataaccaaggattccccaactaatttccaaaatgcctcccacagggttgacgtcaaacacttgcaggaccactccctagaagaaagaaaaggcaaccaatattttttttccaatagttaggttaagagcatacctgtcctgtatcatctaatcttcttcacaactttgtgagggagttatcattttcctcatttagaagattagaaaactgagatattacataactgtcattttaagacttcattcattctttcattcatttatttattcattcaacaaatgcatcacgcatcattccagaatctcaagatacagtaataaaaagagaaaagaattctcaagcctcttggagccaacgtgcatgcactttggggacactgagagtaagcaattcaataatgaataatagaactatattcgtaatgttttttaagaaaaaaagacaatgtaaaacatttaaaaaatactgttgatttcattctttaatttatttccaaatttacattttcctctgaaaggtatataaacatatttgtgtggtgtgtgtgtctgtatatacatgaatgtagttgaaactgagttctatgcacaatcctgcaaatccccgagcacttttgaaatacagggagaaaaatcccatatgcattaaaaggtgtcactaaggctaatgtaacatgagtctcagctttagaggagtttgtcttaagttatactagctgagccaattaagcccctggcagtgctggcagtgagggcaccagggctcccatcacatcaccctgaggcttcagagacacctctcatgccactctcagctctgaatgccgggaaccagaggaaggaagatacatgatgattaaaagagacaaaggcgaggcaggtataactggaacagtgagaggaccttcaaccaaagtgctgaaaaatgatgattttaatgcttaatttgcttattttcagaattctccctagaattataaatcatattccattatttttagtacaaaagatttttttatactatctttgtggtgctgctaggttaatgaacctcccattttaccttttaatacatttgatatattaagaaaatgccagacatttctttaaggtatgttaattaatattaattccacaataaaattgtaacagtaaattagttccctgacgtaaagttgtaacattgcttttaaagtttatttacacaagctacttaaaattcagaactaaaattgtattatgttatacctttcagtgaaaaccagatggtttgattaatttttatggtgaaactaactc

SEQ ID NO: 724463 - DNA, 1215 bp, Homo sapiens
tcttcgtcaaaatcgagcagggactaattagcggtgaaagcagagactccagctcatttccgttcacctcattatttgtttctcttttgggctgaagccaaacaacaatcaaacattaacattccccctgcagagcgggcacacggacacatgggagcatgttacacacaccacaccctcacagcgtgcacacatgcacatgcacacacacacacctgctccactgctattcggctgtgcgaggtctctgcggccccgctgtctccgggcatctagggtaacatctctttccatttcagacctgggactggkctgaaactgtataatggaatggccctgggcaagcagggaaaggacgttgggaatttccggaagcacaatcccactggccagcactggtgttaattaagggcgctgctggtgttttgcaggcagctgtttcctcctccggccctcctgttccccgggccgcctgggcaccggcgcctgcactctggcattcattgctctaccgtaagccttgtttctagccgttttcaatcaagtgggagactgtccaaatttccgtctcaatgaaaatcaactgttctaaatctaagctcccattaagcgttccaggggctggcctgacttggaatttaagcagcagcgcagccctccctggagtgagcggcagccggggctccagataaggcgggcctgcctcctagtggccaaggtgctgcagggcagctctgagggctggagggctgcgcagccgccacccgaggacacggggaggaggcacagtaagagaatccttagagcctaacgcccccttctccgtcgctctcgagccgctccagtccccaagtcccatcccctttccttccccgacatctctcctcgttgcctcactctggctccgtcgaactgcagtggtctgttagctggactctatctccagcttctgtatcgaatccatgcacctcgctgccaattcgtcttccggacgctcgttgtcagtcctctgtgatctctaattaaggctctgctgagtctcctctttatctatagggagaatcctcaagcggggagacacacccttcctgcagaggcgtatcgccagccacgacaaggcgagccgcgtttctccccacactccccaaaaaggcgatgaccctccccaggccgcgctcacgctgaacccctgttcctgagctgcagttcctggag

SEQ ID NO: 724464 - DNA, 1215 bp, Homo sapiens
tcttcgtcaaaatcgagcagggactaattagcggtgaaagcagagactccagctcatttccgttcacctcattatttgtttctcttttgggctgaagccaaacaacaatcaaacattaacattccccctgcagagcgggcacacggacacatgggagcatgttacacacaccacaccctcacagcgtgcacacatgcacatgcacacacacacacctgctccactgctattcggctgtgcgaggtctctgcggccccgctgtctccgggcatctagggtaacatctctttccatttcagacctgggactggtctgaaactgtataatggaatggccctgggcaagcagggaaaggacgttgggaatttccggaagcacaatcccmctggccagcactggtgttaattaagggcgctgctggtgttttgcaggcagctgtttcctcctccggccctcctgttccccgggccgcctgggcaccggcgcctgcactctggcattcattgctctaccgtaagccttgtttctagccgttttcaatcaagtgggagactgtccaaatttccgtctcaatgaaaatcaactgttctaaatctaagctcccattaagcgttccaggggctggcctgacttggaatttaagcagcagcgcagccctccctggagtgagcggcagccggggctccagataaggcgggcctgcctcctagtggccaaggtgctgcagggcagctctgagggctggagggctgcgcagccgccacccgaggacacggggaggaggcacagtaagagaatccttagagcctaacgcccccttctccgtcgctctcgagccgctccagtccccaagtcccatcccctttccttccccgacatctctcctcgttgcctcactctggctccgtcgaactgcagtggtctgttagctggactctatctccagcttctgtatcgaatccatgcacctcgctgccaattcgtcttccggacgctcgttgtcagtcctctgtgatctctaattaaggctctgctgagtctcctctttatctatagggagaatcctcaagcggggagacacacccttcctgcagaggcgtatcgccagccacgacaaggcgagccgcgtttctccccacactccccaaaaaggcgatgaccctccccaggccgcgctcacgctgaacccctgttcctgagctgcagttcctggag

SEQ ID NO: 724465 - DNA, 1215 bp, Homo sapiens
tcttcgtcaaaatcgagcagggactaattagcggtgaaagcagagactccagctcatttccgttcacctcattatttgtttctcttttgggctgaagccaaacaacaatcaaacattaacattccccctgcagagcgggcacacggacacatgggagcatgttacacacaccacaccctcacagcgtgcacacatgcacatgcacacacacacacctgctccactgctattcggctgtgcgaggtctctgcggccccgctgtctccgggcatctagggtaacatctctttccatttcagacctgggactggtctgaaactgtataatggaatggccctgggcaagcagggaaaggacgttgggaatttccggaagcacaatcccactggccagcactggtgttaattaagggcgctgctggtgttttgcaggcagctgtttcctcctccggccctcctgttccccgggccgcctgggcaccggcgcctgcactctggcattcattgctctaccgtaagccttgtttytagccgttttcaatcaagtgggagactgtccaaatttccgtctcaatgaaaatcaactgttctaaatctaagctcccattaagcgttccaggggctggcctgacttggaatttaagcagcagcgcagccctccctggagtgagcggcagccggggctccagataaggcgggcctgcctcctagtggccaaggtgctgcagggcagctctgagggctggagggctgcgcagccgccacccgaggacacggggaggaggcacagtaagagaatccttagagcctaacgcccccttctccgtcgctctcgagccgctccagtccccaagtcccatcccctttccttccccgacatctctcctcgttgcctcactctggctccgtcgaactgcagtggtctgttagctggactctatctccagcttctgtatcgaatccatgcacctcgctgccaattcgtcttccggacgctcgttgtcagtcctctgtgatctctaattaaggctctgctgagtctcctctttatctatagggagaatcctcaagcggggagacacacccttcctgcagaggcgtatcgccagccacgacaaggcgagccgcgtttctccccacactccccaaaaaggcgatgaccctccccaggccgcgctcacgctgaacccctgttcctgagctgcagttcctggag

SEQ ID NO: 724466 - DNA, 1215 bp, Homo sapiens
tcttcgtcaaaatcgagcagggactaattagcggtgaaagcagagactccagctcatttccgttcacctcattatttgtttctcttttgggctgaagccaaacaacaatcaaacattaacattccccctgcagagcgggcacacggacacatgggagcatgttacacacaccacaccctcacagcgtgcacacatgcacatgcacacacacacacctgctccactgctattcggctgtgcgaggtctctgcggccccgctgtctccgggcatctagggtaacatctctttccatttcagacctgggactggtctgaaactgtataatggaatggccctgggcaagcagggaaaggacgttgggaatttccggaagcacaatcccactggccagcactggtgttaattaagggcgctgctggtgttttgcaggcagctgtttcctcctccggccctcctgttccccgggccgcctgggcaccggcgcctgcactctggcattcattgctctaccgtaagccttgtttctagccgttttcaatcaagtgggagactgtccaaatttccgtctcaatgaaaatcaactgttctaaatctaagctcccattaagcgttccaggggctggcctgacttggaatttaagcagcagcgcagccctccctggagtgagcggcrgccggggctccagataaggcgggcctgcctcctagtggccaaggtgctgcagggcagctctgagggctggagggctgcgcagccgccacccgaggacacggggaggaggcacagtaagagaatccttagagcctaacgcccccttctccgtcgctctcgagccgctccagtccccaagtcccatcccctttccttccccgacatctctcctcgttgcctcactctggctccgtcgaactgcagtggtctgttagctggactctatctccagcttctgtatcgaatccatgcacctcgctgccaattcgtcttccggacgctcgttgtcagtcctctgtgatctctaattaaggctctgctgagtctcctctttatctatagggagaatcctcaagcggggagacacacccttcctgcagaggcgtatcgccagccacgacaaggcgagccgcgtttctccccacactccccaaaaaggcgatgaccctccccaggccgcgctcacgctgaacccctgttcctgagctgcagttcctggag

SEQ ID NO: 724467 - DNA, 1215 bp, Homo sapiens
tcttcgtcaaaatcgagcagggactaattagcggtgaaagcagagactccagctcatttccgttcacctcattatttgtttctcttttgggctgaagccaaacaacaatcaaacattaacattccccctgcagagcgggcacacggacacatgggagcatgttacacacaccacaccctcacagcgtgcacacatgcacatgcacacacacacacctgctccactgctattcggctgtgcgaggtctctgcggccccgctgtctccgggcatctagggtaacatctctttccatttcagacctgggactggtctgaaactgtataatggaatggccctgggcaagcagggaaaggacgttgggaatttccggaagcacaatcccactggccagcactggtgttaattaagggcgctgctggtgttttgcaggcagctgtttcctcctccggccctcctgttccccgggccgcctgggcaccggcgcctgcactctggcattcattgctctaccgtaagccttgtttctagccgttttcaatcaagtgggagactgtccaaatttccgtctcaatgaaaatcaactgttctaaatctaagctcccattaagcgttccaggggctggcctgacttggaatttaagcagcagcgcagccctccctggagtgagcggcagccgrggctccagataaggcgggcctgcctcctagtggccaaggtgctgcagggcagctctgagggctggagggctgcgcagccgccacccgaggacacggggaggaggcacagtaagagaatccttagagcctaacgcccccttctccgtcgctctcgagccgctccagtccccaagtcccatcccctttccttccccgacatctctcctcgttgcctcactctggctccgtcgaactgcagtggtctgttagctggactctatctccagcttctgtatcgaatccatgcacctcgctgccaattcgtcttccggacgctcgttgtcagtcctctgtgatctctaattaaggctctgctgagtctcctctttatctatagggagaatcctcaagcggggagacacacccttcctgcagaggcgtatcgccagccacgacaaggcgagccgcgtttctccccacactccccaaaaaggcgatgaccctccccaggccgcgctcacgctgaacccctgttcctgagctgcagttcctggag

SEQ ID NO: 724468 - DNA, 1215 bp, Homo sapiens
tcttcgtcaaaatcgagcagggactaattagcggtgaaagcagagactccagctcatttccgttcacctcattatttgtttctcttttgggctgaagccaaacaacaatcaaacattaacattccccctgcagagcgggcacacggacacatgggagcatgttacacacaccacaccctcacagcgtgcacacatgcacatgcacacacacacacctgctccactgctattcggctgtgcgaggtctctgcggccccgctgtctccgggcatctagggtaacatctctttccatttcagacctgggactggtctgaaactgtataatggaatggccctgggcaagcagggaaaggacgttgggaatttccggaagcacaatcccactggccagcactggtgttaattaagggcgctgctggtgttttgcaggcagctgtttcctcctccggccctcctgttccccgggccgcctgggcaccggcgcctgcactctggcattcattgctctaccgtaagccttgtttctagccgttttcaatcaagtgggagactgtccaaatttccgtctcaatgaaaatcaactgttctaaatctaagctcccattaagcgttccaggggctggcctgacttggaatttaagcagcagcgcagccctccctggagtgagcggcagccggggctccagataaggcgggcctgcctcctagtggccaaggtgctgcagggcagctctgagggctggagggctgcgcagccgccacccgaggacacggggaggaggcacagtaagagaatccttagagcctaacgcccccttctccgtcgctctcgagccgctccagtccccaagtcccatcccctttccttccccgacatctctcctcgttgcctcactctggctccgtcgaactgcagtggtctgttagctggactctatctccagcttctgtatcgaatccatgcacctcgctgccaattcgtcttccggacgctcgttgtcagtcctctgtgatctctaattaaggctctgctgagtctcctctttatctatagggagaatcctcaagcggggagacacacccttcctgcagaggcgtatcgccagccacgacaaggcgagccgcgtttctccccacactccccaaaaaggcgatgaccctccccaggccgcgctcacgctgaacccctgttsctgagctgcagttcctggag

SEQ ID NO: 724469 - DNA, 628 bp, Homo sapiens
ctctttcgcttactttttcatgactttgttcagttgtcaccttcaaaaaaaaaaaaaaaaaaaaaaaagccagccaggcatggcggctcatacctgtaatctmagcactttgagaggtgaaggcagcagacagcttgggcccaggagttccagaccagcctgggcaacacggcaaaaccccatctctacaaaaaatacaaaatatatttttcgtagaggacggtggcacacacctatagtcctagctacttgggaggcaggaggactgcttgagcctgggaggttgaggctgcagtgtgagccatgatcatgccactgcactccagcctgggcaacagagcaagaccctgtcaaaaaaacaaataaataaaagccaatcctgaccacatatttaaaatttcaaactgctctactttcccccagtacttccaatcccctttatcttgcccaacttctccttttccatagcacataccatattccttactaccttctaaaataatatatataacaaagccaaccattggcaaataaaatctctcataatttgctgatgggagtgtaacttggtacaactactttggaaatcttttagagagtatctactaaagctaaaaatactttattt

SEQ ID NO: 724470 - DNA, 1379 bp, Homo sapiens
catagccccaggtacagctgtgccgtctctgtactgcactaaagtgtccagccgagggggagggaagacagtgggctgaattatagccctgcctttctccccagtctcagagatgtttcagcccagaggaataaaagcttttttcccaatccatgggcctgaaggagccacctttttataatttgcacaaaggcattagaggtataactgtgccccttgaatcatctgcctatagctgtctgacataataaaaaatatatatttggtcttttaccccagttcctgacacatgggtcttaaaaccctcatcatttcctgaatgataggagtaagaggagcaccatttgttatatttggtcttattctctgttccctggcacaagagcttttaagaaccttggaatctccagagtgatgactgtcttttttatgctaatgagatgactagtacctggggtccctagccagcttcaggatgagggctggtcacctgaaagaccaagccttgatgacagggttagaactttcagccatatctcccttccccattccccacctcaacttcctgggaggggagaggggctggagagtgagtcaatcactaacagccagtgattgaaccaaccatatctacacaatgaaccccccataaaaaccctaaacaacggggttcagagagctcctgggttggtggacacattcacgtgttgggagggtggtgcaccccaactccatggggacagaagctcctgtacttggtacccttttggacctccctccaggtactgcattgtctgtgtgctcatttgtattccttatactctcctttgtaataaactagtaatggtagaatgtttctgagttctgtgagccactgcagaaaattatgaaagcttaggggattgtgagagcccctgatctgtaggcaagccggaagttatgggtcacctggagacccactacttgcaattggcaaatgaagtgggggcagtcttgtgggactgagtccttaatctgtggggcttgtgttaactgtcagcacaagctaaccagtgtcataattgaagtaaagtggacatccagcacccagttggtgtccccagagaattggagaattgctcagtatgacccacacatttggcatcagaagtgtgaatagagaaaagggtttgttgttgttgtttgtttgtttttcatttgagaaagccaagccaggacagtttgcccagacttcagagactgccttcaggctagctcagctgctggtctacctggcttaagcctgagaggacctccatgtgaggaaagtcgsagcagagatgaaaaaccaaacaactagttttacactggtcctcccaaagcatcaggacaatgccacc

SEQ ID NO: 724471 - DNA, 605 bp, Homo sapiens
aactcctccttgcagctaggggtgcccatgtgcccagttttggccaatgagatttaaagagcaattctgataggtaattgcttaggaaagatttctcctctttactgaaaagagatagacacacactatctagctgcctcctgttttctgcctttgaacaaatgattcccagagctgtgacaatcatatttttaccttaagaatygtaaagatagtgacacagagtcctaaaataacagagttatcagtcacctaccttcagactttttgttctaagagttaattatctttattatttaagccaccattagttaactattatgttacatgtagctgaaatcattcctaactgtgactgttcccttataaattactagtgtacaaaagagaatcataaactgataagacatcttactgggctctctttaattttcccagtgtcttcaatggtccttttttcgtaagtctcttccttacccgtttactaaaatgtcattttctagtcaaacatctttcaatggcatatgaactcactaataagaccaataactttccaaaggcctttagggctaagacatacatttaaaactcagggaaattctaca

SEQ ID NO: 724472 - DNA, 605 bp, Homo sapiens
aactcctccttgcagctaggggtgcccatgtgcccagttttggccaatgagatttaaagagcaattctgataggtaattgcttaggaaagatttctcctctttactgaaaagagatagacacacactatctagctgcctcctgttttctgcctttgaacaaatgattcccagagctgtgacaatcatatttttaccttaagaatcgtaaagatagtgacacagagtcctaaaatarcagagttatcagtcacctaccttcagactttttgttctaagagttaattatctttattatttaagccaccattagttaactattatgttacatgtagctgaaatcattcctaactgtgactgttcccttataaattactagtgtacaaaagagaatcataaactgataagacatcttactgggctctctttaattttcccagtgtcttcaatggtccttttttcgtaagtctcttccttacccgtttactaaaatgtcattttctagtcaaacatctttcaatggcatatgaactcactaataagaccaataactttccaaaggcctttagggctaagacatacatttaaaactcagggaaattctaca

SEQ ID NO: 724473 - DNA, 1054 bp, Homo sapiens
agaatcacttccacttgtgttatcggaattttatttttgaaagtcatctatctctcattaatgagtctttagatcaggtctttagattatacctgtgaatttttctttctctttttctgaaatatccaaatgtttccatgagagttttgagggcatgtcagaagtccagatatccttagccatttcaaactctcggatgacaatccattccacttctattcctcctcaaccagttattctgcttggtcagtgttatggttacattgtagtccctcaaaaagatatgttggacccccagtacctccaaatatgagtttatttggaaacagggtctttacagaggtcaagttaaactgaggtgaaaagggtgagtgtctgtgagcacagggttctgggaagcatagagacagatgcctgactcagagtctgaaggctgggaggtagagaggaacgccttgtggagaaacttctgtttcaactgagaccgaaaacagtgaagagtgtttagcaaaggcaccactagcagtgytctggaggagctggagccttccctgtgatttctgttattccccgcaccccatccccagcaacctaatagtaaaaactaacatttattgatattcatgtaccaagcacagtaatcagaagataacttaacagtcattattttatttaatcatcgcaagaatcctgatattactatcctaagtccatagaaagagagactgagatacatggaggctaagaaccttgtctgggatcactaagctgagtgagacacctagcactcgaactcaggcaggctgcttgcaggagctgtgcccttatcctacgtttcctgcgaaggaaaggagcttacctgctctgccaggcaactttgaaacatgtcctctagcatcgttctacccaccttagcgcttcaaatagatggccaccactaaggccctcctttagagaaattctagaatgctcttgaaaatgagccaaacaaataaaagaagtatgggaagttgggagaagggaggaatcctcaggctcttcagaggaagatttt

SEQ ID NO: 724474 - DNA, 820 bp, Homo sapiens
ttgtgaactgcgcgtgcgagggatctaggttgcgcactccttatgagaatctaatgcctggtgatctgaggtggaagagcttcatccccaaaccatccctcatcttccccagcagtggaaaaattgtcttccatgaaaccagtccatcctgccaaaaagattggggacagctctgttaagcaatgccagggaaatctcagtcatttcctccttgacttttctccttcagcctccctcttattactgtatctcaccactgtctcaaaaaccagcccaggctgggtgtagtggctcatgcctgtaatcccagtatttggggaggccaaggcaggaggatcacttgaggtcaggagtttggatagtagcctaaagtaacatagtgagaccctacctctataaaaaawtttttttttaaattagccagatgtgatggtgcatgcctataagccagatgtgatggtgcatgcctatagtcaggagattgaggtgggaggattgcgtcagcccaggagttcgaggctgcactgagctatgatcaaggcgctgcactctagtctgggtttttttcctggttataaaaattattcatggccaaatacacagaaataaaagtcatctatctttttatcacccacaactagactgctgctagtaatttagttttttaaagaaatatatgctttttaacagtctccttgcctgaagccaaagtgttaaaaacaagaccattctacttgttcaatttctaccctatgcctgcacatccagggctcagatgaatttaacattagtaccggatggcccatgctttttatccatg

SEQ ID NO: 724475 - DNA, 820 bp, Homo sapiens
ttgtgaactgcgcgtgcgagggatctaggttgcgcactccttatgagaatctaatgcctggtgatctgaggtggaagagcttcatccccaaaccatccctcatcttccccagcagtggaaaaattgtcttccatgaaaccagtccatcctgccaaaaagattggggacagctctgttaagcaatgccagggaaatctcagtcatttcctccttgacttttctccttcagcctccctcttattactgtatctcaccactgtctcaaaaaccagcccaggctgggtgtagtggctcatgcctgtaatcccagtatttggggaggccaaggcaggaggatcacttgaggtcaggagtttggatagtagcctaaagtaacatagtgagaccctacctctataaaaaaatttttttttaaattagccagatgtgatggtgcatgcctataagccagatgtgatggtgcatgcctatagtcaggagattgaggtgggaggattgcgtcagcccaggagttcgaggctgcactgagctatgatcaaggcgctgcaytctagtctgggtttttttcctggttataaaaattattcatggccaaatacacagaaataaaagtcatctatctttttatcacccacaactagactgctgctagtaatttagttttttaaagaaatatatgctttttaacagtctccttgcctgaagccaaagtgttaaaaacaagaccattctacttgttcaatttctaccctatgcctgcacatccagggctcagatgaatttaacattagtaccggatggcccatgctttttatccatg

SEQ ID NO: 724476 - DNA, 793 bp, Homo sapiens
tgggccagggtgaatttgcagagtggactccttcacccagactgatgcctcattctggtctaggacgagaagaaaaggagaaagaggcctgggactcttggcttttggctgtcacccgccagtctggttactcctacgtctctaggcaggaggccaggagagtttagggaaaacccctctcttagaaagcagaggaatggagaaggagtgttccccatgccttcccaatacaattcagtaacttgcagagggcacacatgattgccgacgctgcattcagaagacaracaagatgcgattcctggttcagaggaactaggtctgctccgcaggtggggaggggaggtcaggtgtggcaacatggtgacaatatcatgtagcaggttgtaaaacagagctaagagtcatgggccatggaacacaggcgggagctgcagcctggactgggcaggtggtgcatgtggggttgcgtttgttgttctaaagggcagatgggcttttaccagcagaagaggagagaagctcatttaggttgaggcatgagtaaagggatggcgatgtgaacagccactgtgggttccctagggtggatagggcagggagaagttcaggatttcagggctggacttgacgctcatcattcgtttcggcctcatagtatgtacagtctcttggtacgtttgtggaatcccctccttgcttcctaccatagaagctgaaaacttgctctcctcgtcttcctggcagtgaaagctccccagtcaggtgctgctggactttggctcaggaacca

SEQ ID NO: 724477 - DNA, 652 bp, Homo sapiens
ttgagacagtctcactctgtcatccaggctggagtgcagtggtctaatcttggctcactgcaacctttgcctcccaagtccaagtgatcctcctgccccagcctcccaagcagctgggattacaagcgggcgccaccacgcctggctaatttttgtattttcagtagagatgaggtttcaccatattggccaggctcaaacttctgacttcaagtgatcctcccacctcagccccccaaagtgctgggattacaggtgcgagccatcgagctcagccatgattggtagtcttattcttgttttcttttttttttttttctgtattagtagagaaattgcttgtggtgcctgaaggtactttttgcttaccttttggatctgatttttgttttgatcagtggtcacaaattcaagatgcrgttagaagccagcttggttttgtaagtcggctggctcagtgagaccgcaggggaaggggtagcagaagagcacaggctcctgccacagtggcccctgctcgttgctccagagaatgggttcttattgtactggaacgtggcctacaagctctggatcttgtggctttttttttcttctctttttttaaataagagaagctggaaattcatgtttttacgcggaattcattggc

SEQ ID NO: 724478 - DNA, 601 bp, Homo sapiens
tgcagaaagttctattgaacagcactggactacattatgatgggcccagctgaagttatgcagtgcgtgacctgcacaactgttcagagtgggcctgtatgaatgaaggacctctctgtgtgcagtactgtgaccgctgctgtgctagctgctgatcaaagaattacacagacatttatagtctaagacaggcatgagaacatctgaaaacacattgtaaagaatggcctctcgatgagtaaatatgggycaaatgaagtaaacagactatgcgtaggtatcatcaaatatagagagaatgaacagaccgaagaagggaaatacaaagaggtttgacgtcctcacagcctaaaaactagtgtctgtttcccttcttgaaatggacattacttggctagaattatttcctggagaaataaacatattagacagaaataaccatgctggctattgaaatatagccaatgaaaatatttgtcttcacgtagcaaccacagaaggtctccatcatggcaaccactgatttttctggataaggtaagatttatgatggtctttctgttgttttcaataaaccatggaaatgtcctatccattgcaa

SEQ ID NO: 724479 - DNA, 601 bp, Homo sapiens
tgcagaaagttctattgaacagcactggactacattatgatgggcccagctgaagttatgcagtgcgtgacctgcacaactgttcagagtgggcctgtatgaatgaaggacctctctgtgtgcagtactgtgaccgctgctgtgctagctgctgatcaaagaattacacagacatttatagtctaagacaggcatgagaacatctgaaaacacattgtaaagaatggcctctcgatgagtaaatatgggtcaaatgaagtaaacagactatgcgtaggtatcatcaaatatagagagaatgaacagaccraagaagggaaatacaaagaggtttgacgtcctcacagcctaaaaactagtgtctgtttcccttcttgaaatggacattacttggctagaattatttcctggagaaataaacatattagacagaaataaccatgctggctattgaaatatagccaatgaaaatatttgtcttcacgtagcaaccacagaaggtctccatcatggcaaccactgatttttctggataaggtaagatttatgatggtctttctgttgttttcaataaaccatggaaatgtcctatccattgcaa

SEQ ID NO: 724480 - DNA, 1542 bp, Homo sapiens
  misc_feature 204, 934, 1106, 1107, 1108, 1109, 1110, 1111, 1112, 1113,1114, 1115, 1116, 1117, 1118, 1119, 1120, 1121, 1122, 1123,1124, 1125, 1126, 1127, 1128, 1129, 1130, 1131, 1132, 1133,1134, 1135, 1136, 1137, 1138, 1139, 1140, 1141, 1142: n = A,T,C or G
  misc_feature 1143, 1144, 1145, 1146, 1147, 1148, 1149, 1150, 1151, 1152,1153, 1154, 1155, 1156, 1157, 1158, 1159, 1160, 1161, 1162,1163, 1164, 1165, 1166, 1167, 1168, 1169, 1170, 1171, 1172,1173, 1174, 1175, 1176, 1177, 1178, 1179, 1180, 1181: n = A,T,C or G
  misc_feature 1182, 1183, 1184, 1185, 1186, 1187, 1188, 1189, 1190, 1191,1192, 1193, 1194, 1195, 1196, 1197, 1198, 1199, 1200, 1201,1202, 1203, 1204, 1205: n = A,T,C or G
taaaagtacctgagacattttcatgggccataagttccctctgctacatacgaaccaagtgctatgaccaggtgaatcctaccctgcaaagatgtaggagtgagagaaatgaaaccccttttcttattcagactcagctttaaaaactccaagagcaaacaaaagctgttcatccattcttgcccaggaagaacctctccatgnataacattcggctattgtgtgcgttggtgcatattaggggcagaatgagtccatctgaatcagtggtgcgctagtaaatagttaacaactggttcactgcaaagaaaaaaacccctgaggtatagcattttctgatttctgtgatgtaaattcccctgccatggtcaatctcaagatgacaacatgatgtcactcaatgtgatgaaggagagaccattatattacatttccaccatacagctactatgaacgtaaataacctcaagatcatagataatagtaaaacacaggaaaatcattagaaaatgatgggtttcgagttatttctactttttcatttaatgtaattatttaattgtaagtttatataatttaatgtttcctgatggctgtctctcacagctggcttgcaaagttcctgaaaatttaacaatcagctcctgtgagctggcataagcttgttccggcacattattgccctggagccactcagtcacatgtctgtgtccctgttgttattgccacttccagcttagaatttctgtgtcatagcttccatggctacctcatgatgcatgatgcgttcttaaaaagtggaaaccagacatagacactgctagggacccagccatatccactttagagctggtgctgccatcccccagctgctgtgagtgctgcatctaatggggaaggggtcacacctgtgttccttcctgaagccttgacnccactataggacctgcctctccctgagatgcttgaagtctgcattgccagtgattacttacaaggagcaaaaatccctttctcttgcctcaaagatgactattcttctgaggagttacactcaaagtatctgtgaatcaagccacagaatgatgagcctttacatggacacnnnnnnnnnnnnnnnnnnnnnnnnnnnnnnnnnnnnnnnnnnnnnnnnnnnnnnnnnnnnnnnnnnnnnnnnnnnnnnnnnnnnnnnnnnnnnnnnnnnnatattttggcaccagcactggtcaattctttatctgacggtgggttgcaaaatatttctagcatcccacaaagtccagtgagggcaaagagggtggaaaattytttcaccatttagccacacagattttctggactttggcaaggaggtgcccagtgtaccatgcttccccccccacagggcaaaggggagggtgaaggtgaagggttctattccccgggctcctggccactcaggacttctgctggcccacggctggaacaatttcctccttgttccacactgtgttattctaaaatgttcactttaggggtgatgggtgggtgagaggagatact

SEQ ID NO: 724481 - DNA, 658 bp, Homo sapiens
actgggtctcaccccgtcgcctgggctggaatgcagtggagccatcttggctccctgcaatctctgcctcccaggttcaagcgattctcctgcctcagcctactctgggattacaggtgtgcaccaccacacccagctagtttttgyagttttagtagagacaggatttcgccatgttggccaggctggtcttgaactcctgacctcaagtgatccacccacctcagcctctcaaaatgctgggattacaggcgtgagccactgtgcctggcctgtttcttctaataatcaaaccaaacactcccagacttagtttccactctgccacaccagcaaaaattatcatcctattttacaggtagggaaactgagattcagggtcaaggtgcctcatctgaggtcatgcagccagtgtgggattctcgttcagggctttccccaccaccggccctgctctgaatcctgggctccttgggtgttgctggagagcatgggccacgtggctgttgtcctgatcacgctcctgcagcctcctctctccaggagtctgaaagctgtctccttgcattgcctcagcagcctgtgaaatccaatccaatgcagtttgtcgggaaagcaaatggactctgcggagaaaacataagatgttgtctgagtt

SEQ ID NO: 724482 - DNA, 1162 bp, Homo sapiens
gcaaggtttcatcaccaccaccagcttattttcaaaccaagtatgattgttgtgacttacaaattttcttgtcttcttcttgttcctacactcactttcttaggctctgggactatggaaaggacaaatgacaactgccacgtgagctcacctcagtgtaagatgacttatggggcctcctgtatactgggggcaaagctaaccctgtttccaactgacagggctatgcatgtctcctcggacttgatactcagaggttttttttttttttttttttttttttagctcaaaatatcaagtaaagtaaatcatttaatctttcttgggaatgaactgttgtgttggccaataatgaacatgaacatgatgcatctgaaagtagaagatgctaatcttgcaaatctattttcttttccttaatgagtacaaagagattttttttttaagtctgtggtcctgcagaaaccaaaagattatggcatacaattatctcactgtcaaaaattacactttggttgaaaatgaagtctactttcttgaatatttagcctttaatttttttgttttgttttgttttgttttttgagacggagttttgcgcttgttgcccaggctggactgcaatggcgtgatctcrgctcactgcaacctctacctaccaggttcaagcagttctcctgcctcagcctcccaattacagctgggattacaggcatgcaccaccatgcccagctaattttgtattttttttttaagtagatatgaggtttcaccgtgttagccaggctggtctggaattcctgacctcaggtgaacctcccaccgcagcctcccaaagtgctgggattacaggcgtgagccaccacacctggcctaattaatctctctttttcatttaagctcattctccattacaagttaagatatgacagccaagcatttactgagggctaataatgcagatgactgaccccaatggcagccacacctggagaggtgccgagcacttgcaactctggtcagaggcttgctccaggggtgaggggtaggagcaaagtcatccagatgagtgttcatctctctgggaagaagagatcagagaggggtctcgggataaagtagaaccaaagaccttgaaggtcaggcaagcttcagagagact

SEQ ID NO: 724483 - DNA, 566 bp, Homo sapiens
taagccatttacttggtggtcatttatcacagcatcaatagaaaacaaatacaagaagtatcaactaatttgtgggtagattttaagactatcacatctatcatcctctttgattggttgttcactaaaaaccctgtattatgtgtctttcatgtgctagcattgggttatatccctaaggatttaaagataaattaaacatgattcttttccccattatgctcatagacagtatttatggaaggactttgtgcaactctaaagggtaatataaatgtaatatattgtgagtcacttccaaagtttaatatgcaacccaaccattccttaatttactaaatcrtaaatcagaatcaatatttcaacagattggaattatgcatatattatgagtaaattgcaaacaaatacagaagataatttgaaaattaaatgtcaacaggatttgcaatagacatttaccatgtctcaaagtaagaaaacctgttagaataagtatactgtgggcaatctcagtgttacaaggctgctaatgagcctctagtacactaagagacagcccctag

SEQ ID NO: 724484 - DNA, 1156 bp, Homo sapiens
agagagagaatgaatatctggaaattaaagcagaattaaggaagagccatttccataagatcaaagagcagtgcaaaggaagaatgagctgctccaacagctccccaaggccctctgctgtcttttatgctaatacattctaaatgtatcttcctgatctggttggattttctcttctcagaaaggtcccccttgatgttcatatgacactctctttgtctatgtccttggtgggggtcagggggaaactgatatctaaaagactgtgtactgtctgggactggaattgttgataggataacatcaagaatgccaattaagtttggagattaggttctgtgatacctctctctctctctctatctctctttctctctccttttgtcctactgagtataccaaggaacctgagttgtgggacgcccaacagtaaccatccacaaatgtgttccaggttggaaaaaaagtatatctatacatatatacacagatgtttatgtaaatttttttaccacaaaaatggtttgcacacattttcactactcaaacacctgaatagcttttggatattttccttctttaagtacatttcgtttctaatacccactatgcatttagyaggacattgaacagaaaagtaaatgaaacactgcaaacacaaatacccctaaagaaatcttaaagacatttaacattgttaatataaatgtgatgccgtgtttgtatataaagcataatgttaagcatctccagcatgtggcacagctcaggttttctgaagaaaaacctatctaccaaaagataactggatatttgtaaagttttactttgctgttatccagaggagtaaaagaaaaagggagcaaaccatttatcaagaaccacttatatgccacacattttgcttgccactttaggagttttatttaagtgaacattaacagtaatcttataatattaaatttaaaaactgtccctaaaagggagggtgaaacatgtcccttgtcaaaaagttaataagaagccaagccaggatgtaaattcaggcctttttctgattccaacatctggatgtttttcatttcatcatgattctttccaaaatttttctaccaaagtatttattctagagctatgtatttacccagtcatactc

SEQ ID NO: 724485 - DNA, 1156 bp, Homo sapiens
agagagagaatgaatatctggaaattaaagcagaattaaggaagagccatttccataagatcaaagagcagtgcaaaggaagaatgagctgctccaacagctccccaaggccctctgctgtcttttatgctaatacattctaaatgtatcttcctgatctggttggattttctcttctcagaaaggtcccccttgatgttcatatgacactctctttgtctatgtccttggtgggggtcagggggaaactgatatctaaaagactgtgtactgtctgggactggaattgttgataggataacatcaagaatgccaattaagtttggagattaggttctgtgatacctctctctctctctctatctctctttctctctccttttgtcctactgagtataccaaggaacctgagttgtgggacgcccaacagtaaccatccacaaatgtgttccaggttggaaaaaaagtatatctatacatatatacacagatgtttatgtaaatttttttaccacaaaaatggtttgcacacattttcactactcaaacacctgaatagcttttggatattttccttctttaagtacatttcgtttctaatacccactatgcatttagcaggacattgaacagaaaagtaaatgaaacactgcaaacacaaatacccctaaagaaatcttaaagacatttaacattgttaatataaatgtgatgccgtgtttgtatataaagcataatgttaagcatctccagcatgtggcacagctcaggttttctgaagaaaaacctatctaccaaaagataactggatatttgtaaagttttactttgctgttatccagaggagtaaaagaaaaagggagcaaaccatttatcaagaaccacttatatgccacacattttgcttgccactytaggagttttatttaagtgaacattaacagtaatcttataatattaaatttaaaaactgtccctaaaagggagggtgaaacatgtcccttgtcaaaaagttaataagaagccaagccaggatgtaaattcaggcctttttctgattccaacatctggatgtttttcatttcatcatgattctttccaaaatttttctaccaaagtatttattctagagctatgtatttacccagtcatactc

SEQ ID NO: 724486 - DNA, 903 bp, Homo sapiens
atggaaataataatagtacctacctcatgggatgtcaagagtaaatataaaaaatgtgtgacacccaggaatgactatataagtactagcagttaatattatttattattattattcctgcttgaataatcactttgagctaaatcactttgtttttactactagcaataagcatgcttaaatacttttaatgttattataatttgtattatagtagactaatctggaattttattaagcagaattccctctagacaggcatctatgcatacggagcaaaaaatgatgtatataataataagtttgaggcactgaaagatcttgaatgagcttctgaatcatcagttactgtatctttgggggtgagtgaattttattacaaagaaacttttttttttttttaaatttggtaatccttaagtaacaatgtgcaaatttctttcaagaagtgctgttgaatgctagggatgagtagtgtgatgactactccaaattaagacaataaggccagtttgacaatcagcaatgtgctatgcagctgaactggaggcacagtggtgctggtgaattgggccagctctggagaatttgaacatatagacagagggcatgatgtctgacttctccaggcactattgcatcccagtccgactttcctaggatcacttcaagtttgatcataaccccaaatccctcagcaccttcattatcmctcataagccacagggcgcttgctggcagcccttgtttctgatctgtttctccaccactgttacttgtattatggcacatgactctgttcccaacaccctcaggccttgggaaggggataggctgaaataagtagatattgctgttgaaagaaacaatttcaatgaggtctccccccacgcatccttgctg

SEQ ID NO: 724487 - DNA, 571 bp, Homo sapiens
tagcttaatgaatatttattgtaatcacagtatagagtttatcctaaatttttacttctttgcacctcgttagagactgaatacagaaactgaaagattagcagcttcaaagaattttaaatacatatctggaatgtctgctattataggtcctgtagttctataggttctgtgattcactaacaattactcagcattgagtattaggaaagcacagactctgtcctcaggttactcacagtctggttgggggcagaaggagaagtagaaaagaaaaagaagaagaaacaaacatgtgcaggatgtctgctgtgtgtcaggcactatatgagatgatatatrcatttcactgaatctccacgaaaatcccatgtggtttggattattatctctctcttccagagaaagaaacagaggttcagagggatacattccccaagatcacacagcttgtaacttgctgcagagcaatgcgataagagctgcactagccagagaaggaggttgcccatgtgataagtacagtgagaacaaataggaaagtgagaaggggctttgctttgttggacag

SEQ ID NO: 724488 - DNA, 571 bp, Homo sapiens
tagcttaatgaatatttattgtaatcacagtatagagtttatcctaaatttttacttctttgcacctcgttagagactgaatacagaaactgaaagattagcagcttcaaagaattttaaatacatatctggaatgtctgctattataggtcctgtagttctataggttctgtgattcactaacaattactcagcattgagtattaggaaagcacagactctgtcctcaggttactcacagtctggttgggggcagaaggagaagtagaaaagaaaaagaagaagaaacaaacatgtgcaggatgtctgctgtgtgtcaggcactatatgagatgatatatacatttcactgaatctccacgaaaatcccatgtggtttggattattatctctctcttccagagaaagaaacagaggttcagagggatacattccccaagatcacacagcttgtaacttgctgcagagcaatgcgataagagctgcactagccagagaaggaggttgcscatgtgataagtacagtgagaacaaataggaaagtgagaaggggctttgctttgttggacag

SEQ ID NO: 724489 - DNA, 609 bp, Homo sapiens
gttctagacagagaaaaaaaagcaagaaggagtttggcttaagaactgacaaaagataagagtggcaggtgtgtcttggacagatggtacaaacaagagatgagggggtaaaggtgggcagggaaaagctgtgggggatttaagtagagagtggcatgccttgatttactcctgtaaatatattctgacagttgcatggagaggaatgggttggaaggaatgagaatgaagcagacagatgagctggaagacagttgggtggcgcagataagagagcaacgtgacttagacaaagtcatggctgtggagatagggagaagatttagattgctctgaatgtggtgcaaaggagagagccttgcaagtatcayaccattccttacgacccacctggggaatcactttcggagccaagactagaaaccaggtctttctatcttctggcagtggtttttgtactacatgatgcaaactctgaagagtcaaaagatctacaaagtttgggcaaatagtttctttgctctgagtcaaattcctttgatttaaaatagagctaagctttgcatggtggcagtaatgtgagcaatgaggtttatccaaggtgtgatt

SEQ ID NO: 724490 - DNA, 3299 bp, Homo sapiens
acaccagattaatttttgcatttttttgtagagacagggtttcaccatgttgctcaggctgttctcaaattcctgggctcaagtgatctgcccgccttggcctcccaaagtggtgggattacaggtgggagccactgcacctggccttgtcttgtatttatagttgaataaaccttccagtacagatgaataagcctgatgagtttgattgtgaggcaacacttttcactgatgtaacatcacaccaggcaaatcatgtgcacctgccaaagccacaaggcaaatactatgttttacagttggctcaatagagaagcaaagaggatataatttaattgtctttatatcattatagctcaaggcaaggtttcatattacttcagaaataattgttttgcagtgagttgaaaagatggttaactatgtgtctcaatgagtgaagtcctgtgtgtctgggactgggtgctgcagcacatagtccacaaagcactggaggtgcttctggccctggcgagatctaggacgaggcatgagctgccatgggaaaggactgctccattgtgctttagaatggtgctccaaccctagtgttttaggtaaggatccatacccatcccaaagagggcaactgtcttccaatgacactgacctttccaacttcaggtctcctcacagacctttctacctacccaaattctcaccctccccgtgtacaagaacctaaggcaaatgacgcaaaagtatctactgccaagggaaaagttggccaagtgtccctcagaagccatttagagcaaactgaacctcatacttgcccacctctgaaataaagtcttcagagcaggttttccctggtcccataaggagtacctgtaacaaaactgaccaaacccctagaggaataaaacacaggtccttcagcctagcccatttctttctgcataaatcctggaggtaagagctggaatggggaggaagaatggggtacctgtgttgacctcaacccaagtggatcttggtgccctgtccataagtcctgccacctcccttgccacaccataaaagggcctggagtgtccagaacacaagactctaagatcctgcatctgagataatccccaatacaagtttacagaaagaagactcccctctctctctcatgaactggggctaaaagaagatgttacctagcagtatgcctggggcctggaggggcatgacagccagatgtgaagatatcccttgtagtggtgatactgaagtcttggatgargctatgacatcaagagaatgaataaattttaaaaggaggcctgaagtttgagaacagaaactaaggaaggcttagatttaaggactgaaaaaaatatggctgatataaagggggaaaagcaattagagggatgggaaaatgaatgcaatgtcacagaggccatggaaaaaaggaaggtggtgttgacactgtgaaatgctgaacagaggtccagagatggaaacccagaaatggatgactggaattcacagagaggttttgaaagtaaagggagctcaagacagatgctgtcaacatcaccagtagagtaggggtaaggtcatctactaaaatgtagtggactaaagacaggactgagggagtaagagtaatgagatttggaagagttaccatggcaaaaatgaggtttcaaaaatgtgaacattaagaagtaacactatactctggggtgggggtctcaacaccggggtaacaggccacataagaagtaagcaaataagcggctacctgtatggttatgatgcacagagcaaggcagctggagctggatgagcagtggctgagatacaggtagtgagatgttggaatagttaggggaatggcatgatgaactagtttcctactgtttctataacaaattactacacatttgtggttcgaaataaagcataaacacagatttattattttacagttccatagattagaagtctggcatgggtctcactactttccttctggagggagagtaggggaggactggttcccttgccttttctctctcttggaagtgggctactttgggccctggaagcagggccttgagccctggtttttctccgaaccagcatatctagccagttctgcgtctgcaggaagcttcagccaaggccctgctttcacccgcagagccagcaacgctgcctgagtagtctcacgtgctctctcctgcctccctctttcacttttaaggtcccttgtgattgcactgggccacgttgatagccctggaaaatctccttaaggtcagctgattagcaacctcaatttcatctatagccttggttcacctttgctatgtaacctaacaggtttggggaaataggacatggacatctttagggggtcattagtctgcctgtcagaattggagaacagatctgtgggaaaagacaaaaaaagaaattgagattcaaataagagatttttgagtaccaaagtagtgatgtgagatgtggacattgagtatgctggtgggggggaagactggggagggtgtcaagaaacgaactggctagatatgctggttctgagaaaaaccagcaagaacaagtcaatacataatgtccttcaaaccggagcatctggctcctgtcacaggcccctggggactgggtgaactcaggacagtggacatgattcattattgtgcttgaaaacagaatccgtacagacatctgtgaattctctggatcttgattccataatttctacttagatataggaagggaagaaaagatagtacgtagcctttttttctgttattaacaagtatctgaacaagcacaaacagaagtttggaaaattatcaggtttttaaattatatcaggaccagttctgcatggggcttaaacttactatgtgccccttctttctttactcacccatgaacgaccagctctctcctccatctatttctatcataagagcatctgaagggggttcaggaggctgacagcacaggaccatcagtaactctactaaagagggaggatggtttctatgacatccaaatgaggggaattcaaagaggcaaaaattgtctgtgtctctatagatttttcaaagaaaggggtaccctgatttatgaacaggagaatctgtttccaatgacaggcatgtccctataatggaaacagatccattcaactatgattgctgaagcagtttgatagtattaattataaaatcaagtcatgtaccatctcacttatgtcatcaaacacctttctgatcacaggttgg

SEQ ID NO: 724491 - DNA, 3299 bp, Homo sapiens
acaccagattaatttttgcatttttttgtagagacagggtttcaccatgttgctcaggctgttctcaaattcctgggctcaagtgatctgcccgccttggcctcccaaagtggtgggattacaggtgggagccactgcacctggccttgtcttgtatttatagttgaataaaccttccagtacagatgaataagcctgatgagtttgattgtgaggcaacacttttcactgatgtaacatcacaccaggcaaatcatgtgcacctgccaaagccacaaggcaaatactatgttttacagttggctcaatagagaagcaaagaggatataatttaattgtctttatatcattatagctcaaggcaaggtttcatattacttcagaaataattgttttgcagtgagttgaaaagatggttaactatgtgtctcaatgagtgaagtcctgtgtgtctgggactgggtgctgcagcacatagtccacaaagcactggaggtgcttctggccctggcgagatctaggacgaggcatgagctgccatgggaaaggactgctccattgtgctttagaatggtgctccaaccctagtgttttaggtaaggatccatacccatcccaaagagggcaactgtcttccaatgacactgacctttccaacttcaggtctcctcacagacctttctacctacccaaattctcaccctccccgtgtacaagaacctaaggcaaatgacgcaaaagtatctactgccaagggaaaagttggccaagtgtccctcagaagccatttagagcaaactgaacctcatacttgcccacctctgaaataaagtcttcagagcaggttttccctggtcccataaggagtacctgtaacaaaactgaccaaacccctagaggaataaaacacaggtccttcagcctagcccatttctttctgcataaatcctggaggtaagagctggaatggggaggaagaatggggtacctgtgttgacctcaacccaagtggatcttggtgccctgtccataagtcctgccacctcccttgccacaccataaaagggcctggagtgtccagaacacaagactctaagatcctgcatctgagataatccccaatacaagtttacagaaagaagactcccctctctctctcatgaactggggctaaaagaagatgttacctagcagtatgcctggggcctggaggggcatgacagccagatgtgaagatatcccttgtagtggtgatactgaagtcttggatgaagctatgacatcaagagaatgaataaattttaaaaggaggcctgaagtttgagaacagaaactaaggaaggcttagatttaaggactgaaaaaaatatggctgatataaagggggaaaagcaattagagggatgggaaaatgaatgcaatgtcacagaggccatggaaaaaaggaaggtggtgttgacactgtgaaatgctgaacagaggtccagagatggaaacccagaaatggatgactggaattcacagagaggttttgaaagtaaagggagctcaagacagatgctgtcaacatcaccagtagagtaggggtaaggtcatctactaaaatgtagtrgactaaagacaggactgagggagtaagagtaatgagatttggaagagttaccatggcaaaaatgaggtttcaaaaatgtgaacattaagaagtaacactatactctggggtgggggtctcaacaccggggtaacaggccacataagaagtaagcaaataagcggctacctgtatggttatgatgcacagagcaaggcagctggagctggatgagcagtggctgagatacaggtagtgagatgttggaatagttaggggaatggcatgatgaactagtttcctactgtttctataacaaattactacacatttgtggttcgaaataaagcataaacacagatttattattttacagttccatagattagaagtctggcatgggtctcactactttccttctggagggagagtaggggaggactggttcccttgccttttctctctcttggaagtgggctactttgggccctggaagcagggccttgagccctggtttttctccgaaccagcatatctagccagttctgcgtctgcaggaagcttcagccaaggccctgctttcacccgcagagccagcaacgctgcctgagtagtctcacgtgctctctcctgcctccctctttcacttttaaggtcccttgtgattgcactgggccacgttgatagccctggaaaatctccttaaggtcagctgattagcaacctcaatttcatctatagccttggttcacctttgctatgtaacctaacaggtttggggaaataggacatggacatctttagggggtcattagtctgcctgtcagaattggagaacagatctgtgggaaaagacaaaaaaagaaattgagattcaaataagagatttttgagtaccaaagtagtgatgtgagatgtggacattgagtatgctggtgggggggaagactggggagggtgtcaagaaacgaactggctagatatgctggttctgagaaaaaccagcaagaacaagtcaatacataatgtccttcaaaccggagcatctggctcctgtcacaggcccctggggactgggtgaactcaggacagtggacatgattcattattgtgcttgaaaacagaatccgtacagacatctgtgaattctctggatcttgattccataatttctacttagatataggaagggaagaaaagatagtacgtagcctttttttctgttattaacaagtatctgaacaagcacaaacagaagtttggaaaattatcaggtttttaaattatatcaggaccagttctgcatggggcttaaacttactatgtgccccttctttctttactcacccatgaacgaccagctctctcctccatctatttctatcataagagcatctgaagggggttcaggaggctgacagcacaggaccatcagtaactctactaaagagggaggatggtttctatgacatccaaatgaggggaattcaaagaggcaaaaattgtctgtgtctctatagatttttcaaagaaaggggtaccctgatttatgaacaggagaatctgtttccaatgacaggcatgtccctataatggaaacagatccattcaactatgattgctgaagcagtttgatagtattaattataaaatcaagtcatgtaccatctcacttatgtcatcaaacacctttctgatcacaggttgg

SEQ ID NO: 724492 - DNA, 1481 bp, Homo sapiens
ctgcctgcctcagcctcccaatttgctgggattacaggcgtgagccactgtgcccagctgcttacacatttttatgtgtgtttgctatttcatgtactgtatcttgtcatttattttcttcctgaatattttgttagactaacacattctagaaaggataggaatgatgggtttttttctattttctttgcaacyctccttagcaactagtatgagtttgctcattttttttttctcacaggtctgattgaatgattttttttaaagctcatgaactcaccaagtagaagacaataaattgtgaacatttttgcctttaaaaagtaaacactgttgaattaagattacatagctcatgtttctagcctctgcattacactgatagtatcttgtctaatttttaactaaaccactgaattattattacttttttttttagatggagtctggctctgtcatccaggctggagtgcagtggcgcagccttggctcactgcaacctccacctctctggttcgagcaattctcctgtctcagcttcccgagtagctgggactacaggtgcatgctaccacgcccagctaatttttgtatttttagtagagacagggtttcaccatattggtcaggctggtctcaaactcctgacctcaggtaatccaaccgcctcagcctcccgaagtgctgggattacagacatgagccaccgtacccagcctaaaccactgaatatttattgtgtgcatggtatagtaatagccgtaagacattgttacaaactgtgttttttagttttgataagatgttagagaaaatattaggagcttggaggaaaggtaatttggctcatattattagggccctttttctcctcatctctcaaatatggtatgatagcaatgcagaggaggctgttgagcagatataggcgtgtgtcactaattgacagtatattctgagaaatgctagaccattttgtcattgtgcaaatatagagtatatttacacaaatttagatggtataacctactgcacacctagttcatatgatatatcccgttcctcctaggctgcaaacctgtatagcatgttactgtactgaatactgtaggcagttacaaagtaaatatttgtgtatctaaacataaattactgaatatagtaaatatttgtgtatctaaacatagaaacgatagtgtaaaaatattgtattataatcgtatggaagcacggttacatatgtggtccatcactgaccaaaatgttatgtggtacataactgtaaattcagtaatgagtcagacgttacaacttaatgggggcataagacagactaacaaatacacacaaaaaaactgtaagactctacagtataaacttgagtaatagtgttgtgggactaggattgtttaaaaggcaatggaataatgaaatcagtgtccacttaaggaaagtgttgtcaagattttctttcttttttt

SEQ ID NO: 724493 - DNA, 1481 bp, Homo sapiens
ctgcctgcctcagcctcccaatttgctgggattacaggcgtgagccactgtgcccagctgcttacacatttttatgtgtgtttgctatttcatgtactgtatcttgtcatttattttcttcctgaatattttgttagactaacacattctagaaaggataggaatgatgggtttttttctattttctttgcaactctccttagcaactagtatgagtttgctcattttttttttctcacaggtctgattgaatgattttttttaaagctcatgaactcaccaagtagaagacaataaattgtgaacatttttgcctttaaaaagtaaacactgttgaattaagattacatagctcatgtttctagcctctgcattacactgatagtatcttgtctaatttttaactaaaccactgaattattattacttttttttttagatggagtctggctctgtcatccaggctggagtgcagtggcgcagccttggctcactgcaacctccacctctctggttcgagcaattctcctgtctcagcttcccgagtagctgggactacaggtgcatgctaccacgcccagctaatttttgtatttttagtagagacagggtttcaccatattggtcaggctggtctcaaactcctgacctcaggtaatccaaccgcctcagcctcccgaagtgctgggattacagacatgagccaccgtacccagcctaaaccactgaatatttattgtgtgcatggtatagtaatagccgtaagacattgttacaaactgtgttttttagttttgataagatgttagagaaaatattaggagcttggaggaaaggtaatttggctcatattattagggccctttttctcctcatctctcaaatatggtatgatagcaatgcagaggaggctgttgagcagatataggcgtgtgtcactaattgacagtatattctgagaaatgctagaccattttgtcattgtgcaaatatagagtatatttacacaaatttagatggtataacctactgcacacctagttcatatgatatatcccgttcctcctaggctrcaaacctgtatagcatgttactgtactgaatactgtaggcagttacaaagtaaatatttgtgtatctaaacataaattactgaatatagtaaatatttgtgtatctaaacatagaaacgatagtgtaaaaatattgtattataatcgtatggaagcacggttacatatgtggtccatcactgaccaaaatgttatgtggtacataactgtaaattcagtaatgagtcagacgttacaacttaatgggggcataagacagactaacaaatacacacaaaaaaactgtaagactctacagtataaacttgagtaatagtgttgtgggactaggattgtttaaaaggcaatggaataatgaaatcagtgtccacttaaggaaagtgttgtcaagattttctttcttttttt

SEQ ID NO: 724494 - DNA, 603 bp, Homo sapiens
ttataactgcagagacttaaaaccaacccacatgtccatcaatgatagagtgaataatcaaaatgtagcacatatacatcatagaatactatgtagccataaaaaagaatgagttcatgtctttgctgggacatggatgaagctggaaaccatcattctcagcaaactaacccaagaacagaaaaccaaacaccgcatgttctcactcataggtgggagttgaacaatgagaacacatggacacagggaggggaacatcacacaacagggcctgtcaggggttgcggggcaaggggagggagagcattaggacaaatacctaatgcatgaggggcttaaaacctagatgatgggttgrtgggtgcagcaaaccaccacagcacatgcgtaactctaacacacctgcatgttctgcacatgtatcccagaacttaaagttaaaaaaaaaattcttgttctgattcagaagcttggtttaggcttctctgattcttggttatcctggtcctactgatattcctcatgcagccctctctttctgtcccctagtgtcaaggcttgtgctgaggcccttgccattatttgaagaaaagcctatgactt

SEQ ID NO: 724495 - DNA, 644 bp, Homo sapiens
taacaaagctcaggctatcactatcgtcccacactcaacacgtattttaaacttctttccatttgagcaaatttttcaccaaactttataatataagcccctctaaggaagtttacttcctcattttggtaaatttcctgctcatgcatttttataagcttgcgatagccaacctagttcctagaagactcatgcattatagacctttgataggaaaggtgaggattaaaattcattattattttatcttttggtttctgtggtcacagagtgtataagacaaggacatacactgtgtgcaatatcagacatcctgctgcaaaatggctgtggtctggcaaggctgggracagcttttgtgggtttgcagtgatatttgaagtttgatgaatgaatacaaaatgcatcactggtataatctaaatgatgtgacataatttatgctccaactgttaaactccaataaatcccagccaatgacaggaaaatcccagatgttgggccattctggaaactaagtacacgggcctcagtgaatttatgatctttctgtttttgactcctttctcccattttggagattagttcttctctcgttaattctaccctgcaaaatgtgcaagctaaaactgcctcacaaacct

SEQ ID NO: 724496 - DNA, 544 bp, Homo sapiens
gtctgcctgaaagaacaaacatgggccgtgcgcggtggctcatgcctgtaatccctgtactttgggaggctgaggcaggtggatcacaaagtcaggagttcgagaccatcctggctaacacggtgaaaacccgtctctactaaaaacacaaaaatttagccaggcatggtggcgggcgcctgtagtcccagctactctgaaggctgaggcaggagaatggcatgaagccgggaggtggagcttacggtragctgagatcatgccactgcactccagcctgagtgacagagcgagactctgtctcaaaaaaaaaaaaaaaaaaaaaaaagaacaaccatggtgttttaaaatccttagatactgagagtttctgaatatttttcccttttcttaagcaccaagtcatatccagacccatattgtactctgtaaatacttcattttcttaaatagaacttctgaaaatagttttaaaaaatatgtaattactggggattctaagatggccgaatagaacagctccagtctatagctcccagcatga

SEQ ID NO: 724497 - DNA, 544 bp, Homo sapiens
gtctgcctgaaagaacaaacatgggccgtgcgcggtggctcatgcctgtaatccctgtactttgggaggctgaggcaggtggatcacaaagtcaggagttcgagaccatcctggctaacacggtgaaaacccgtctctactaaaaacacaaaaatttagccaggcatggtggcgggcgcctgtagtcccagctactctgaaggctgaggcaggagaatggcatgaagccgggaggtggagcttacggtgagctgagatcatgccactgcactccagcctgagtgacagagcgagactctgtctcaaaaaaaaaaaaaaaaaaaaaaaagaacaaccatggtgttttaaaatccttagatactgagagtttctgaatatttttcccttttcttaagcaccaagtcatatccagmcccatattgtactctgtaaatacttcattttcttaaatagaacttctgaaaatagttttaaaaaatatgtaattactggggattctaagatggccgaatagaacagctccagtctatagctcccagcatga

SEQ ID NO: 724498 - DNA, 1373 bp, Homo sapiens
tgttggataaggagaggcagggctgcttatttatgctagatgagtagcaatcttcaaattcatatcataattttaatttataatttttgtccaaaatgggacaaaaaaaaaaaaaacggcaagggagcagaatggtggtgatggggagaagtagaaaaaggggaaaaaaaggacccatttgaattctcaagaaataattatttggtagtgttttattaatttgaattataggaaagctcaatgatatcactcttacatgtagataggttgtagggcatctttaaggtcaagtgttcagaaaagcgagttaacagacttttaatggtgggcatttctttagcagcagatgtgaccccatgtttctcaatgaccccaaggcaagagtgatgggcccccatatttctcaatgcccccaaggcaagagtgatgggcccccatgtttctcaatgcccccaaggcaagagtgatgggcccccatgtttctcaatgcccccaaggcaagagtgatgggcccccatgtttctcaatgcccccaaggcaagagtgatgggcccccatgtttctcaatgcccccaaggcaagagtgatgggcccccatgtttctcaatgcccccaaggcaagagtgatgggccaggggctagaggaagctccagaagaaacacagccattgcccatcttcctggaacatcagttcttcatggagaattatgtttatattgagataaacattatgaaaattttaaagtgtctatatttaaaacagaacataaaattgaatcaaatttccactgatgacaggccgtttggagttatactgcatcaccccctgagagtaagtatttatttttctctgtaggtagaaaaatttaagagtcactgatctagaccatcccccttgactttagagtttaggaaattgtgccacagagatattaaattgccatggcaacccaaatctgtaaactctggtgctgtttattcatacaggctgtaccttcacggtcctaggacgatgggaayagctccaaaccttacaatgtcccattttcacatcaaacatggaaagcaaaatctattttccacaaataacaggtttataagagtttactgcatctcattaggtctaattgggtcatgtccttacaaaaccaatcaccccttctgaggtaattataatgcttttcttggcttatgcccaaatgctccatctcttcctgggatggaggtttactcaaagcacgtggttagaaattaggggatggattggttgccatccactcaggaaaaaaaataggttatgatcatgaaaggaagggtaactggattctgggtggcaaaaataagagatgtgcactaataatactcttctgat

SEQ ID NO: 724499 - DNA, 665 bp, Homo sapiens
tccccctctggctccctcgaggcctacttccttcagaaggattaaaaaaaattgataccaacactttgttaatcaaagaaaatgaaataaacttttttacacaaaaaatgatcatgttttacataagactaaaagatatatatatatataaaatgggtgaggatatccaggacccaccaaataattccagtaagaaaattcaaacacttaacaaagattcatttttcaatagcccattagtcacagaacaattacccaactattaacaattaaacctacctgtatattaaaaatacatttcatttcacccatacatccaacacactttaaaatggatagaggaaaattttattaactggctttagaaaaaaaaaagtacctattgaactcatatattattattattattttgaggcagagtttcgctccgtcatccaggctggattacgtggcaccatctcatctcactgcaacctccacctctggggttcaagwgattctcctgcctcagcctcctgagtagctgggattataggcatgagccaccatgcccagctaattttttctatttttagtagagatggggtttcaccatgttggtcagactggtctcgaactcccaacctcaggtgatccgcccacctcagcctcccaaagtgctggga

SEQ ID NO: 724500 - DNA, 665 bp, Homo sapiens
tccccctctggctccctcgaggcctacttccttcagaaggattaaaaaaaattgataccaacactttgttaatcaaagaaaatgaaataaacttttttacacaaaaaatgatcatgttttacataagactaaaagatatatatatatataaaatgggtgaggatatccaggacccaccaaataattccagtaagaaaattcaaacacttaacaaagattcatttttcaatagcccattagtcacagaacaattacccaactattaacaattaaacctacctgtatattaaaaatacatttcatttcacccatacatccaacacactttaaaatggatagaggaaaattttattaactggctttagaaaaaaaaaagtacctattgaactcatatattattattattattttgaggcagagtttcgctccgtcatccaggctggattacgtggcaccatctcatctcactgcaacctccacctctggggttcaagagattctcctgcctcagcctccygagtagctgggattataggcatgagccaccatgcccagctaattttttctatttttagtagagatggggtttcaccatgttggtcagactggtctcgaactcccaacctcaggtgatccgcccacctcagcctcccaaagtgctggga

SEQ ID NO: 724501 - DNA, 665 bp, Homo sapiens
tccccctctggctccctcgaggcctacttccttcagaaggattaaaaaaaattgataccaacactttgttaatcaaagaaaatgaaataaacttttttacacaaaaaatgatcatgttttacataagactaaaagatatatatatatataaaatgggtgaggatatccaggacccaccaaataattccagtaagaaaattcaaacacttaacaaagattcatttttcaatagcccattagtcacagaacaattacccaactattaacaattaaacctacctgtatattaaaaatacatttcatttcacccatacatccaacacactttaaaatggatagaggaaaattttattaactggctttagaaaaaaaaaagtacctattgaactcatatattattattattattttgaggcagagtttcgctccgtcatccaggctggattacgtggcaccatctcatctcactgcaacctccacctctggggttcaagagattctcctgcctcagcctcctgagtarctgggattataggcatgagccaccatgcccagctaattttttctatttttagtagagatggggtttcaccatgttggtcagactggtctcgaactcccaacctcaggtgatccgcccacctcagcctcccaaagtgctggga

SEQ ID NO: 724502 - DNA, 665 bp, Homo sapiens
tccccctctggctccctcgaggcctacttccttcagaaggattaaaaaaaattgataccaacactttgttaatcaaagaaaatgaaataaacttttttacacaaaaaatgatcatgttttacataagactaaaagatatatatatatataaaatgggtgaggatatccaggacccaccaaataattccagtaagaaaattcaaacacttaacaaagattcatttttcaatagcccattagtcacagaacaattacccaactattaacaattaaacctacctgtatattaaaaatacatttcatttcacccatacatccaacacactttaaaatggatagaggaaaattttattaactggctttagaaaaaaaaaagtacctattgaactcatatattattattattattttgaggcagagtttcgctccgtcatccaggctggattacgtggcaccatctcatctcactgcaacctccacctctggggttcaagagattctcctgcctcagcctcctgagtagctgggattayaggcatgagccaccatgcccagctaattttttctatttttagtagagatggggtttcaccatgttggtcagactggtctcgaactcccaacctcaggtgatccgcccacctcagcctcccaaagtgctggga

SEQ ID NO: 724503 - DNA, 1080 bp, Homo sapiens
tgtatttgatacttattaaatagttatcaaatttcagaaatgccagattagagattggcaatctttaaggttccttttaattttacccttcatagatataaaaatcattaaagagaaaccactactccctctactttatggttgaaaactttagccccttctagaaaaatagtctatgtgcgccttcaagtccatacacatctgaacaaaagaatctgccacactgttggagtctcagaatgctcaaaactagcaatgtcactgggcactcccatggtgcggtacttcagccaaggcctaaaagcaactattctccaaacacagtttcaaaaccctataattataaaattctgtttgtggcctttcaaagttgctgtttgtaacatttttaaagtctagaacacaaaaaccaccattctaaatgatagaaggttgtttttttttttcacctcatcagttatttatgccactcaaacacatcattgtgtttactgttcagcttctatatcattagggatgaacaataggaaaaaaataattgccgaacagacaaaattctggcaaattgataggataatgacattataagtaaataataattacmcaatagtatagcttgtgctaatataacttattgtgcctactgagcctacaattagcatcaatgtttttaataccagccaaattaatttcatagttgacatttctagcacaaagtattagtaattttcaatcttgtattttctaatcccagaaccacctactgatactggagaatgtttagaactactaactgcgatggccgggcacggtggctcgcgcctgtaatcccagcactttgagagaccaaggcaggtggatcaactaaggtcaggagtttgagaccagcctggccaacatggtgaaaccctgtctgtactaaaaatacaaaaattagccaggagtggtggcgggtgcctataatcccagctacttgggaagctgaggcaggagaattgcttgaacccgggaggcggaggttgcagtgagccaagatcaagccattgcactccagctgggccacaagagcaaaaaaaaaaa

SEQ ID NO: 724504 - DNA, 1080 bp, Homo sapiens
tgtatttgatacttattaaatagttatcaaatttcagaaatgccagattagagattggcaatctttaaggttccttttaattttacccttcatagatataaaaatcattaaagagaaaccactactccctctactttatggttgaaaactttagccccttctagaaaaatagtctatgtgcgccttcaagtccatacacatctgaacaaaagaatctgccacactgttggagtctcagaatgctcaaaactagcaatgtcactgggcactcccatggtgcggtacttcagccaaggcctaaaagcaactattctccaaacacagtttcaaaaccctataattataaaattctgtttgtggcctttcaaagttgctgtttgtaacatttttaaagtctagaacacaaaaaccaccattctaaatgatagaaggttgtttttttttttcacctcatcagttatttatgccactcaaacacatcattgtgtttactgttcagcttctatatcattagggatgaacaataggaaaaaaataattgccgaacagacaaaattctggcaaattgataggataatgacattataagtaaataataattacacaatagtatagcttgtgctaatataacttattgtgcctactgagcctacaattagcatcaatgtttttaataccagccaaattaatttcatagttgacatttctagcacaaagtattagtaattttcaatcttgtattttctaatcccagaaccacctactgatactggagaatgtttagaactactaactgcgatggccgggcacggtggctcgcgcctgtaatcccagcactttgagagaccaaggcaggtggatcaactraggtcaggagtttgagaccagcctggccaacatggtgaaaccctgtctgtactaaaaatacaaaaattagccaggagtggtggcgggtgcctataatcccagctacttgggaagctgaggcaggagaattgcttgaacccgggaggcggaggttgcagtgagccaagatcaagccattgcactccagctgggccacaagagcaaaaaaaaaaa

SEQ ID NO: 724505 - DNA, 1080 bp, Homo sapiens
tgtatttgatacttattaaatagttatcaaatttcagaaatgccagattagagattggcaatctttaaggttccttttaattttacccttcatagatataaaaatcattaaagagaaaccactactccctctactttatggttgaaaactttagccccttctagaaaaatagtctatgtgcgccttcaagtccatacacatctgaacaaaagaatctgccacactgttggagtctcagaatgctcaaaactagcaatgtcactgggcactcccatggtgcggtacttcagccaaggcctaaaagcaactattctccaaacacagtttcaaaaccctataattataaaattctgtttgtggcctttcaaagttgctgtttgtaacatttttaaagtctagaacacaaaaaccaccattctaaatgatagaaggttgtttttttttttcacctcatcagttatttatgccactcaaacacatcattgtgtttactgttcagcttctatatcattagggatgaacaataggaaaaaaataattgccgaacagacaaaattctggcaaattgataggataatgacattataagtaaataataattacacaatagtatagcttgtgctaatataacttattgtgcctactgagcctacaattagcatcaatgtttttaataccagccaaattaatttcatagttgacatttctagcacaaagtattagtaattttcaatcttgtattttctaatcccagaaccacctactgatactggagaatgtttagaactactaactgcgatggccgggcacggtggctcgcgcctgtaatcccagcactttgagagaccaaggcaggtggatcaactaaggtcaggagtttgagaccagcctggccaacatggtgaaaccctgtctgtactaaaaatacaaaaattagccaggagtggtggcgggtgcctataatcccagctacttgggaagctgaggcaggagaattgcttgaacccgggaggcggaggttgcagtgagccaagatcaagccattgcactccagctgggccmcaagagcaaaaaaaaaaa

SEQ ID NO: 724506 - DNA, 589 bp, Homo sapiens
cactttgggaggccgaggcgggtggatcacgaggtcaggagatcaagaccatcctggctaacacagtgaaaccccgtctctactaaaaatacaaaaaattagccgggcctggtggtgggcgcctgtagtcccaagctactcgggaggctgaggcaggagaatggcgtgaacccgggaggcggagcctgcagttagcagagatggggccactgcactccagcctgggcgactccgtctccaaaaaaaaaaaaaaaaaaaaaaaraaaagaaaagaaaagaaagggtaaattttatggtgtgaggattacatttctataaagctgttattcttttaaaaataacagaagaatacgggaagaaccttaagaaacaaggagtagacagacaacgaatgtatgtattgaaaactattttggattatttcttaggacaaacacacacacaaaaaaattgttctctttccagctctgcaggatctagacaagtgaactgttcaggtcttgcaacaacttagaaggcctatcagactggcaggagctcaagggggacagctggacttacacaagtagcgcccaccacagctgcaagc

SEQ ID NO: 724507 - DNA, 797 bp, Homo sapiens
taaaacaagtattatcaaaattaaaaaggagcttgaagtcatgtagcctaatgttcttctttttaaagatgaggaaaagagatattcagagaaacaagtgaatttacctaaattacccagccaaggagttacacttcccatatatcatatttattgcatatataagtaagcaacaacttctcttctttaagcaacaatacttaaagcagagagaatatatgagtataggtgactgtctgaagtttttatataaagattgctgttagtgggtagatttgatgagtgatcaaatacggcttactctagtgctgtttgtccaccattgaatttagcacagttatcactggttgtccttgaagaaaagcaaaaaattagaaaaagttaacctgcactaaactctgacctagttcagaaatgccttcgataaaacttaacaaaacaattacttcaagcatgtatctgagggaactggcttcatttcaatttatttagggttcttgaagtactttaaaagtatgccttaaaatcccatttcaattatctttaataagatcaacttgtctgatatagrtgcaatatgagaggcagagcaaaaaatacttcccttttcaaataattctttctaaaacgattacggtccattttcttaaaaccacctcagggtggtgagtcatgtttgtcattttaactttcttctgtcttaggaagaactcagatggaatatctcttggctccaagatgatttctttaatgaatatctgatggtgggaacttgctaataacactatgataaaaag

SEQ ID NO: 724508 - DNA, 607 bp, Homo sapiens
atccaaactgccaccaagtgtgaaaacgtcagcacactaagaggatggtacagcaagagcctaggttagaaataataaacatattcacaggctgaacaagtcttataggtcaagggaagtatctgaaagaactcaatgttcttcttaagagctaattacacagacagtgacatcatcaatggcatcaacgaacttctcccccaaaaaggaaacaaatgagactttaagagaaataacaattttaataacaacattggctgaaggaatatccaacatttttagagcatgtcagaattgacagcgcgcttccagatgcaggatcacatttgattccctctttacagataaggaaactgaggctctsagagtttgacctgtcatgatgccacacggctagtgataccacatggcaaagaaggaattcaaaaccaaataatctgaggcaaaagttctttccttgctaatgcctataaaagtataaaagcattgctatgaaagtataaaatattgctataaaagcactgctataaaagtataaaattaagccctgttaagtgaatgggtgcccactagaataggcttttacagttggactgaatatacctga

SEQ ID NO: 724509 - DNA, 744 bp, Homo sapiens
tgcactccagcctgtgtgacagagcacaatcttgctcttaaaaaaaatcataataacaatttaaaaaaacctttaacatataaaattcccttcaatataagtcttacacatactgaaagagaaaatgtaatggatctattcacctcaaatgcagatgagatgagaaaattattgtggtgtgtaataatgctttacaagtaattcagagggacmtccacttaaaggggaaaaagtagcgctggttgttttgcttttttttcttttttcaggccgagtctagctctgttgcccaggctggagtgcaatggcacaatctcggctcactgcaagctccgcctcccaggtccacgccattctcctgcctcagcctcccgagtagctgggactacaggcgaccaccaccatgcccagctaattttttgtatttttagtagagacagggtttcactgtgttagccaggatggtctcgatctcctgacctcatgatccgcctgcctcagcctcccaaagtgctgggattacaggtgtgagccactgcgcctggccagcgctgtattataatagtgatctctgcatgaatatccaaaacaggagctggcaatttgagtatttctttacatatacacacttctcaagaattttccaggaatcttccaaggaaggaatcaaattgcaattgcacagcttttaacaatcttgaagtcatttgggatgtggacccacacatgggttctgtttcaccc

SEQ ID NO: 724510 - DNA, 1194 bp, Homo sapiens
gcccaggctggagtgcccaggctggagtgcagtggtgtgatctcagctcactgcaacctccacctcctgggttctagcgattctcctgcttcagcctcccgagtagctggggttacaagcacccgccaccacgcccagctaatttttgtgtatttagtagagctgggttttgccctgttggccaggctggtcttgaatacctgacctcaagtgatctgcccccccgacttcccaaaatgctgggactactggcatgagccagtgctcctgtcctcattccattyttcaccgtggtactgaccatccatttattcagcaccaattgtgtgccagaccttgtgtcagcattatggaggacttcccttgggaggcttgttagctgtacttgcaatctgatttgggttcccaaatcagcatataacaccaggtatttctctaatagagtatgtgccacactttctgctaactgcctgtttatcagtgtccccacatcccaatatctggttccttcaagggcagggagcacagggtatggcgtcagagtggtactcagtgatgtttactggtgggtagaaggaagggttagtccctgtttttgaagactttatgttctagcaggcagaaatgaagcacaaatagttcaagaaataaacaatttaggaataaagtcatttggtttgcttcgcagaaatgtcttattgctgatttgccagcatgagtggcaaatatataataaaacctggccgggcatggtggctcacgcctgtaatcccagcactttgggaggccaaggtgggcggatcacgtggtcaggagatcaagaccatcctggccaacatggtgaaatcccatctctactaaaaatataaaaattagccaggcatggtggtgggcgcctgtagtcccagctacttgggaggctgaggtaggagaattgcttgaacccagaaggcggaggttgcagtgagccaagattgccccactgcactccagcctgggtgacagagtgagactctgtcccaaaaaataaaaataaaaataaatgaatatataaaataaaaaatatatgtatacatatcatatatatatataaaataaaacttataaatagtttttatggctgggtgaagtgactcatgtctgtaattctagccctttgggaggctgagcgaggaggatcacttgagcctaggc

SEQ ID NO: 724511 - DNA, 1194 bp, Homo sapiens
gcccaggctggagtgcccaggctggagtgcagtggtgtgatctcagctcactgcaacctccacctcctgggttctagcgattctcctgcttcagcctcccgagtagctggggttacaagcacccgccaccacgcccagctaatttttgtgtatttagtagagctgggttttgccctgttggccaggctggtcttgaatacctgacctcaagtgatctgcccccccgacttcccaaaatgctgggactactggcatgagccagtgctcctgtcctcattccattcttcaccgtggtactgaccatccatttattcagcaccaattgtgtgccagaccttgtgtcagcattatggaggacttcccttgggaggcttgttagctgtacttgcaatctgatttgggttcccaaatcagcatataacaccaggtatttctytaatagagtatgtgccacactttctgctaactgcctgtttatcagtgtccccacatcccaatatctggttccttcaagggcagggagcacagggtatggcgtcagagtggtactcagtgatgtttactggtgggtagaaggaagggttagtccctgtttttgaagactttatgttctagcaggcagaaatgaagcacaaatagttcaagaaataaacaatttaggaataaagtcatttggtttgcttcgcagaaatgtcttattgctgatttgccagcatgagtggcaaatatataataaaacctggccgggcatggtggctcacgcctgtaatcccagcactttgggaggccaaggtgggcggatcacgtggtcaggagatcaagaccatcctggccaacatggtgaaatcccatctctactaaaaatataaaaattagccaggcatggtggtgggcgcctgtagtcccagctacttgggaggctgaggtaggagaattgcttgaacccagaaggcggaggttgcagtgagccaagattgccccactgcactccagcctgggtgacagagtgagactctgtcccaaaaaataaaaataaaaataaatgaatatataaaataaaaaatatatgtatacatatcatatatatatataaaataaaacttataaatagtttttatggctgggtgaagtgactcatgtctgtaattctagccctttgggaggctgagcgaggaggatcacttgagcctaggc

SEQ ID NO: 724512 - DNA, 658 bp, Homo sapiens
aattagagcaaattatctgaaatttgatgtcatgtcactgtttcagtgttatttggatttttttttttttttaaacagggtctcactctgtcacccaggctggagtacagtggtgagatcacaggtcacgtaacctcaaacttttgggctgaaacgatccttccgcttcagcctgctgagtagctgggactatagtttcacaycaccatgcttggcgttatttggatgttttttaaaaattgtggttaaatgcacataaaaattaccgtgttaggccaggtgcaatggctcacccctgtaatcccagcactttcagaggccgaggcgggcagatcacgtgaggtcaggggttcaagaccaggctggccaacatggtgaaaccccgtctttactaaaaatacaaaaattagctgggcgtggtgtcatatgtctatggttccagctactcaggggactgaggcaggagcatcatttgaacctgggaggcaaacgttgcagtgagtagagatcgcgccagcctgggcaacaagagtgaaactctctctcaaaaaaaaaaaaaaattaccgtattaggtcaggtgcggtggctcatgcctgttatcccagcactttgggaggccaaggtgggcagattgcttgagcccaggagtttgagacc

SEQ ID NO: 724513 - DNA, 605 bp, Homo sapiens
tcattgcattccagatgattttctcaggtctacatttaasttactcaacattcttctcagctgctttatatcatattaaataaacccttcaactgtgttcttttttgctttttaaatataattccattattctaaatttaattgtgttttccatttctagagtttctttttttattctgtattaagttgccctatattttctatgtgcagctaatcttatacttttcatttctttcttttacttctaggtgattttaagcatacttttctgaaagtctttttttaagtctacttcattttctactgtggtttatgaaatgtcatataagttcatttgcagtagcattgttttccgtcagtaccctttgttgtgaaattgtccgtatgaggtatatttagtcagtgccctgcccagggtcctatgtctttcattgtttccaaactacattttaatttgactttgggtttctgcatcgtccttccggagtaatgtatatcctacacatgagtaaaaaaggtcttaattttttgtattttttttctcaccaatgcaggtagatgaaaactgtcctcactgctgcccaaggcttatgtctagagtctat

SEQ ID NO: 724514 - DNA, 605 bp, Homo sapiens
tcattgcattccagatgattttctcaggtctacatttaagttactcaacattcttctcagctgctttatatcatattaaataaacccttcaactgtgttcttttttgctttttaaatataattccattattctaaatttaattgtgttttccatttctasagtttctttttttattctgtattaagttgccctatattttctatgtgcagctaatcttatacttttcatttctttcttttacttctaggtgattttaagcatacttttctgaaagtctttttttaagtctacttcattttctactgtggtttatgaaatgtcatataagttcatttgcagtagcattgttttccgtcagtaccctttgttgtgaaattgtccgtatgaggtatatttagtcagtgccctgcccagggtcctatgtctttcattgtttccaaactacattttaatttgactttgggtttctgcatcgtccttccggagtaatgtatatcctacacatgagtaaaaaaggtcttaattttttgtattttttttctcaccaatgcaggtagatgaaaactgtcctcactgctgcccaaggcttatgtctagagtctat

SEQ ID NO: 724515 - DNA, 624 bp, Homo sapiens
gtcaggtgatccacctgcctcggcctcccaaagtgctgagattacaggcatgagccaccgtgcccagccacatttttttttttttttttttttttttttgagacgaagtctcgctctgttgcccaggctggagtgcggtggcgcsatctctgctcactgcaagctccgcctcccgggttcatgccattctcctgcctcagcctcccgagtagctgggactacaggcgcccgccaccacgcccggctaattttttgtatttttagtagagatggggtttcaccgtgttagccaggatggtctcgatctgacttcgtgattcacccgccttggcttcccaaagtgctgggattacaggcatgagccaatgtgcccggccggccacctctattttttaaaaaataaatttaaaacctatagcacctggaattcccagccaatctctcatccaagtactaaccaggcccgaacctgcttagcctccaagatcagaaaagatcagtcacattcagggtggtatggactgtagacttacctctgtctacactgtaagaagtgacagaggttagaaccatatgtaacacctttctgttgccctcatggaacctaaaacagtgccctgcaac

SEQ ID NO: 724516 - DNA, 2057 bp, Homo sapiens
gaccagcctggccaacatggtgaaaccctgtgcctactaaaaatacaaacactagacgggtgtggtggtgggggcctgtaatcccagctactcgggaggctgagacaggagatcgcttgaacctgagaggtggaggttgcagtgagccagaattgcactccagcctgggcaacagagtgagactctgtctccaaaaaaataataaaaataaaataaaaataaaaatgtaaaaaatgttttaccttttaaaaaaaatttttatacagacagggtctcaccatcttgcccaggctggtctcaaactcctgggctcaagtgatcctcttgcctcagcctcccaaagtgctgggattacactgccatcactgccaggtctctgtctttaaaaaaaaattatatatatattatatatgcaaatattatatataaaatatataataatatatataatatataaatatatatattatacatatataattattagctcgcaggtcatacaaaactggccacaggagggccaaagtttgctaattcctggtttagaggatagatgatatacccatattatctagctttgtaatcatggctcctctgtttattagttgtgaacaagttacttaacctctgtgtctcagtgtttgcaactgtacaatgggaacactactatctcaatttttttttttttttgccaatcaagatcagtacaacctacctcatacttttattgttgtgaggaccaaatgtgttaacttttttttttttgagatggaatttcactcttgttgcccaggatggagtgcagtggtgcaacctcagctcgttgcaacctccgcctcccgggttcaagggattctcctgactcagcctcccaagtagctgggatwacaggcgcccgccaccacacccaagtaattttttttttttttttttgtatttttagtggagatggagtttcaccatgttggccaggctggttttgaactcctgacctcaagtgatctgcccacctcggcctcccaaagtgctaggattataggcgtgagccaccgcgcccggccatatgcgttaacttttataaagaacttacagacacttagaacagtgtctggcacagagtaaacgcagtgcaagtgttttgctattatttgtgtgatctattatctgccttccccagttagctcatatgcctccaaacagcagaaatcttgtcttatttacatggcatagaactatgctcagctcaataaacatttgttaaatagatgagcacatacagaccccctacggggaagacagggtaggaaaagtccctgcgaggagtgcccagataggtaggcccctgaagagagggagtggagattcagtggagaaggcaggaaaaacaatcaaacaggctggagatggagcaactgctcagcaagaatgatgcccacacctaagggcattaccttagaagcaccattcctggatgtctcagtccccagatagcctgaagtctgcaaaaactaggagactgaaaggacagctggagggatggaggtcaagcataaggaaggacattcaaggttgatgagagcaaggaatggctggggaaccctagtgactaccagaccctcttcccaccctttcaaggacccaaccaaatgatgagaggagccacagccaggcccgatggtttttatttctttcagttatgcttgcggctggagtggggacgggggaagagcccatggcctgggctccctggagaccagggctgatgataccagctgccataggtgaggtaccaggcaaaggtgcccactgcggcgcccaccaccttgtgagtgtactggtggaaatagatgacggtacagagcagcaagaagttccagaggcccagcagcagcacgttcagcaggaagacaaggcgcagtggggcgccggcaggaagcccatgggccaggtacttggcgaacacagctgcttcctctgccatgagcaggcagcaaaaggtgagcaggaaggtgtgggaggagacggtgtagcctcgccactggtggccggctgccagg

SEQ ID NO: 724517 - DNA, 748 bp, Homo sapiens
aggtactgcctacttccatgcagtatttcaaatgcagtagaactttctataaagatatcctttgcaagttatgagttatcactatcaaaaatataaacttttaaggatttatagacctgggaaatggaatgtgacaatgctttactgataagggcttgctttgtccttgaaccacattttagcaatttatgtagatacctccttccttttatatgccttgaactttatcttttaataatttctcagcaaaaagtataacattttaaatgcagataattgcaaaaagagatttgtgtatttttctttcagtgttacatttcctaagttttctcatcacatcactatgctaattgatatatttagwttatataaaatgtctataattttcacttttttatgcatacataagtaaataagaatgaatatattgtaaaattgtaagtaactgattagaagaaactttattttagaaagttaattttagctgcttagaatcaaaatcgattatgtctaccagagcacaatatcttcttatgatgaaatattatgatctggcaaagtttactatttatcaaatagcagaaatggacaaaggtaagtataattaattataactgttaagaaatacttctttaaaatttttatgctattttgcaatagttatgtataaatagcatgaaggatccaattgaaagtcaaattagattttcaaactttagttttatatgtacattgccaattagtaaaa

SEQ ID NO: 724518 - DNA, 748 bp, Homo sapiens
aggtactgcctacttccatgcagtatttcaaatgcagtagaactttctataaagatatcctttgcaagttatgagttatcactatcaaaaatataaacttttaaggatttatagacctgggaaatggaatgtgacaatgctttactgataagggcttgctttgtccttgaaccacattttagcaatttatgtagatacctccttccttttatatgccttgaactttatcttttaataatttctcagcaaaaagtataacattttaaatgcagataattgcaaaaagagatttgtgtatttttctttcagtgttacatttcctaagttttctcatcacatcactatgctaattgatatatttagtttatataaaatgtctataattttcacttttttatgcatacataagtaaataagaatgaatatattgtaaaattgtaagtaactgattagaagaaactttattttagaaagttaattttagctgcttagaatcaaaatcgattatktctaccagagcacaatatcttcttatgatgaaatattatgatctggcaaagtttactatttatcaaatagcagaaatggacaaaggtaagtataattaattataactgttaagaaatacttctttaaaatttttatgctattttgcaatagttatgtataaatagcatgaaggatccaattgaaagtcaaattagattttcaaactttagttttatatgtacattgccaattagtaaaa

SEQ ID NO: 724519 - DNA, 748 bp, Homo sapiens
aggtactgcctacttccatgcagtatttcaaatgcagtagaactttctataaagatatcctttgcaagttatgagttatcactatcaaaaatataaacttttaaggatttatagacctgggaaatggaatgtgacaatgctttactgataagggcttgctttgtccttgaaccacattttagcaatttatgtagatacctccttccttttatatgccttgaactttatcttttaataatttctcagcaaaaagtataacattttaaatgcagataattgcaaaaagagatttgtgtatttttctttcagtgttacatttcctaagttttctcatcacatcactatgctaattgatatatttagtttatataaaatgtctataattttcacttttttatgcatacataagtaaataagaatgaatatattgtaaaattgtaagtaactgattagaagaaactttattttagaaagttaattttagctgcttagaatcaaaatcgattatgtctwccagagcacaatatcttcttatgatgaaatattatgatctggcaaagtttactatttatcaaatagcagaaatggacaaaggtaagtataattaattataactgttaagaaatacttctttaaaatttttatgctattttgcaatagttatgtataaatagcatgaaggatccaattgaaagtcaaattagattttcaaactttagttttatatgtacattgccaattagtaaaa

SEQ ID NO: 724520 - DNA, 612 bp, Homo sapiens
cccagtagcttctaagtgctgcaaacctgagtctagagttttggggtttttaaagaaaagttaagctgcttttttattcttaaggaaacttacataaccactcagcttgtaaaaccaaaaaggctttttctttggacagtgtcaattcattgttatgtttactctatgttgtagattttgctagatatgaggcctacataaattaaatttcacatcttggaatttattttaatagatagcataaaagtgcagtaatgagtatagaaaggtattcactgtagcatttattacaatagcaaaatgttggcatcaccacctgaagaactatcaatatgggatttgctgaataaatttttatatccacrcaggaaagaattatgcatcctttttttaaagtatcctatggatatttgttgtttttgtaattttcaacttgataagatggcataggtaaaaaccttcaaaatatgtgctttcagaaagcagttttgctggggaagtagttaatcataaaatgctttttttctttcttgtttaaactccttttggataaagaggttctatgctgcaacaaggccagctgggattcccaaataagagactgtttcttta

SEQ ID NO: 724521 - DNA, 909 bp, Homo sapiens
ttttagcaaccagtgatgattcttgctataactattattattatagtatttaataaatggttggcagttttgagggtaatatacagaagaaaaaaattaaaaattaaaaaataataaatggtgatttttctatttccataatttcttcaacatttgttagagttctactgtaagaagaaatctccattctcccagtttatttattaattttaaccctacaaactcatggatatttatttcagtctatgaattataattcattactatcataacttattttgtggctcaaatttgttttcaatttggccagtggttgctcttttaactgggctcctatatctacttgacacatcccaaacatttcttgagcacagctgtagtttctggtgtaataagatgctctagggtcatcttatactttctcagcctcagtcctggaatcagccatttctttgaggagctaaagttccctttatttggaaaaggtatttagaaaccaagatcttagctaggagtgctcatggctactgggctttcactgtttctaggactctcagyggacagaactggaaaatatatgtatgtatactaaagccatgcatacacaagcatttgtatctatttctttatatttgtgtgtatatattagaaaccatgagttcatattcacacctccaattctaatccatcacagaggtcattccagccttccttcttcccttatttgtactttcttcctctgacaatgtacttagttttcattatattatttactgcaatatatttacttaattgctctaaaggacacataatttcaaaattgctaaccctgtgaaaaacaagctattaactaaagaacattgtgtgcaattctttcaccttgtaatatataatcaaaaactgttttcc

SEQ ID NO: 724522 - DNA, 1962 bp, Homo sapiens
tagctgttccttgcttttatatttgaaggacaatttggccgagtaccaaggtcttgggccacacgttcttgccctcagaatttcttagacattgctcccattcttttttagcactggatatttctggaagagaaagctgaggctgggttaatgtttctttcttttgcacatgactagctttttccattggatgtgcccatgaggttctctgattctttttgaagtttagagttttaccagcattgcttgggcattggctgttttatgtcactttcctggtatgtcctataccataatatctgttgattcaagtctgtctttatatcagtaaaattttaagatcctttaatatttttgcatatattttgaatggtgctcactttttgggaaccatagttgttaggttttatcttctttgccttctaaatctagcatctattcttattatcatttgtgtatctttgtccctcttgttgttcctttttagtaattttgagtgatttccttgtttgttctctgcctctgtttacagaagcttacactatgttttactgtagttgtgtggcttccattctggatatttttttttctagtccatttatttcttcaactctatcagtccatttaaaatctcttagattgatgactgtcagttctttggaacttcatatctagtctctgagctccccatttttagaaggaccattttatctttaatatttttgagacaatggaggactattttttctgagctcttagtctgttaccttcgtttttcaggcccagattcctgggcatgggacctctgcatccacttaagggtccacgcttggacgaatgctcccgtcattgtcttgaaattgttaataatttctgaacagcgggcactgcatttttgttatgcagcagcttctgttgattatttttacaaacgcaccttattagctgcctttgcctgtgttcttattcagtggtcgctcatctttgaatgaggcygagctgtttgccgcaaaaactggtgtggggtatgctgaggactggaaggcaggggtggggagtgttgtgaaacctgctcatactcgctgcctccactgtcctccaaacaattgttatttcttttaccttgagaatgatcctccttcggtttttggcttttaggaggcttgtgtgtctctctcacagccagtccccttagcgccctggctctctgaggcttgacatatggtgggcatggcggttgttcccccaggccctttcttcaccctcactttccttgttaatccaggccaggtcataggtattaaaaatgacatccacatggtttctccttcagttccaccttcccagttagattttaacttttaaaatacttgagaagggagagcagtgtcagactcaaaaagccagcaagcattgttttttgtttgtttttttttgagatggagttttcactcttgttgcccaggccggagagtggtggtgagatctcggctcactgcaacctctgccttctgggttcaagcgattctcctgcctcagcctcccaagaagctgggattgtaggcgcctgccaccccacccggctaatttttgtatttttagtagagatggggtttcaccgtgttggccaggctgctttcgaactcgtgacttcaggtgatccacctgcctcccaaagtgctgggattacaggcatgagccaccacgcccggctgccttttaatgtgtcattttaatgtgtcattttaaagttctgtgctaataaggatgtaggaggttatttgatttttggaaaattgttcatactatattaacatgtaaaggtgctttatgaaacagtatgtggagtgtgattcacctgttgttgcttcttaaggaagtacgactctacattaaaaaatatttgaagggaaaaaaataccaaaatgcgattgcctggattcctaatgtccatcctgcttc

SEQ ID NO: 724523 - DNA, 1458 bp, Homo sapiens
acaaggtaagttctacttcacagggtgcagagcacaccggaagtggtcaccaaatatttgctgagtgttctgagtcccaaataccgtctaaggcaaacgatgttttaagcttttgtttagcctttctccttaacttgtttaagaatgttttaaaaaattcaattaataggctgggcgcggtggctcatgcctgtaatcccagcactttgggaggccgaggcaggcggatcacttgaggtcaggagttcgagaccagcctggccaacatggtgaaactccgtctctactcaaaatacaaaaattagccagtcgtggtggcgggtgtctgtagtcccagctactcaggaggctgaggcaggtgaatcacttgatcccgggaggtggaggttgcagtgaaccaagattgtgccactgcactccagcctgggtgagagtgattgactctgcctcaaaaaacaaamcaaaaaaaaaaaaaagaaaaagaaaatgaaaaaaattcaattaatagaggagcacaagataatattaaagaaaacccatccacaagcctgaactcttaaaaaaaatcattttattgatcctttaccatacaaaatttattcaaattacacccatttgaagtggtaagatcacagctagagaacaggtcaccctgtaacaaatctatttacaaaatccatcataaaagcttttttttgtttttttttacattatattacatattttcttttttaaactagcatacaacacaaagctaaactgattagtagtttgcctactcccaattttgggagaaatacttcctttttacaaaatcacgtaccccgtaggaaaagaaattcccacaccctgacaattgccacccgacttactctgcaagccatcttccttcatatccctccttctcatacacacgagttgtcatgcacacactgaattcttattttctttttcctgaaagcttaagctttaaatactgcaattttatttacagatctacacgtacaacaaaaatgaaaacaagagccacaacaaagaacagaaaaacaaaaacaaaataacactcttaaaaaattacaaagcagctagaaagtattctggcagtgtttacaaattaattgctatttttgtacaaaattgctaaataatgaaaatgtgagtagactacatatcaacttaaataaaacgattgctatgcacaactctgtacatataaacacactcctaacactgtttgacagctcatgtgttgccctttatacattttattttctaaggctcacgcagtcataatttgcacacttgtaacttttagccatttcgtgtgtgagctttaatagcagcaactcaatggtaccaggaaacctgcatacttagtacttaaagtaacgcaaatactgtagtactaacccactttgtgtgccggatactaagtcaaaaagaaaattacttaatgca

SEQ ID NO: 724524 - DNA, 1458 bp, Homo sapiens
acaaggtaagttctacttcacagggtgcagagcacaccggaagtggtcaccaaatatttgctgagtgttctgagtcccaaataccgtctaaggcaaacgatgttttaagcttttgtttagcctttctccttaacttgtttaagaatgttttaaaaaattcaattaataggctgggcgcggtggctcatgcctgtaatcccagcactttgggaggccgaggcaggcggatcacttgaggtcaggagttcgagaccagcctggccaacatggtgaaactccgtctctactcaaaatacaaaaattagccagtcgtggtggcgggtgtctgtagtcccagctactcaggaggctgaggcaggtgaatcacttgatcccgggaggtggaggttgcagtgaaccaagattgtgccactgcactccagcctgggtgagagtgattgactctgcctcaaaaaacaaaacaaaaaaaaaaaaaagaaaaagaaaawgaaaaaaattcaattaatagaggagcacaagataatattaaagaaaacccatccacaagcctgaactcttaaaaaaaatcattttattgatcctttaccatacaaaatttattcaaattacacccatttgaagtggtaagatcacagctagagaacaggtcaccctgtaacaaatctatttacaaaatccatcataaaagcttttttttgtttttttttacattatattacatattttcttttttaaactagcatacaacacaaagctaaactgattagtagtttgcctactcccaattttgggagaaatacttcctttttacaaaatcacgtaccccgtaggaaaagaaattcccacaccctgacaattgccacccgacttactctgcaagccatcttccttcatatccctccttctcatacacacgagttgtcatgcacacactgaattcttattttctttttcctgaaagcttaagctttaaatactgcaattttatttacagatctacacgtacaacaaaaatgaaaacaagagccacaacaaagaacagaaaaacaaaaacaaaataacactcttaaaaaattacaaagcagctagaaagtattctggcagtgtttacaaattaattgctatttttgtacaaaattgctaaataatgaaaatgtgagtagactacatatcaacttaaataaaacgattgctatgcacaactctgtacatataaacacactcctaacactgtttgacagctcatgtgttgccctttatacattttattttctaaggctcacgcagtcataatttgcacacttgtaacttttagccatttcgtgtgtgagctttaatagcagcaactcaatggtaccaggaaacctgcatacttagtacttaaagtaacgcaaatactgtagtactaacccactttgtgtgccggatactaagtcaaaaagaaaattacttaatgca

SEQ ID NO: 724525 - DNA, 2902 bp, Homo sapiens
tttttcattttaactatccagagttttaaaaagttctctacaaaagatttgataatgccaggatcttttccttccattcccatgcctaatacttaaacctaacttcatctaaatgtgatttaaaagcctaattcagatataaagattatttatgaaatgaaaaaaagatactacttaaataaaaagtaatctaccataagaactaacggaggaaaacatttggaactcaatttacagatggagatgaactttactaatatatgaaggctctttggaatcagtaaggaaaagaccaagagtctcaacaggaaaatgggtaaaagataaacagtacgctgagaaggaaataccataagggcctctcaagcatatgaaaaaacactcaatctcactcataataaaaggaatgcaaattaaaactacactgagatccattttatgtctattagattggcaatgatcaaaacatttgagaacataatcttgatgaagacatggaaaaagtctcctattgctggtgggagtacagatcaaaacaacctctgtattagtttttctcatttgaagaaatccttgtaagatgtttaaaaatgtagcatgtaagataatatttagcctggtgtgggctgttggtcattctcaaaaaattgttaaaagttttctacttttatagaattctgtttacataatgaagcagacaggtaggccacttttaaaaacttggatgactggtcgggygtagtggctcatgcctgtaatctcagcactttgggagggctgaggcgggtgaatcatttgaggtcaggagtttgaaaccagcctggccaaaatggtgaaaccctgtctctactaaaaatacaaaaaattagctgggtggggtggtgcatgcctgtaatcccagctactcaggaggctgaggtgggagaatagcctgaacccaggaggtgaaggtggcagtgagccaagatcacaccattgcactccagcctgggcaacagagcgagactgtttcaaacaacaacaaaaaacaaaacaaaacaaaacaaacctggatgattaacacagtagtcttgctctatctgctgctcacctcttgataccttattgtgcacttaatgggtgctcaataaatatttgttgagttgaatgaaactaagaataatgctgaaggatgacaaaaatggaataaaaacaagaacaatgaattaactaaatttatctgaactgttgaataaattgcttacataaacactacttcaagaaaggagcaatgccacgctagttagtgcatgtttcctgaaaaatgagttagccagcaacagttggataatagattgttgtagtaatggccccctaattagccccactcagttaggaaacccctcccataccaactctggaattggccatgttgatctgctttggcctatggacaacagaaaatatacgaggcttgctgtcactagttacttctgtaaaccctactactgcctccaggtgaaagagccacgcctagcctgcgggagacacatggcccccatcacccaagcaaacaaccagtacggattatccagacatagctatcctagaccaaccagctcccagctgacccatcagctgactgcagccacatccgcaaggccagacataagctgcagcagaattgcttaattgagcccagcccagaattaggctaacaaatgcctattgtttcacagcactatgttttggggagatttatcatacaacaaaagctgatccaagtagagaggggaataggtggtcaaagaagatttttcccttacctgttctgcttttcaaatttcacaatgagaatatatccacatactatttaattacactgaacttataaaaattttatatcagattgatattaaaatcttactatcaccttgtaaacacaaatacattaattcagtccaaataggagcatgaatttgagaggagacattaatattgcttcagaaaaaaaaaatgggttaagagtaccagggtttactatctctcacacacacacacacacacacacacacacacacacacaaatgtgaataagaatatattcacggtcactgtcacatctcaataatggctattatcaaattctggaagtgttagaagacactcatctcaaattctgcttcactgtttcttctgtttaagtgggtaatggcctaatacatgttttctcatttaatcctcacatggtatgaggtaaacattatgctgcatcactttaggcaaagttaattaacctctctatgcctcatttcctcaactgtaaaatggggataacagtcctattttatagaactgttgtgaagattacatcgcttataacagggcacacagtccttaataaacggtttaccacctcgtttagtaaaatgacgtaaaattaaggtcttttaactataataacatggcttctattttcaaaacactaagcattatcaactaaggtgtgagacatcataattaatttggatatctttctaatgacctcattaaaaaattaaaagacatgccggggtgtggtgatggctcacgcctgtaatcccggcactttgggaggccaaggtgagcagatcacctgaggtcaggagttcgaaaccagcctggccaacatggtgaaattccatctctactaaaaatacaaaaagtagccgggtgtggtggcacgtggctgtaattccagctacttgggaggctgaggcaggagaatcatttgaactcgggaggtggaggttgcacggagccaagattgtgccactacactccagcctgggcaacagagtgagactctgtctcaaaaaaataaataaataaaaataaataagtaaaagacaatgttattaaacaaaacctaggaatgtatgta

SEQ ID NO: 724526 - DNA, 544 bp, Homo sapiens
tttgctcagttgattttgcattaaattggtttaacatttgaagttgaaattgaatttgaaattaaatttgaagttgaagttggttaacatttgcagttgaaatccactgcaataacagaattaaggagaaatgttgttttaatagatagtgaaaaatgataaatttagatatccacttgtagttgagaactcttagcaaactaagaaatagaagggaattttaatgtgataaagtgtatcttcaaaaagtttaagattaaactttatggtggactgttgaaacctttattcttgaaatttggaacaagtcaaggatgatacacttttatttggctttgaactcaaggtatgctgaccagtactgtaaggatagcaagaaaaagaaataaaaatatatgataggaaaggaaaatagagaactgtcattatttccaggygatgtgattgtttagcatccaaaagaatctacaaaagatttatgagagtcagtaatgaagaaatgctggttgtaaggttgatagaaaaaaacccaattatatgttca

SEQ ID NO: 724527 - DNA, 658 bp, Homo sapiens
cctcctgtttttcctgaatctgaaagctatcctgcagagaagaaagatagcgttcagaaaaggaaacagattcttcaaatgaacttaaataaaatgcacatataaaaagaagccaagaactaaaaggaggccttggagatttcctgtttgaagtctcagtttccttatctgtgaaataagattggaccagataatctctctggttccttcagcaatcctgcttcttaaactattagtggcatagaattcaaagaatgtgtggaagctaaatccaaacatgtataatttaaatgccacttagaagtagaagaaatggactcggcgtattggctcacacctgtaatcccagcactttgggaggccaaggcaagcagatcacttgaggtgaagagttcgagaccagactgtccaacctggtgaaaccctatctctactaaaaatmcaaaaaaaaaaaaaaaaaagtcaggcatggtggcacacgcctgtagtttcagccagttacttgggaggctgaggcagtagaattgcttgaacccaggaagtggaggttgcagtgagttgagatcgctccactgcactccagcataggtgacatagtgagactctgtctcaaaaaaaaaaaaaaaaaaaacaaccaaaaaccaaaaaacaaacaaca

SEQ ID NO: 724528 - DNA, 658 bp, Homo sapiens
cctcctgtttttcctgaatctgaaagctatcctgcagagaagaaagatagcgttcagaaaaggaaacagattcttcaaatgaacttaaataaaatgcacatataaaaagaagccaagaactaaaaggaggccttggagatttcctgtttgaagtctcagtttccttatctgtgaaataagattggaccagataatctctctggttccttcagcaatcctgcttcttaaactattagtggcatagaattcaaagaatgtgtggaagctaaatccaaacatgtataatttaaatgccacttagaagtagaagaaatggactcggcgtattggctcacacctgtaatcccagcactttgggaggccaaggcaagcagatcacttgaggtgaagagttcgagaccagactgtccaacctggtgaaaccctatctctactaaaaatacaaaaaaaaaaaaaaaaaagtcaggcatggtggcacacgcctgtagtttcagccagttacttgggaggctgaggcagtagaattgcttgaacccaggargtggaggttgcagtgagttgagatcgctccactgcactccagcataggtgacatagtgagactctgtctcaaaaaaaaaaaaaaaaaaaacaaccaaaaaccaaaaaacaaacaaca

SEQ ID NO: 724529 - DNA, 621 bp, Homo sapiens
tcattatttcattcctaatgattgtgtttctatttacttgatcaaaattgagacatttctcttctcttctgctctccttacttcctttttcccctttgccttctactccctccatttctctcctctctgtctctttcttttcttctttcttccttcttttgtctttcccattctttcatttccttggtttggtatgtggtagagaggagttcttcttaaaaaattaacagttagtttcagtaatccggtctattaggttttatccaagtaattgttttataatgctcmtcaagtagtgctataataatcttttgtatccccattgttctgattagatttatggtacaggcgatatctaacagtttaagaaatactgtattatagtggctgaacacagtggtcagcctagaaactgacgtaggagaaaaactatatgaccttgagtatggccatgatgtttcatatacaacaccaaaggtacagtccaggaaagaaatcattaataagctgcttcattaaaattaaaaacttctactctgcaaaagacaaggtcaggataatgagaagacaagctaccatctgggagaaaatatttgcaaaggcatatctaaaaaagagttg

SEQ ID NO: 724530 - DNA, 1058 bp, Homo sapiens
ttcaaaaatagaaatgtgcccgggggtgcgaagtcatttctctgttattcacccgccttttcatgtcatacactctgcttcattaaaaaaaaaaaatctaatttcatcaaatactgagttcatttatctggttctcaaacttttaaaagttatttctttttttcattttaatctgacacttttattaattttttggatattttattataaatttttttattttttactttaaattctgggatacatgtgcagaatgtgcaggtttgttacataggtaaacatgtgccagggtggtttgctgcacccatcaacctgtcatctaggttttaagccctgcacacattaggtgtctttcctaatgctctccctccccttcccccaaccatcaacaggcccagtgtgtgatgttcccctccctgtgtccatgtgttctcattgttcaactyccactgatgtggtgtttggttttctgttcctgtgttagtttgctgagaatgatgatttccagtttcatccatgtccctacaaaggacacgaactcatccttttttatggatgtatagtattccatggtgtatatgtgccacgttttctttatccagtctatcattgataggcatttgggttggttccaagtctttgctattgtaaatagtgctgcaacagacaaacgtgtgcatgtctttatagtagaatgatttataatcctttgggtatatacctactaatgggattgctgggtcaagtggtatttctggttctagatccttgaggaatcgccacactgtctttcacaacagttgaactaatttaccctcccaccaacaacgtaaaagcgttcctatttcttttagcaattatttatttattcaaggaataactgaataccacatttaagccaattcagggtgcatataaaaaggtgttaaacccttcaagcacttattgtagtgattaagcctcacatggaataaatagttaaagtagtcattcaagtaacaatttcaataaatatcaaataaatatatggaaaatagagaagtcagtatattcaatat

SEQ ID NO: 724531 - DNA, 1058 bp, Homo sapiens
ttcaaaaatagaaatgtgcccgggggtgcgaagtcatttctctgttattcacccgccttttcatgtcatacactctgcttcattaaaaaaaaaaaatctaatttcatcaaatactgagttcatttatctggttctcaaacttttaaaagttatttctttttttcattttaatctgacacttttattaattttttggatattttattataaatttttttattttttactttaaattctgggatacatgtgcagaatgtgcaggtttgttacataggtaaacatgtgccagggtggtttgctgcacccatcaacctgtcatctaggttttaagccctgcacacattaggtgtctttcctaatgctctccctccccttcccccaaccatcaacaggcccagtgtgtgatgttcccctccctgtgtccatgtgttctcattgttcaacttccactgatgtggtgtttggttttctgttcctgtgttagtttgctgagaatgatgatttccagtttcatccatgtccctacaaaggacacgaactcatccttttttatggatgtatagtattccatggtgtatatgtgccacgttttctttatccagtctatcattgataggcatttgggttggttccaagtctttgctattgtaaatagtgctgcaayagacaaacgtgtgcatgtctttatagtagaatgatttataatcctttgggtatatacctactaatgggattgctgggtcaagtggtatttctggttctagatccttgaggaatcgccacactgtctttcacaacagttgaactaatttaccctcccaccaacaacgtaaaagcgttcctatttcttttagcaattatttatttattcaaggaataactgaataccacatttaagccaattcagggtgcatataaaaaggtgttaaacccttcaagcacttattgtagtgattaagcctcacatggaataaatagttaaagtagtcattcaagtaacaatttcaataaatatcaaataaatatatggaaaatagagaagtcagtatattcaatat

SEQ ID NO: 724532 - DNA, 1166 bp, Homo sapiens
tgcccattaatttagggttttctttcctgtcctgatgctttgcctgttctccttactcagctaattttctgctgcctcacttgactacacgcattaacatcttacagtttaaatatccaactttctacttcttttgtgcttaatcctgactctgacattcaactattccctggtcttgttgaattgcctcctttcagcctattctgaccctttcttactaaatgatcttgtactactttctggtttcccagtctcaacatctgcctcaaactttactccagttcctccaaaaattattcctggagcatttaaacgagtacggagaactgtactctcacccatgtggtttttttccaagaaaataaattttactcaaaggtaaaacatcagatcttgttttcttctgatttctggccagtcctctcccatttcaagtgctaggaacaaggacgtgcctgactcctgctcatcttcttctctctcacagggagctctcagggcagaggaacttcttcctccagcctttgttgcttagtgagagtcatttatattaatgtgccttgcaatgagaagtcagtcaggtgtcatgaaattcattgtcatgtagaacataaggagtgtctaccttattagacttattttttttaaatggggacataactgttcactttccttcagaaaatattgtattgaaataagataattttcaaaaataaaggcaaacattttacgtgtttaattatgttttttaagttgtattgatttttttttcctgtttgagtatccttttctatccatgttactgctgtatataacaattgattgttagagaaattgcttgactttacctctcacckttggttaaaaatataaagagctacttcactctttagatagatagtttttcttttatccttagtagtacattgactaacattttacaccaccccccctaaaaaaaatccccaaagggaatcaaaatgaaaaaaaaatgaaaaaaaacaagcctattatttgtgtctgcttttagaactcaaattaattagttagatgaaatcaagttctattattaatctaactaaatatactgagtatagagtaatttcagacatcttcccttcaccaagtttatttaaggttctttggcaggaactggtgctggaata

SEQ ID NO: 724533 - DNA, 714 bp, Homo sapiens
aggacatccaaagtcatgacaaatatatttataataagctaactttggcaaatattgccactggtgtattattcctttgtcatccctaatcacccccatgtactccctcctatctccaaaccctggtcttctatatgtgttttcaatcaagtaggaacagkttaagctgtaaaacctaaagtggatggagttggggttaaatcctgggatgactggaatacccaagatagagaaaatctgtgtttcagaagtctcagacctcatttcatttcatacattcactcatcaatgaataaatatttattctgtgcccacttggtaaaaagcacagacccagttactggaaatacaccagtccatgtgatgaatttggccttttccctcctcacacacacagtgtcgcagcattcctccagaggaggtaagacatctgcagttaagcaagtgtcatcttccaacctcgtggacctctgaatggtgcctgagctgcaggaggtttaacagagtgactcagcaaggcgagggactgctaatagattattagtcactcttaggtatacaggccatggggtaagagaatgttgtttagaaatggctataatacattatttgagtgatttgtatgaactacaaactagtttataagtaaaaattgctcgctttgttattgtattttgttagaatgcacatatcctttttgtccttggggaccct

SEQ ID NO: 724534 - DNA, 714 bp, Homo sapiens
aggacatccaaagtcatgacaaatatatttataataagctaactttggcaaatattgccactggtgtattattcctttgtcatccctaatcacccccatgtactccctcctatctccaaaccctggtcttctatatgtgttttcaatcaagtaggaacaggttaagctgtaaaacctaaagtggatggagttggggttaaatcctgggatgactggaatacccaagatagagaaaatctgtgtttcagaagtctcagacctcatttcatttcatacattcactcatcaatgaataaatatttattctgtgcccacttggtaaaaagcacagacccagttactggaaatacaccagtccatgtgatgaatttggccttttccctcctcacacacacagtgtcgcagcattcctccagaggaggtaagacatctgcagttaagcaagtgtcatcttccaacctcgtggacctctgaatggtgcctgagctgcaggaggtttaacagagtgactcagcaaggcgagggactgctaatagattattagtcactcttaggtatacaggccatggggtaagagaatgttgtttagaaatggctrtaatacattatttgagtgatttgtatgaactacaaactagtttataagtaaaaattgctcgctttgttattgtattttgttagaatgcacatatcctttttgtccttggggaccct

SEQ ID NO: 724535 - DNA, 571 bp, Homo sapiens
aaaaaaaaaaaaaaattttacatgtatgatttcatttcatccatgtaacaacaggataacaggtaatcttactattcccatttcacagatagggagtctgaggcacatacagctaatgtcacttgcctagcctcatgctgctagtaagtggcacagccaggagtataacccggacagcttgacttgaaagcccacactcttatcacgccctttctatcttaaaacatcacagtattttaaactgctggaaaatgtcattttttccccctagagtgctaaacaaaaataaacagtcttgcttatctggagtttcatacctaattatcttcacatatacgatgtttttgatcttcatttctctacagtkaatatatttcaggaccattaagggtgaattggtatgcatcagcccatgttgactgagaaaaaaagataccgtatagcccattttgagtagggagacattctagttatgccacttggaaatgtttcacataaggttttgctgtatcccagactcctaacatagatgcatttgaaaaatcatttagtaacctaaaacaaataccaa

SEQ ID NO: 724536 - DNA, 571 bp, Homo sapiens
aaaaaaaaaaaaaaattttacatgtatgatttcatttcatccatgtaacaacaggataacaggtaatcttactattcccatttcacagatagggagtctgaggcacatacagctaatgtcacttgcctagcctcatgctgctagtaagtggcacagccaggagtataacccggacagcttgacttgaaagcccacactcttatcacgccctttctatcttaaaacatcacagtattttaaactgctggaaaatgtcattttttccccctagagtgctaaacaaaaataaacagtcttgcttatctggagtttcatacctaattatcttcacatatacgatgtttttgatcttcatttctctacagtgaatatatttcaggaccattaagggtgaattgktatgcatcagcccatgttgactgagaaaaaaagataccgtatagcccattttgagtagggagacattctagttatgccacttggaaatgtttcacataaggttttgctgtatcccagactcctaacatagatgcatttgaaaaatcatttagtaacctaaaacaaataccaa

SEQ ID NO: 724537 - DNA, 579 bp, Homo sapiens
acggttctaatcccattatttcagcttttaaacctcattaagaagtcataaaagctttttcaaaacacatgaattcacttgacaatcttactccaaagtctctaagactgtaacatcaacattcaagttaggcatctttacttcccagtagtccttattttactttgaaagcatttctaaaataacaagtgaaaaaataaacaaatgatgatcagatggtatttagtgtcattatatactgagaagaggaygctacttcaaagatctgtctctgaccccaggcagggattatagccgaacaattccaaatagcggttctctacactactctcattgaaaattgatttaaaaatcaccttatatcccttcaaaatgtttagtgctacttcccattaagatgtttcttgggactaacatatatctaactgaaatttaaattcgccttttgttgagttctctctctaggaaacaatgcatcagtatctctgattaatatgccccttttctttatgctaagtaactcatttcaccattcttgagagatttaatgacaagcattaaacatatttcaagtgctta

SEQ ID NO: 724538 - DNA, 1494 bp, Homo sapiens
atgtaaataaggttggctgttgaagataatacacattatatactgtgcactcaaaaagcctaggaattatttacattgaacaaatatgtaatttgaacttgctggaacaattctagctttaatgagtacttgagcagcttctaaaaaagcataatttccactttttattaaaaattaaaatgtttcattcatcttttaattgaaagggaggttgaaacagacatggtaacagagtaaaactggtaattaaataataaccactttaatattcaatgcagtaaaactttgaaggtgggagaaagaagcacaaaggaaaaaatctcatagaaaaaaacatgagtgtccaaggccaggctctgccatttcacttaaaatagcttgccaaaagttgtaagagragagagagttacttgcaacatattggcaatggtagccagttgttcctggtacatgaaagaagtgattatcacagatgtaaataaaatgaggaaggttatatgaatatatatatttttctcacatcaaagaacagtatggccccattacagagaaaaggtatattgattttatgttagaattatctgcaactgaattttttcagcttatatttaaatgtgtagttttgtatttggaaaattcaactaaggaagaacaaaatggaatcacacacaaacgaagttattcctactccattatcatggaatctagagtttaaacattctggattcaactgcacatacagctattaaataacaaactcattattgaatgatatgttaatctcaggagagagtaagacattcagtttactgctgtcttttgtagaggatattcatgtggagaatacccaaagtattttgatatgggtcattctgcttaattttgggaagtatttttaacctaccatctctgccccacagtagtctgtttacaggacatgaaatctacatgggccttgtcacaatcgaatgtacttgtcatttttcatcatccctccttcctttctggaaccacaattcttattccatgtttttccccttcctatttttcatggaagcatagaatcttaaaactgtaaagtcattaaagttcattggataaaaccccaccattttacaaataggaaaaataaagaaaggtaaagctacttaactcaagatcacaaggtgagttgaaggcagagccaggcttgaacccacatatcccaacataagtgttcttttgtcatactgttaaccatgtatagtttgagtcttccagtatcacttgatgataatatgaaggctttaagtgcttttgttagttttttattcattcatctgggcactcaacaaatatattaatttcctactatatgctaatgaggggaagagaggttacataatgagtcaaagcctatattaagcatggttcccttctgccaggttgtatacaatctagtgaggaaagtgaacattaagcaagttatacatacacttaatatcaaattaaccc

SEQ ID NO: 724539 - DNA, 1336 bp, Homo sapiens
ccgggcgtggtggcgcatgcctgtaatcccagctactaggtaggctgaggcaggagaatcgcttgaacctgggaggcggaggttgcagtgagctgagatcgcrccattgcactccagcctgggcaacaagaacaaaactctatctcaaaaaagaaaaaaaaaaaacaaaaatgaactgggtgtggtggcaggcacctgtaatcccagctcctcgggaggctgaggcaagggaatcgcttgaacctggcaggcggaggttgtagtgagccgagatcgcaccactgcactccagcctgggtgacagagtgagattccatctcaaaataaataaataaataaataaaataaaatacattaaaattctagtacctgtctccttgtgaaaatgtgtgagatttttcttttccaggatctagcaggagtggaactactgtgttgtggagactcagaatctcttatgcacaattcatagcctcttggcctgacctactttccagttattatagtggcaacgggctctgtgagagctccaagtgactttcccttggtgttccctgatctgccccacccccttctgtgatgcctgtctcttgctttggcctgggatgaggcatgaaacactacagaccatgctcagtgttcatgcatgcacagccatgaagcatggcggaggcaacgccacacggggcaaacatttgaccctgggacataggagccagtggataaattcttccgctttgcacccctggactaactgtcctgtagtgccatttgcatggcttcttgaagggtgatctcactagatccagccacgggagcactctctgcaggtggcccctgcctcatttcccttccctctgtattcctgagtctcactctcatcactactgagagaccacctatctctggggtgagtccagcagagtctgccagggttctcttcctgccattgtgaatgtccccacatccaagtggagtagaaggaatgtggtggacttgtggggaaactgcttatgatcagttgagcttttgtggcggaagttactcacactgtaaattctacacccaggaatttatggaaatctggtctttaactttgagtttggacagacaagtttggtgctagtggagatcctagtttaggggttggtttggagcagtgtgaatctactagggatttagctgaatattcagaatcaggaggttaaaacagatgtgaatctgatgcctattgctggcttggattagtaggcaccagcctcagggcacatgactcagccagccctgattctgcctcctctaaagctaacataattttctgatagagtgtgttgca

SEQ ID NO: 724540 - DNA, 1336 bp, Homo sapiens
ccgggcgtggtggcgcatgcctgtaatcccagctactaggtaggctgaggcaggagaatcgcttgaacctgggaggcggaggttgcagtgagctgagatcgcaccattgcactccagcctgggcaacaagaacaaaactctatctcaaaaaagaaaaaaaaaaaacaaaaatgaactgggtgtggtggcaggcacctgtaatcccagctmctcgggaggctgaggcaagggaatcgcttgaacctggcaggcggaggttgtagtgagccgagatcgcaccactgcactccagcctgggtgacagagtgagattccatctcaaaataaataaataaataaataaaataaaatacattaaaattctagtacctgtctccttgtgaaaatgtgtgagatttttcttttccaggatctagcaggagtggaactactgtgttgtggagactcagaatctcttatgcacaattcatagcctcttggcctgacctactttccagttattatagtggcaacgggctctgtgagagctccaagtgactttcccttggtgttccctgatctgccccacccccttctgtgatgcctgtctcttgctttggcctgggatgaggcatgaaacactacagaccatgctcagtgttcatgcatgcacagccatgaagcatggcggaggcaacgccacacggggcaaacatttgaccctgggacataggagccagtggataaattcttccgctttgcacccctggactaactgtcctgtagtgccatttgcatggcttcttgaagggtgatctcactagatccagccacgggagcactctctgcaggtggcccctgcctcatttcccttccctctgtattcctgagtctcactctcatcactactgagagaccacctatctctggggtgagtccagcagagtctgccagggttctcttcctgccattgtgaatgtccccacatccaagtggagtagaaggaatgtggtggacttgtggggaaactgcttatgatcagttgagcttttgtggcggaagttactcacactgtaaattctacacccaggaatttatggaaatctggtctttaactttgagtttggacagacaagtttggtgctagtggagatcctagtttaggggttggtttggagcagtgtgaatctactagggatttagctgaatattcagaatcaggaggttaaaacagatgtgaatctgatgcctattgctggcttggattagtaggcaccagcctcagggcacatgactcagccagccctgattctgcctcctctaaagctaacataattttctgatagagtgtgttgca

SEQ ID NO: 724541 - DNA, 592 bp, Homo sapiens
atgtaaacgtattaaactctccatttaaaacagaaagatcactagaagtatttttkttgttgttgttgttgcttttttgagatagagtctggctctgtcgcccaggctggagtgcagtgacgcgttctcggctcactgcaagctccgcctcctgggttcacgccattctcccgtctcagccttccgagtagctgggactacaggcgcccgctacgacgcccggctcattttttgtatttttagtagagacgaggtatcaccgtgttaaccaggatggtcttgatctcactagaagtatttttaaaaagtaacttctatatcttttataaaagttccacctgtaacaaaagcacacagaaagagagtcataagatgaagaaaaaaattagttacagatgaatagcaaccaaaaaaacaaataaaacagaacaaaacaaaaaaacaatctggaatggccgtattaacatgaatctaaacagatctgagggcaagaaatattagcaaagagtcactgtgctttgacaaagattaaattttaaatagtatggtcttaattatgtacattaaaatacttaatgctggtggtcccagc

SEQ ID NO: 724542 - DNA, 592 bp, Homo sapiens
atgtaaacgtattaaactctccatttaaaacagaaagatcactagaagtattttttttgttgttgttgttgcttttttgagatagagtctggctctgtcgcccaggctggagtgcagtgacgcgttctcggctcactgcaagctccgcctcctgggttcacgccattctcccgtctcagccttccgagtagctgggactacaggcgcccgctacgacgcccggctcattttttgtatttttagtagagacgaggtatcaccgtgttaaccaggatggtcttgatctcactagaagtatttttaaaaagtaacttctatatcttttataaaagttccacctgtaacaaaagcacacagaaagagagtcataagatgaagaaaaaaattagttacagatgaatagcaaccaaaaaaacaaataaaacagaacaaaacaaaaaaacaatctggaatggccgtattaacatgaatctaaacagatytgagggcaagaaatattagcaaagagtcactgtgctttgacaaagattaaattttaaatagtatggtcttaattatgtacattaaaatacttaatgctggtggtcccagc

SEQ ID NO: 724543 - DNA, 1465 bp, Homo sapiens
gtctaagagagaaatcacggttttgtcatcaaaagctcttgcttaagccaaacatcataaataaatcatgagacatgacaaaatagagggggaaaataggtactttcatctaaatattcccatgttttctgcgctctggtgtgctttacaccacgtattctctaccagttgtattctcttttctagtaatgttttcccaaaaaacttgattccagggtttagaaatgtgagtaaccctggcttcaaatatcttctatgatttgtaaaatcacattgcaggcatttttgtttaattaattgtgtatatatttgagcatatatttaccttttcccaacaaaccattgtaatatgtgcaaatacagggatataggaagtgccatagggaacagggaagaaacaacaaatacagaatgctcgagaattttgagaaccccgggatggatccatcaggatcaggaacatttctctcttttaatcatgcctgagttgccacatcatgagctgctccatcctttgatggggcccctctattagcccatttgttagaccgtgttcttttccttaactctatacctattttgtcacaaactgaccatttttgaaataagccttgtaaagcacatcatcacgatatctctgtggggttcctagtgtttattatttgtgtatttactatgtcatttgccatacatcattaaattttccatttatttatgcatgtgtttgtttatgagccctgtgatggggataagcacagaacgttatgggggcatgttgagggaaatgcaattcagcttagaaggaggtagggattcagtttccagaacaaggctcgagggaggagccaagtctcaggaacaaaacaaagaagtgatttccagagctggattcaaaaaccagaagtacatagcagcgagggcaacctaagtttggggatatttaaattgcccttgcctagagacaaggaccaatcttctctgaagtcattgaccccaaccttcaagagaagatggcaggaggcaaggatgaggctgatgagactcatagtgtttcaaatttggaacagaagsctcattattctgacagtgcagcagaggcccgctaaggcccaggaaataccagaagtcccaaccctggaagcggccggggttaacagccaaatgccctggccctcatttcaccacactcttccttataccaaataatgattttccagagtgcaggtttttcttttcaaagtctatttcttggttcttcatgatattatatgctgaaactctcgccagcaaagattctgagatgtcttaatgggaatcagcaagtgaactcaaagcattaaggaagattagaagctctctaaaaggttctggaaaggtgatccttactaaagatctgtatgatatgcctaacaatttgtctgactatggccttctaaagatgtgttatgtgtcacctaaaagctct

SEQ ID NO: 724544 - DNA, 1465 bp, Homo sapiens
gtctaagagagaaatcacggttttgtcatcaaaagctcttgcttaagccaaacatcataaataaatcatgagacatgacaaaatagagggggaaaataggtactttcatctaaatattcccatgttttctgcgctctggtgtgctttacaccacgtattctctaccagttgtattctcttttctagtaatgttttcccaaaaaacttgattccagggtttagaaatgtgagtaaccctggcttcaaatatcttctatgatttgtaaaatcacattgcaggcatttttgtttaattaattgtgtatatatttgagcatatatttaccttttcccaacaaaccattgtaatatgtgcaaatacagggatataggaagtgccatagggaacagggaagaaacaacaaatacagaatgctcgagaattttgagaaccccgggatggatccatcaggatcaggaacatttctctcttttaatcatgcctgagttgccacatcatgagctgctccatcctttgatggggcccctctattagcccatttgttagaccgtgttcttttccttaactctatacctattttgtcacaaactgaccatttttgaaataagccttgtaaagcacatcatcacgatatctctgtggggttcctagtgtttattatttgtgtatttactatgtcatttgccatacatcattaaattttccatttatttatgcatgtgtttgtttatgagccctgtgatggggataagcacagaacgttatgggggcatgttgagggaaatgcaattcagcttagaaggaggtagggattcagtttccagaacaaggctcgagggaggagccaagtctcaggaacaaaacaaagaagtgatttccagagctggattcaaaaaccagaagtacatagcagcgagggcaacctaagtttggggatatttaaattgcccttgcctagagacaaggaccaatcttctctgaagtcattgaccccaaccttcaagagaagatggcaggaggcaaggatgaggctgatgagactcatagtgtttcaaatttggaacagaagcctcattattctgacagtgcagcagaggcccrctaaggcccaggaaataccagaagtcccaaccctggaagcggccggggttaacagccaaatgccctggccctcatttcaccacactcttccttataccaaataatgattttccagagtgcaggtttttcttttcaaagtctatttcttggttcttcatgatattatatgctgaaactctcgccagcaaagattctgagatgtcttaatgggaatcagcaagtgaactcaaagcattaaggaagattagaagctctctaaaaggttctggaaaggtgatccttactaaagatctgtatgatatgcctaacaatttgtctgactatggccttctaaagatgtgttatgtgtcacctaaaagctct

SEQ ID NO: 724545 - DNA, 1465 bp, Homo sapiens
gtctaagagagaaatcacggttttgtcatcaaaagctcttgcttaagccaaacatcataaataaatcatgagacatgacaaaatagagggggaaaataggtactttcatctaaatattcccatgttttctgcgctctggtgtgctttacaccacgtattctctaccagttgtattctcttttctagtaatgttttcccaaaaaacttgattccagggtttagaaatgtgagtaaccctggcttcaaatatcttctatgatttgtaaaatcacattgcaggcatttttgtttaattaattgtgtatatatttgagcatatatttaccttttcccaacaaaccattgtaatatgtgcaaatacagggatataggaagtgccatagggaacagggaagaaacaacaaatacagaatgctcgagaattttgagaaccccgggatggatccatcaggatcaggaacatttctctcttttaatcatgcctgagttgccacatcatgagctgctccatcctttgatggggcccctctattagcccatttgttagaccgtgttcttttccttaactctatacctattttgtcacaaactgaccatttttgaaataagccttgtaaagcacatcatcacgatatctctgtggggttcctagtgtttattatttgtgtatttactatgtcatttgccatacatcattaaattttccatttatttatgcatgtgtttgtttatgagccctgtgatggggataagcacagaacgttatgggggcatgttgagggaaatgcaattcagcttagaaggaggtagggattcagtttccagaacaaggctcgagggaggagccaagtctcaggaacaaaacaaagaagtgatttccagagctggattcaaaaaccagaagtacatagcagcgagggcaacctaagtttggggatatttaaattgcccttgcctagagacaaggaccaatcttctctgaagtcattgaccccaaccttcaagagaagatggcaggaggcaaggatgaggctgatgagactcatagtgtttcaaatttggaacagaagcctcattattctgacagtgcagcagaggcccgctaaggcccaggaaataccagaagtcccaaccctggaagcggccggggttaacagccaaatgccctggccctcatttcaccacactcttccttataccaaataatgattttccagagtgcaggtttttcttttcaaagtctatttcttggttcttcatgatattatatgctgaaactctcgccagcaaagattctgagatgtcttaatgggaatcagcaagtgaactcaaagcattaaggaagattagaagctctctaaaaggttctggaaaggtgayccttactaaagatctgtatgatatgcctaacaatttgtctgactatggccttctaaagatgtgttatgtgtcacctaaaagctct

SEQ ID NO: 724546 - DNA, 1988 bp, Homo sapiens
ttgtgtgctgatgtgcacccctctccctccgtttctggctatttctaaaaacatctcctcatggtttaaaaaatttatttacgtatgttattataaaatataacaaattctgcttcattgataatcctaaatcttatgtattttcagccataatcactgttaacatttaaacatatttcttcccatttttttcttttctttctaatcttttttctatgtctatatgtgcttttgtgtggttttaaaactgatgtcatattgttttgaaatgaggttcgtatcctgcatttttgatttacagttttatcataggcattccccacatcattaaataaattagagtatatccttataatggcctattatgcaaacacgtctataaaaaactaatccttcttctatattaggccataaggttgtttaaataagattgcaatgatgaagataggtacacctaaatcttttcctgagagtttctggaaatttatgtctccattgataatgtatatgatagtgtataagaatgttgttttcattgtctcttctaaaaactttattacttttaaatattccattaaactttttttgccaacttgataagcaaaaatggtagcgtattctattctatttatttcttggacacatctatgtttgctcttcagaattactttaggaggaatttccagttctcttactttgtggtgtcttgtgtctctctggctcatttttccagtttaggatgaagagaaggctgtctcttcacccagggcctgttggccaaggtaccaacctgcacttgtctgctccctatccacgcacaagataagaattctctcatctacaattcccggcccagccccggttccgctcagtcaggttctgctggacttaggaggggtcttctttccttctctctgcctgttctctgacaactgccaatgccagagtacacaacaaagcccgcttcctctgcgtgccctgctgcttggcctattttgacagcattttactgggtaggcctacagctcctaggatgcactgtatacaacccccttgtgttatattcttttactgatgagaaagagataccaactggatgtgggggatagaagtcatcctcaaaaatgatactcctacaacagagggagagttttcaagttggtggaggtcctcatctttcagccaagaggtgaatggtaggggacacagggagccctgtgggacagatggggtagttggtttcaggtgggcaaacacagtcacacactggtctgtagttcttcaagcagtagaaatcctccctaattccaaccaacattaggttgattgcctgtattcgttccaatgtaagaagttttcctctttcattggatatgtctttataggtattttgtttggaatatcagaagcctccatcagtgaattataaccatgctcttaaaacatttttttaaattgaaagcttccactggtttattttattttaatggcaatatttgttatacataactactgtttgtatagacagcatacctttatatgtttctcttgctttaaaattagggaggccttttgccacccagagagcgtatcatccattcttacaccatgttatggactagcattttgttcagcagatggcttttcccatttcctcagaagaacctgctgggcaagggagagagccgatgttttttcctcccttagawcaccatcacatttactctccacctcaatgaaggccagcacaacctctggacattagcctgatgctctgtgaggtttattaaacacatcagatgataaatagtagtgcaaccgcaagcatccttcttttaaaaaatagtctcagtttgataagtaaaaatggcacctctaatctaacttttcaatctttgattactaataaataaacagaaccacacgtttgccatttacactttttaaataaattttcttggaatagagtttcgatttctttgtttagg

SEQ ID NO: 724547 - DNA, 1988 bp, Homo sapiens
ttgtgtgctgatgtgcacccctctccctccgtttctggctatttctaaaaacatctcctcatggtttaaaaaatttatttacgtatgttattataaaatataacaaattctgcttcattgataatcctaaatcttatgtattttcagccataatcactgttaacatttaaacatatttcttcccatttttttcttttctttctaatcttttttctatgtctatatgtgcttttgtgtggttttaaaactgatgtcatattgttttgaaatgaggttcgtatcctgcatttttgatttacagttttatcataggcattccccacatcattaaataaattagagtatatccttataatggcctattatgcaaacacgtctataaaaaactaatccttcttctatattaggccataaggttgtttaaataagattgcaatgatgaagataggtacacctaaatcttttcctgagagtttctggaaatttatgtctccattgataatgtatatgatagtgtataagaatgttgttttcattgtctcttctaaaaactttattacttttaaatattccattaaactttttttgccaacttgataagcaaaaatggtagcgtattctattctatttatttcttggacacatctatgtttgctcttcagaattactttaggaggaatttccagttctcttactttgtggtgtcttgtgtctctctggctcatttttccagtttaggatgaagagaaggctgtctcttcacccagggcctgttggccaaggtaccaacctgcacttgtctgctccctatccacgcacaagataagaattctctcatctacaattcccggcccagccccggttccgctcagtcaggttctgctggacttaggaggggtcttctttccttctctctgcctgttctctgacaactgccaatgccagagtacacaacaaagcccgcttcctctgcgtgccctgctgcttggcctattttgacagcattttactgggtaggcctacagctcctaggatgcactgtatacaacccccttgtgttatattcttttactgatgagaaagagataccaactggatgtgggggatagaagtcatcctcaaaaatgatactcctacaacagagggagagttttcaagttggtggaggtcctcatctttcagccaagaggtgaatggtaggggacacagggagccctgtgggacagatggggtagttggtttcaggtgggcaaacacagtcacacactggtctgtagttcttcaagcagtagaaatcctccctaattccaaccaacattaggttgattgcctgtattcgttccaatgtaagaagttttcctctttcattggatatgtctttataggtattttgtttggaatatcagaagcctccatcagtgaattataaccatgctcttaaaacatttttttaaattgaaagcttccactggtttattttattttaatggcaatatttgttatacataactactgtttgtatagacagcatacctttatatgtttctcttgctttaaaattagggaggccttttgccacccagagagcgtatcatccattcttacaccatgttatggactagcattttgttcagcagatggcttttcccatttcctcagaagaacctgctgggcaagggagagagccgatgttttttcctcccttagaacaccatcacatttactctccacctcaatgaaggccagcacaacctctggacattagcctgatgctctgtgaggtttattaaacacatcagatgataaatagtagtgcaaccgcaagcatccttcttttaaaaaatagtctcagtttgataagtaaaaatggcacctctaatctaacttttcaatcttygattactaataaataaacagaaccacacgtttgccatttacactttttaaataaattttcttggaatagagtttcgatttctttgtttagg

SEQ ID NO: 724548 - DNA, 1977 bp, Homo sapiens
tttgtaacaacgcaggaaggaggcagaccttgctgaatgcgcctctgccagcaccaacagccaggagccaggacctgtttgtgaggtggaggggagaactggcccccacagcccaagctggggccacttttccatcctttgcagagaggaagggaaggacactcaacctccctccgggcacctgggcctgagtgaggccctctcacttctggggaccactgctgagggcatggcgtgtagcctgcaatgtggcagttagagaaagccagactgaggaggacgcctcaggccccggaccacagccccactgtcagtccaggcaggcctcctgggctccctccttccctcccatctccctccctcagagctgcccttcacactgataagtggctattttgaaatgaaaaaaaagttctaatgacaagtctasgctgcttccttctgacagggtctcctaggcacttagctcagtgtcctgggaggtgggaggaggaaagtgaagccacccaaccagctgggcttgcagtcggtcacgctgtgccttggagcaggcgctgtcatgagtggagaccttgcctgtccccatccctgcaagaaattgctgttcccctgcctgtgccattcccaggccccttccttccttctacccaggatggccagacctgaaaccattgcccagccccagcagaagagaggcttgccccgcagcctgcaagtgggattgggtgttccaagcatcacccctctttcttagttccctgatgggtcctgcttctcacagccctcacaccctgccctttggctggcgctgcacagtcaggtgcctggtaaacagggcatgtgttcctacctccattctcaggtgaggaaactgagccccaggagcagttcggctgactctccccgggtcacatgggttcttagcatctggcctggaccctctcagagctgggctctttccactccactgactgaccgtgtcttcaaaaggagaactgtgacctgcaaaacaccttcgtggaggctggagcagccaccatcccttcaaggatgactcccctggctgtgacattgtcactcctctctggcggtggtgccagttgtttcctttgcttggaatcaaaaggcctcccagaattctgggacttatatttaataaatcacaaatgaaatgctaattgatggttcggatgtaaagactagaggaagtgggaaaatgttaatgatatacaatttcacgaaaaaaagaggacagagaattgtaattagggtatgactaaaatggcccccccaaaagaggcctacatataggttaattatgtggaagaaaatatttggattggagtgactctgggtgattttttccttccttttatttacttttttttctgtaaagaacataattctaaaataaacaaacaaaaacgagagaattcttcgagagtcccggtcacagcagctgcagagagaggtacagtgtgaagaaatgaaatccaacaagtgaaatatcagaaatgtcagaaatcaccttcattgttcttggaaggaggctgatagtaggagaacaggccagcggcaggccatggaatggctaagtgcttaccacaccgccgagtccatcccttacattcacaacaacctgtgaatgaagtgggtgtgagtctctttgtgactgttctgcaagtgaggaaactgaggcttggagaagctcagtaaccagccaaggtcaacagcaagtgaggggtggagctcgtggctcccatttctacctgatggctgccaggacacaggggcctgcctcccatgccatcctaaccctgcgtgtctatcccccatcgtttcccaggggtggagttcgtggttcccaggactggcttttattgcaagctgtgtgggctgttctacacgagcgaggagacagcaaagatgagccactgccgcagcgctgtccactacaggaacttacaggtaaaaatc

SEQ ID NO: 724549 - DNA, 487 bp, Homo sapiens
gtaagaagcctataattttaacataaggtccatttgtttttgtttcacaaaataataccgttttctgaagaaaagggctataaacttatgttagcaaatartagtacataatgaggaatttaaaagtcagtttcacctttgagtcccaggaggctctgtatatatcattgttatcctaaaatgacatctaacagtaggttaagttatataggaaaaaatgtgcttttctgtaattaatttattaggcattttcactaatttgtgcattttatatctctgaagagcacactgctagcaacctgattgtaaatgaccagaaggacttatatccaacctatgtgacttaaacatacacttaagtactctaaaccactatttaaaaaatacttctagagagattctgaaatcttaatttggttgcactttctggtaatatattggcggaaaactattctgatatttctttcatataacattattggatctg

SEQ ID NO: 724550 - DNA, 1717 bp, Homo sapiens
ttagaaaagttgcttaacctctgtgaacctcagtttacagatcaggaaaggactatactttgagttatttggctttaagtattttttttcatacattatcttttcagtctcgtaatcactgtaccctgtgaagtgtgtagggkgtataatagcagtaattataagagtacaacaataacaataatgtatacctttaattgagtcccggtactctggggcaaagaagtttacatacattatttaatcctgacatcagtcctgttagacaggtattattatctcagttttacagatgaggaatctgaagctaatagaaattcaggaacttgcccaggattgtacttagctactggaagagctatgattaaaacttagtgctgttttggttttgcactaaagctgcattgttatagtgtgttatcatgatctctgttgtctatgtgaaaaaaacctgagaaatcaggtaatttgcttatagtcacccagccaagaagccgcagagatagtattctaacagagcttctcaagcttcagtgtgcatacagatcacttggtgatgttgtgaaaactcactttgattcagcatatctagggtagtgctgttattgcgtatttctaacgaggtcccaggagatgctgctgctggtggtcctcggagaacactttgaatagaaagggcgcagaacacattattttctgatctttagcagggcttttctgctccccaagctgccatattccctcttaaggcattgtgaaggtcgcatggaataacagatgtgaaaacaacttaatgtatgtctcaactacatagtaatgcatgctttatggtccctatgttgatatgaatcagctgccactctgtctgcacgtaacagaaattcatctccattaagcctgttggcttaagcaaaaaaaaaaaaaaaaaaaaaaaaaaagaatttatggatgcatgtaaatgaaacgtccaggagtagatctggctgcaggtgcggctggattcaggacccagagaccctcattaggacttggtttctctccacgctgccttctgctcttttggctttgtttactgggggctccctgggatgggccgtagcagcccaggctctctcctctaggtggcatgatggctacagtgacctcagcagctctttctcccccttccctttccttcaacaagagaaagccagagttttttcctagaagctcccacaaaagtcctgagacttttgagagagagtcgctctgactggactagcttagcacaggtgcacattcctgaattgatctctggccagggctaggccatgctgtgattggctggacctgtgtcatctgctacatcctcagagctgggacagagacccacctagagctctggagcaagatgagggaggaacagctgctatcaggaggagggagagtggctaccgggaaggtagagggcaaacactgtatccatgtgtgtctctgggccaaaggggctgcatatgaggtcccaccagggtttgcagaggtggggagaaattctgattgctctttctcctctaactttatcttttgctcaccaggtaaagtatagggagagaagggagagattttaaggtatttttcatttcctctcttgaatatttcttcatgcacatatcttatctccccatatacttcctgtggcaagggagttcctcagcttatttgaggcagaacctttcac

SEQ ID NO: 724551 - DNA, 1467 bp, Homo sapiens
ggttgaagaaggtggcagcagagatgcaggtaactgcagcagaggcagaaattagcatgaaggagtagttgtaattctgaagtatgaaagtgcaacagctgctcagtgaaaggcatatgctataagattaagatattttaggaataatattggaaaggagatatagttgaaaattaatcaattagcacttggggggtcttgatcttgctttgaaatcaggggcatgacataattacatcttcgttttaggtgtaacccaaagactggccctattgatatcatttgggtggctgctgcattagatacaagagttaatgatagcttaatccagtacactacaaatgagaacaatttgcttggtataatactcttatattctgtaccatataaacattttgcaattatttcttctgttctttttttattattatactttaagttctgggatacatgtgcagaacgtgtgggtctgttacagagatatacccatgccatggtggtttgctgcacccatcaacccgtcatctaaattaggtatttctcctaatgctatccctcccctagaccccaacccccaacaggcccaagtgtgtgatgttcccattcctgtgtccatgtgttttcattgttaaactcccacttatgagtgagaacatgcggtgtttggttttctgttcctgggttagtttgctgagaatgatggtttccagcttcatccatgttcctgcaaaggacatgaactcatccttttttatggctgaatagtattccatggtgtatttgtgccacattttctttatccagtctatcattgatgggcatttgggttggttccaagtctttgctattgtgaatagtgctgcaattaacatacgtgtgcatgtgtctttataatagaatgatttataatcctttgagtatatacccattaatggaattgctgggtcacatggtatttctggttgtagatccttgaggaatcgccacactgtcttccacaatggttgaactaatttacactcccaccaacaacgtaaaagcgttcttatttctccacatcctctgcagcatccgttgtttcctaagtttttaatgatagccattctaactggcctgagatggtatctcattgtggttttgatttgcatttctctaatgaccagtgacgatgagcttttcttcctatgcctgttggctgcataaatgtcttcgtttgagaagtgtctgttcatatcctttgcccattttttgatggggttgtttgcttttttcttgtaaatttgtttaagttctttgtagattctggatattagccctttgtcagagggatagattgcaaaaattttctcccaytctataggttgcctgttcactctgatgatagtttcttttgttgtgcagaagctcttatgttcttatacttcataaaaatgatatgaaattattttactggtttgtacaagctta

SEQ ID NO: 724552 - DNA, 634 bp, Homo sapiens
tagccagttttctgtcacatgctggtttgtttgcttgcttgtttacttgcttgtttaccaatagagttgacctgttattggatttcctggaagatgtggtagctacttttttcctattttgaagccattttcgtagagaaatatccttcactataatcaaataagttttgtcccatcarttccaaagatgtttccagtggtgctcttgaagaggaatgagtaccagttttaaattgcccattggcatttgaaggtagttgagtatgtgttctttattcctagaagccactgtgcttggtagagtgcatcactcaccacagctgcctcctgagctgcctgagcctggtgcaaaaggattggcccccattatggtgcttctgaataaatcttgccaagatagacaaacaatgatgaaactcagatggagcttcctactcatgttgatttatgtctcacaatcctgggtattgttaattcaacatagggtgaaactatttctgataaagaacttttgaaaaactttttatactctaaagtgatactcagaacaaaagaaagtcataaaactcctgaatttaatttccccacctaagtcgagacagtattatcaaaacacatgtgcacacagattatt

SEQ ID NO: 724553 - DNA, 634 bp, Homo sapiens
tagccagttttctgtcacatgctggtttgtttgcttgcttgtttacttgcttgtttaccaatagagttgacctgttattggatttcctggaagatgtggtagctacttttttcctattttgaagccattttcgtagagaaatatccttcactataatcaaataagttttgtcccatcaattccaaagatgtttccagtggtgctcttgaagaggaatgagtaccagttttaaattgcccattggcatttgaaggtagttgagtatgtgttctttattcctagaagccactgtgcttggtagagtgcatcactcaccacagctgcctcctgagctgcctgagcctggtgcaaaaggattggcccccattatggtgcttctgaataaatcttgccaagatasacaaacaatgatgaaactcagatggagcttcctactcatgttgatttatgtctcacaatcctgggtattgttaattcaacatagggtgaaactatttctgataaagaacttttgaaaaactttttatactctaaagtgatactcagaacaaaagaaagtcataaaactcctgaatttaatttccccacctaagtcgagacagtattatcaaaacacatgtgcacacagattatt

SEQ ID NO: 724554 - DNA, 564 bp, Homo sapiens
ttgggctccacatccgtggattcaacaacccacaggtcaaaaaatactaaaaaaaaaaaaaaaaagctgtccctgcactgaacatacacagactgtttttcctgtctttattccctaagcaacacagcaccaaccacagcacgccaccgtggcaggcttgtaagtgacagagatgacataaggctgatggcaggacgcacagagaggacacgtgataccacgccacttcacaccagggacctcggcgtctgcaggaggtcctgggaccaaaccacaggtactgaaggtcggctgtacctgagattaggagaagctgaaaaggaagctgctatattaagtaagagaattctatcatcaacacacaataagatacgagacttasaaataataaaaatgtcagggttcgagggatgctgtagacagcttattgtggtgaaagctcaaggaacccagggcaccttggctgaccccgtctcccaactccaagaaagcagctcttagggtatgggtatctaaggagacaaaggacacagtccaggcaccaagggaggtccaggggagcag

SEQ ID NO: 724555 - DNA, 1405 bp, Homo sapiens
tttccccatgaggcaaactcggaaccatattccaagatcttgagacaattataaacactctgctccccacatcttccccattggcctcccatgatctgcatgcaccacaaccaaaatcaaatgactactagcaattaaggaacaatatgtggcaagatcaattaaggtcaattaattgtcaatattgaggtcaatatgtggcaagatgttacagcatattgttaaataaaaaacaaaagactaaaagcagcaaaagtttatatatgtatattatacacratggagaaagagactgtgtatgtgtgagtgtgtgtgcatacatgtgcgtgaacgtataggcaaggactggggggagagaagagtggagagagagaatgaatgaatgaatgaatgtatgtgtgaaggaatgtagaaaagccggctctacaccaggaataaaaaacggtcatctcggctgggtgtgcggtggctcacgcctgtaatcccagcactttgggaggccgagtcgggcagatcacaaggtcaggagttcgagaccagcctgaccaacatggtgaaaccccgtctctactaaaaatacaaaaattagctgggcgtggtggtgcgcgcctgtaatcttcgctactcaggaggctgaggcaggagaatcacttgaacctgggaggcggaggttgcagtgagccaagatcatgccattgcactccagcctgggtgacagaataagacgcggtctcaaaacagcaaaaacaacaaaacaaaaaacaaaaaacaaaaaaaccaaaaaaaaccaaagcaaaaaaaccccagtcatctctggacggaactggaggtgattctttctctgcaactgtaacttctccagacattctgattctctagtgtaaaaaaaaccccaataaacaattgcataccgtgatcacacaagccacaatagggctgactaggaagggaccatagcacgcactgaatcacacaatccccaaaacaactctccgcctcctgtccctgccctcatatcccacctttacctggactcagactcccaaaactcactttcctcctagtcctccctccaactcctcagaccttggtcctccctcttctgctcctccctgttctcctgggtaaacctcacaccccttggaaagagtcttccagcaaggctcagagccccagcactcctagaacctcccatatccccacttataagagtaaataaaacaacatttccattgcttcataaagggaaggcaggtgcccctctcccgcttaggatgcctctgtttggtctggaatgagatagcccagtgtccagattttacaagacacagtcatggtctgatggcccctagaatgtcatcagacctccaaacctaactcaaaggcctcgcactgtgtgcaaacc

SEQ ID NO: 724556 - DNA, 661 bp, Homo sapiens
aggaaaactttctatgagaaggcaaatctcaatgtacatcaaagaactcacataggggaaaaaaccctatgaacataatgaatgtggaaaaaagtttcatcacaagtcatacctcagggtgcatcagggttttcatataggcaagaaaccctatgaatgtaacgaatgtgggaaaacctatgagaaaggaatcctcactagccatcagagaaatcacacgggggaaaaaccctatgaatgtaatcaatgtggaaaaccctttggctggaagtcaagccttaggtcgcatcagagtattcacagagggcagaaaacctatggatgtaatgtatgtagtaaaagcttccaccagaagtcagacctcactaaacatgaaagaattcacactggggaaaatccctatgaatgtaatgagtgtggaaaatcctttggctggaagtcaaggctcagccaacatcagagatctcacatagggtagtaaaacctatgaaagtaatgaatgtaggaaaatattttgcctaaggtcagtcatcactggacacagagaactcacatagagaaaaccctgtgtaataaatgtggaaaaaaccttttgcttgaagtyacagcttagcagacagtagagaagtcacagaggaaagacatcagatattattcttca

SEQ ID NO: 724557 - DNA, 620 bp, Homo sapiens
gcagggttgggggataggagcaagcgtgggggacactcctgagagggcctgtgggaattactacaggagaaagggtgttcctggcagagggactgcaaagtgcaaaggtgggagggagggggcatcatgctcagtgtttgagaagcagccaagaggccagtggggctggaagacacagagagtgtctcagtccgtgtgggctgctctaaaaaaacaccatagccaggcagctcataaacagcacaagtccaagggcaaggcactggcaggttcagtgcccggcgaggacacatcctggttcatagacctctctttctcactgggtcagacctctttttctcgctgggtcagcatatgcatggtggaaggactgagaggttcctttttatttatttattatttgtttatttatttatawttttcctttttttttttttgagatggagtctcactctgttgcccaggctggagtacagtgaagcgatctcggctcactaaaacctccgcctcccaggttcaagtgattctcgtgcctcagcctcccgactagctgggattacagatgcccaccaccccccttggctaatttttttgtattttagtagaggcagggtttcacc

SEQ ID NO: 724558 - DNA, 945 bp, Homo sapiens
tgcctaaatctgtagaaattcaacttttcaaagtacttggcaacaatagctacaaaggataggatactcaattgcaagtagacttttcaaaattaaattcacttacttctattcccaactcaatctagaatattattggtgatagtgaaaagaccagacagatgacattacttccaaattttaccaatctaattgtttttactcacacctgtagatgtcactttaaaaatgtgaatattaatttcttcaaaactactccaatttaagtaatgagttagagctttggcaaccattaaggctctcttttcccaactctaacaatatgtggtaatgtcttccctgacttcattttatgtttacacaaaatcaaaggttatatttaaggttttctacatttttttggatatttacctccttgtaatttagttttatatgtctrtattacaaaacatattatattcaagaatttttaacacttagagtagaagtgaaattacaggttgaagattatttaaattagccattcagaaaccttccaaagtgtccataaaatgtatatattttatctgaatgttctatatactatagagacaaatatttaggaaacaggccaatgaagtatggtcacattttttaaataccagaaagtgaagtccaaaaagaactgctgagtaaccaacagatagtctaggatgattcccttgaatgctgcaaatatgcaacatctattacaatggtataacaatatttcgagctatctataaactagaagaattacaagtatacaaaataaaataaaaaaccaaacctaaaagttaagaagaatatgctcgggataagtcactgcaatcaagagaaccatcatctactaattcattcagttgcaatagctatccccatacagaaagcaactggtaccaacccttttacttgtttaaatatttg

SEQ ID NO: 724559 - DNA, 1324 bp, Homo sapiens
ggtacttacagaaaatgtctagaaagatccaaatgtgcatacacttccacatttagctggactaagactgagtaggacacagtgctacaggaggtgtgtgtcctggattacttacttacaggggtttcatgtttcagagkgttaaacatactgcatattacctgatagcaatagttgacagaaataaagaaaacaaatcaagtttttctgctgtttttatcagctaagaaggacagcccaatcatcctaggttgggggtgcattttgaagtgtaatggagatggcatttggagacatggaagcactagaggttcttgtgtacttttgtcaagatgtgggatgagcagcagatgcggctaaggtcctagacctacttactggagggagccccacacagccagtgatgctccgctgatctgtaacacaaaaaaataaagaatcaaggatcataggagggaagaatcaaagatcttgaaaaaagaataatagacatattttgaatttctcccaaatgttcttttagcactttaatttgtgttatacctattattacccataaaacaaaagaatttttcccataaccaattattatgaatgtttcctataccatttaaccaataaaactaatctggttggttggagcctctcatgaggtcatcaataggggctattggtcctcttaattcgtattgtcagcttggaggttttggtttacttgtatgcattggcacctaaccgacatatatcacttaacttttgtggccagaccctttttttctcatgtatcaaacaaggttgcatggcacaacacatgtattgttctgaagatattacaaaaaggatatggaagaaagaaggagaatggtgtagtggaaagcaatgatttcagagtcagaactgaacctaatatatatagttgacccttgaacaacacaggagttaggagtgctcacgcccccatgcagcagaaaattcatgtataattttaaaaaattgacaattagtagttttacatattcatgagatatatagtgatgtttctgtgcatataatgtgtggtgatcagatcagggtaattagcatattcatcatttccaacatttattatttctttgtgttaggaacattcaatatcctccttctagctacttgaaactatacaatatattattgttaactatagactccctacagtgctatagaacactagaagttattcttcctatctagctgtaattttgtatcttttaacacatctcttcccacccttcccttcccccaaccgttcccagcctctggtatcttaagaccattttacttttta

SEQ ID NO: 724560 - DNA, 1324 bp, Homo sapiens
ggtacttacagaaaatgtctagaaagatccaaatgtgcatacacttccacatttagctggactaagactgagtaggacacagtgctacaggaggtgtgtgtcctggattacttacttacaggggtttcatgtttcagagggttaaacatactgcatattacctgatagcaatagttgacagaaataaagaaaacaaatcaagtttttctgctgtttttatcagctaagaaggacagcccaatcatcctaggttgggggtgcattttgaagtgtaatggagatggcatttggagacatggaagcactagaggttcttgtgtacttttgtcaagatgtgggatgagcagcagatgcggctaaggtcctagacctacttactggagggagccccacacagccagtgatgctccgctgatctgtaacacaaaaaaataaagaakcaaggatcataggagggaagaatcaaagatcttgaaaaaagaataatagacatattttgaatttctcccaaatgttcttttagcactttaatttgtgttatacctattattacccataaaacaaaagaatttttcccataaccaattattatgaatgtttcctataccatttaaccaataaaactaatctggttggttggagcctctcatgaggtcatcaataggggctattggtcctcttaattcgtattgtcagcttggaggttttggtttacttgtatgcattggcacctaaccgacatatatcacttaacttttgtggccagaccctttttttctcatgtatcaaacaaggttgcatggcacaacacatgtattgttctgaagatattacaaaaaggatatggaagaaagaaggagaatggtgtagtggaaagcaatgatttcagagtcagaactgaacctaatatatatagttgacccttgaacaacacaggagttaggagtgctcacgcccccatgcagcagaaaattcatgtataattttaaaaaattgacaattagtagttttacatattcatgagatatatagtgatgtttctgtgcatataatgtgtggtgatcagatcagggtaattagcatattcatcatttccaacatttattatttctttgtgttaggaacattcaatatcctccttctagctacttgaaactatacaatatattattgttaactatagactccctacagtgctatagaacactagaagttattcttcctatctagctgtaattttgtatcttttaacacatctcttcccacccttcccttcccccaaccgttcccagcctctggtatcttaagaccattttacttttta

SEQ ID NO: 724561 - DNA, 856 bp, Homo sapiens
tttcttctgaccagcattcattccccttccttttggtgacagaatctagattttttttttgtcaaatgcaaattaaggtcagttctggaaaagaacaggcacccactgaggcaggcacttgtacaccgtgggagttctccatgggcaggttcctgcgttcctcttcaacatccaatggagattagaaacttactacctgtccccctaacagctcagacatgggcacaggacctgggcccaactaactggacatttcccctagaaatatgaatctagaggagagtaatgcagagatgcatgtcagttagggatgatttcctatggccatgaagtttagagcttccacgtaatggcaaatgacccatgacagtgtggaagggattgtccaggatgggaaccccagagatggcctctagctggactgtacatggatggggtcttggctatctcctccctccctgcctggtagccaggccattttctccagctttaccattgattctgtgaattatcagatgaccttcccttcaataccttttctgcttaagtagccagaattcatctctgttgcctgcagttgagaattctgagtgatgcaataattcataacataaatgagctgtttagaacctgcacaggattgtgaacagagcatggagaagtatgatggctccttccctagaaccaagcatcagttctgaccaggtgatcagtattacttacatggaacatggaatcccctgtactttggtattccttggctctttyttttttttttttttttttgagctggagtctcacttttttcacctaggctgaagtgcaatgatgtgatctcagctcactgcaacctctg

SEQ ID NO: 724562 - DNA, 567 bp, Homo sapiens
catgaattggaaacacgttaagagccccaaccttggattacttagaaaacaagcctgaatctctttcccattgataacagtgtctgtttacccattttcttctactttattcttcatagccaggcctatcaattttgcctgtaaaaagtctctcattgctgcctcattctcttttctcccacaatcagggattgtattcagctacacttgtaaggtacaggtaaagccatgacagctggcaaatagccactggtgagtgcttccccccaccccattatcagccctgggccgacccagcacacaccagagcaccaggctggccacagctccagcccggttagatgatctgctctacctaagtctttaccgcctgtgataggctgataaaagtccccaatatatcaggtctgtggtagcttaccttaaaagtcagacacctgtgattattatttcaagtkgccaaagatgtcattaagtgaaggattttgagatcagaagattgtattggattatctcggtgggcttctaatgtaaccccgtagtatgcctctaaacaggcaaacagat

SEQ ID NO: 724563 - DNA, 2288 bp, Homo sapiens
taaaaaagatatattttcagtcttctgcctttgtctgatctgtatcctaaacacatatttaaggggttgttttagtctttcaacaaactactagaaactttgttaaaygtattttaataaaatagaaaaaattgcaaacaatcatagagcttaatgatcaacagatttagtaagcagatttagtatacatattttaatcatttcatctgagaaacaatagcacacatattttattacaaatatgttaaaaggattcttcaaatatgtagtccactgactgatgttttgtgacttagagatgcacagaaaacaatttgattataaaatattatgacccctactaattctttcatgctctgttttatgaaaagattggactttcttttttctgtatgcttttcaacaggttatagacatatatgttcacagtctagataccatatgtacactaagttcttcaggaagagaaaaaattttttttcttatctgcactttgttttctctcccactttaaaatctttgcataaaatcaccttgcagagtgatattctttactctctctcttcttgtctgagttgttgctaacagcttttaatttgggaagtgtatctctgagtttactgcgcctcactggtttcagctcaattgtttctctagccagcagagcatttcatttcttctgaaggtcaccacaagctgccaaggctttgaaaacataccatcttttcattcatgctgcaatctaaccctgcagtgccattaagagaagcggaagcaggcatgtgactttttctatcaacaattattgaatttattgtaatataaagtgaattaggccatcagtgagcaaggatcctccataatgccacctttgttcaagactgtagaaattattttttgtattttagtagtctgtctgtgtatagataattatttgtacaaattataccaaaatgtcatctgcttttggaagttactcttccaaccatatcactaccggttgcaataaaccaatgatgcaggaagctgtcccgatctaaggacactcataaaacaaacaccacattggccatctgttggaggagggatggcattcaatgtaatgtgtgcctggaacacatccagtattgtttattctgtcacatatcagatgagcactgaaatcaaattgatgattttttaattccaaggggacaagaaatggagaacagaggagatgattccagatatacgcaaaagtgttcaagtgacaacatgatccaaaaagtgaaaaaaaattaataaaagcaaaggaagagtaactcacattatacttgccagatatttacactcttgggctaacaaaaaagcatttcaatattacttttatgttctacagttaatgctgctagaaaaaaccaaaaccttcctagatgaacaagtcaattgaatcaacagcacaaattattttaaagattttaagggcaacaacaatttttctatattttagataagattaaaatgttttagattattgaacatgccaatgttttagattagcttctctgaaagaggtgagctgtgaatcatgaatgttttttgtttggtaggtagtggttgttattttcaggttctgaggcaatgaaattgttgcatagcagttacacagttagttagaaaaataaaatgagattttccttttaaaagcaaattattcttctatgttttaatgggaaactcactgaagtttgattcaaagctctgatttaatatcttagattttccaattatcagtgaggaaactttgtgcaagtaatttaatttccctgattcctggtttccttaagatgtaaaaatatcaaatgtggaatttatgtccaacgtccccctaaaagctaagtcactgtgaaaacataaataattttattttcagtttaggtaaaatatataggtcaatcttggaggaaatacccataggatttctcacattctcatgtagaagtgcccttttcctccccaaatgatctccgcttcctgcattactaacaagggtaatcgttaacacacttggagtaaacggatgcatgtagttccagtatccagatgtcccttaagaatgaggtgctaactgaaatgtgaaggaattctataacagtcttaaaatcacaataaggaaaatactctttcttctgggtttggagccatatctatggatataatatttaaatagtatattgtaatttttttattctttgacatttaatgaaaaatacatttcatacatccatctgtttatttagtagatattt

SEQ ID NO: 724564 - DNA, 2288 bp, Homo sapiens
taaaaaagatatattttcagtcttctgcctttgtctgatctgtatcctaaacacatatttaaggggttgttttagtctttcaacaaactactagaaactttgttaaatktattttaataaaatagaaaaaattgcaaacaatcatagagcttaatgatcaacagatttagtaagcagatttagtatacatattttaatcatttcatctgagaaacaatagcacacatattttattacaaatatgttaaaaggattcttcaaatatgtagtccactgactgatgttttgtgacttagagatgcacagaaaacaatttgattataaaatattatgacccctactaattctttcatgctctgttttatgaaaagattggactttcttttttctgtatgcttttcaacaggttatagacatatatgttcacagtctagataccatatgtacactaagttcttcaggaagagaaaaaattttttttcttatctgcactttgttttctctcccactttaaaatctttgcataaaatcaccttgcagagtgatattctttactctctctcttcttgtctgagttgttgctaacagcttttaatttgggaagtgtatctctgagtttactgcgcctcactggtttcagctcaattgtttctctagccagcagagcatttcatttcttctgaaggtcaccacaagctgccaaggctttgaaaacataccatcttttcattcatgctgcaatctaaccctgcagtgccattaagagaagcggaagcaggcatgtgactttttctatcaacaattattgaatttattgtaatataaagtgaattaggccatcagtgagcaaggatcctccataatgccacctttgttcaagactgtagaaattattttttgtattttagtagtctgtctgtgtatagataattatttgtacaaattataccaaaatgtcatctgcttttggaagttactcttccaaccatatcactaccggttgcaataaaccaatgatgcaggaagctgtcccgatctaaggacactcataaaacaaacaccacattggccatctgttggaggagggatggcattcaatgtaatgtgtgcctggaacacatccagtattgtttattctgtcacatatcagatgagcactgaaatcaaattgatgattttttaattccaaggggacaagaaatggagaacagaggagatgattccagatatacgcaaaagtgttcaagtgacaacatgatccaaaaagtgaaaaaaaattaataaaagcaaaggaagagtaactcacattatacttgccagatatttacactcttgggctaacaaaaaagcatttcaatattacttttatgttctacagttaatgctgctagaaaaaaccaaaaccttcctagatgaacaagtcaattgaatcaacagcacaaattattttaaagattttaagggcaacaacaatttttctatattttagataagattaaaatgttttagattattgaacatgccaatgttttagattagcttctctgaaagaggtgagctgtgaatcatgaatgttttttgtttggtaggtagtggttgttattttcaggttctgaggcaatgaaattgttgcatagcagttacacagttagttagaaaaataaaatgagattttccttttaaaagcaaattattcttctatgttttaatgggaaactcactgaagtttgattcaaagctctgatttaatatcttagattttccaattatcagtgaggaaactttgtgcaagtaatttaatttccctgattcctggtttccttaagatgtaaaaatatcaaatgtggaatttatgtccaacgtccccctaaaagctaagtcactgtgaaaacataaataattttattttcagtttaggtaaaatatataggtcaatcttggaggaaatacccataggatttctcacattctcatgtagaagtgcccttttcctccccaaatgatctccgcttcctgcattactaacaagggtaatcgttaacacacttggagtaaacggatgcatgtagttccagtatccagatgtcccttaagaatgaggtgctaactgaaatgtgaaggaattctataacagtcttaaaatcacaataaggaaaatactctttcttctgggtttggagccatatctatggatataatatttaaatagtatattgtaatttttttattctttgacatttaatgaaaaatacatttcatacatccatctgtttatttagtagatattt

SEQ ID NO: 724565 - DNA, 1412 bp, Homo sapiens
tgcaataatttactttctcacctgactccttgaagccagaggactgtgttttatctctattaaaaaagtaggcccactgggcctggtggctcatgcctataatcctttgggagggtgarctgggtgggtcacctgagctcaggagttccagaccagcctgggcaacatggcaaaaccccatctctactaaaaatataaaaaattagcggggcatggtggtgcatgcctgtaatcccagctacttgggtggctgaagtacaataattgcttgaacctgggagatggagtttgcagtgaacggagatcacgccactgcactccagcctgggtgacagagtgagactctgtctcaaacaaaacaaaacaaaacaaaccagtaggccctcaataagtatttgcctaatgactgaaacaggaatgacaatattacaagtgaaagatattcctaaaagacaatatttgaacctttattcctcagtaccaatttatgaactagcacagtaattagagcagttgcatagtagagtttccaactttatagatgtaattttggaaagttttctagttgaaatattgagttgtcaaacatactcaatttcagtgatcataatacttctttttagtcaatgcccttgaagtctttagattttttttcagtgaagaatcttctattcaagcacaaaataaaaataaatctctattcttaataggatttaaacttcagaatattatgagactcagtaaggctttaaatttgtcaatgcccttgaatcctgtaaacttctttttcagtgaagaatcttctattctaaagcacaaaataaaaataaacctctattcttaataggatttaaacatcagaatattataagactcagtagggctttaaatttagggtgttagtgaagctttgtggtttaatattcaaaataactcttaaatggtcttaactgaatgcccatttggatacttacatttagtatccacacaactgctgtttcttggaattttctttgagtaaaatctcctagaatacagataagctcctgacatttttttctttaaatatccttgttagaatgattagtgtctgcaaacaatgatgacacattctttaccttaaatacatttatttagtgccctgtctggggttgtgaatacagttggtggtcataatgtacttgtagatagtgataagtattaaactagtgggttggccatatcctttgtggattccccattgtttacctggctgtgggctttcactatgcatcttccttgttctttagctatgtccactagagggtgagtgggagggaggaagaaaagacaaaagaagaagtttggcagatctgctgaacagtttgatgatgcaaattagtttgaggatcaatttaggatttctctattca

SEQ ID NO: 724566 - DNA, 2606 bp, Homo sapiens
tgttgtggcaggaaaagaatagactttgaaataagacaggtccagactcaagttatagctcttctgctggtagctgtgtgaccttgggcaggtatttaagttatctgagcctcagttttctcatttctaaaatggagatagtaatattaccttccttattcagttgtgaagattaaatctgtgtaaaccaacatgggtgttgcaaatagttccttctctcctaaaaatgaataggttttcaggttatcagtgacttttataacttcaggtagtacttactaaactcatactggaatgtggacaccatgcaaagcactgggacatggaattaaatgaacgacagtctgtatcatcaaggaacttagagttatttgggaagaaagattgtaaaacataagttagactgtaggttaaggtgaaacaatagaagtaggttccagtaattgaggcagtatgtactaatggcagcatggggtgggtgtcaaaaatttgagggagagcatcatgtgtttatagtgaagataatcctgaaccatcaggaaatgtaaattgtgttgataaactatgtctaaagaggcagaatataagtaaatcttggatttaaaatataccatttaaaatgatgaaatctaaaaaaattaacttccatggtttactttggcaaaaaaatccattaatttctaatggaacaccttatttattgatatgtcaaataaatgagacattgctaaaatggcagatgagaaaggcagaaaagaggaaataagactatggagaaaggaaggggaaaggaacagaaatgttatggtgcgaccagaattgctcataaaatcagtcttttgtcagtgtggcttccttgctgtttcttttcatcttcacagctgccctgtctgattggtaaaacatgtattattctctgtataattgatgatgaagtgaaaaatgcaaggggctattgcttgtccaaagtcacacatttaccaagacatgcatccagaaagtagaactcaagttctctgcttgaggcacaaaaaatgtaaggaaaaaaagtcaccctcagtagttctaaagaatttcatctaaagaaataaagtttaaaaccaggaagcaaatatccaagaagtgtatggcacaagcatattctacatataaaagaagtgctaagcataattgctttgccataacttctcttttttcccatgttttcctttctcacctccttcctccttcaaatagatgaaggcaagagagaaatgccagaaaggaagagaataggagggagaaaatagaaggttatgggaaaagagaagggaaaacaataggagataaatgtgtagggaagtcttactcgtgaacatgtaatatgtttctggtagatttaaaatttgtaaataagaacatatttatttttataccacatatgaaaatccttgttttgaagtttctccccaaaacaattgaggtctgggaaggggtaaatgtgtcaagagatgtgtatgctgtcttggccacatttaattcaaggattgccccacgaatcaagggctgtaaatttgtaccatttacatttttattactctaagcaatctctgcaaaatgaaaaagaacataattttaaaagttggtgtttattatcatttttatatgtagtcccataatgaataggctgtttggacagaatcaaaagccttccctgaggtccccgagctggcatagccccgtagactggtactctctattactcaagggcatcaactggccagtacacttcttcttctccaagtcactgtaaattaccacccaaagcctgatgctgatatagggatgtaaaaaagaccaatgctgatcatgttccctgggcacttctcaggaaagaaaagctcatctggagcccaccctgctgaagcaggtgggtgagattctaacaccagcatcatcctttactgtgacccagcaggcactccaccaattggcaggccagtttctcctctgcttgggcataatcagagggcacatctcacaggacattgtgaatgttcatggaaagtacttaatagaggtattggctcatggtaagttctcaaaacaagctgtctttcttcttttcaaaaattaacactaatttatcaagttttggtttctctgaccttaaatgatcatgtttaaaatatgaaaactaggcttcagtcgaaaccagctgttcatggtttcctattgttcaacacaaaaatttccctcctttaaagaagtgacaaaaatctggtggtgtttgaaatgtctgcattaaaagttttatgtggctggatatttgtgggcttcttctatccacttgggaaggattgctccatgaatcaagggctgtaaatttgtaccatttacatttttatttctctaagcaatctctgcaaaatgaaaaagaacataattttaaaagttggtgtttattattatttttatatgtagtcccataaatgtgaacactttaaaacctcattcatttggaataatgaaagaaaaatgtgagaaatctgcctgagaaaatatttgggarcaagtggagttttagtaatgtcaaggaaagttagtattattaactaagatataaa

SEQ ID NO: 724567 - DNA, 2038 bp, Homo sapiens
attaacaagtgccttagaaaatacctacaccattcattcttatattcttacaaatttttacatcagattaccaaaagagagcatacctaacgcatgtacttattttaaagcactgcttttatataagtatgataaaatattttgccctaacttcatcaaagtttgttttcagaaacagccctatctagaacatttgaattttgtttttgctagaaaggacaccattccttcatcatactgtttggtatctttcatataaatctcaaaacaataaatacctctctgagttcaaagctaggaaagaaaaactcttgatgagctattgtttctttttttatagttgaccataattttatacatgcaatgtgaccaataaatatttgctttgtggtggaatacagtgatgaaagaaatatactttatttagccctttctctggcagccaaaaatttagtgcttggttttgtgttaaatggcagtggcttttcttagttaagtgtttctagtatattcttgttcaccccgatttactattttaatgctcttttatgattttactctgtctgtgcccttaaaaaatctgttttggaagatgctggagtataaatagcatagaaagtgaactgcatattctgacatttacagttctaaggataattctattttaaggatgattctgtctgcaagtaaagttattagctatctatatactatatgttttagacaaattttgattgtcatataccttttctcagactctatctactgtgtcttgtttattgttgttgttgtttttcttcccataaaaccatgtctcttttacacaagaatgtgtaatgactcagtctgacttagtttattattaaactgatgtttcaaagggcatttgattcttctgaacccttccataggccctaaattttcttaattgtaccaaatcccatatggatttctataccccagaaagtatggctacccgtcttgctcatttccaactttgtgcttttattttttctggttcttgttgcatgtgcttgcattttttccttggkttttcaactactccacttctgccttgtctttcaaagcctggcttaagactaacctcttttagtaagacttacttaatgaactctaagtgactcttattctgagtcttcttggaattatctactcagtttttgttctattaatttgcccttatttgtttgacatgttgaaagcattctgaaaccttttttttttttttttttttttttaagtacatgaatgagttctggctccagttagaaaatttgatgattgtttcttagaatgtgtcttcttttcctttttttattttccccaaaccacagagtttaatgtgctcattaaataatattggctccctaattcttagaaagcatagaatattgattatgtttgtcatagcaaacattttattaggaaataacaagataattatttttgtaaaatttaaatttcatcttaaaacggtgaaactcatttttgttgtagttatacattaaagcatcccaaacagtaggtttctaagccagtttctttgttttccctcctattattcatattctttccagattgaggcatatggctttaattatcaagtatatgctgaggatatgcagagctacagcttttttcctgacttttctaatgaagccagttcctaacagcaacatttgccagaatattttgttgtattatgacattaaacatgggccagcagaggtctggctaattgagaatgatacctttccccttccaactgcttatttactttccacgaagctaatttagttcagttataaaatgaaacctcataatacagtgtaaatgagtttgttcacataatatcaattgctaggatggggaaaatcctaaaaataaataaacaaaaattccaaaaaagttattttagaaaaattaataaatgcagctttgttgcttttatttactacctgcaagactggaaatgacatagagtaattgtttttcttccttcttttaataattggca

SEQ ID NO: 724568 - DNA, 2038 bp, Homo sapiens
attaacaagtgccttagaaaatacctacaccattcattcttatattcttacaaatttttacatcagattaccaaaagagagcatacctaacgcatgtacttattttaaagcactgcttttatataagtatgataaaatattttgccctaacttcatcaaagtttgttttcagaaacagccctatctagaacatttgaattttgtttttgctagaaaggacaccattccttcatcatactgtttggtatctttcatataaatctcaaaacaataaatacctctctgagttcaaagctaggaaagaaaaactcttgatgagctattgtttctttttttatagttgaccataattttatacatgcaatgtgaccaataaatatttgctttgtggtggaatacagtgatgaaagaaatatactttatttagccctttctctggcagccaaaaatttagtgcttggttttgtgttaaatggcagtggcttttcttagttaagtgtttctagtatattcttgttcaccccgatttactattttaatgctcttttatgattttactctgtctgtgcccttaaaaaatctgttttggaagatgctggagtataaatagcatagaaagtgaactgcatattctgacatttacagttctaaggataattctattttaaggatgattctgtctgcaagtaaagttattagctatctatatactatatgttttagacaaattttgattgtcatataccttttctcagactctatctactgtgtcttgtttattgttgttgttgtttttcttcccataaaaccatgtctcttttacacaagaatgtgtaatgactcagtctgacttagtttattattaaactgatgtttcaaagggcatttgattcttctgaacccttccataggccctaaattttcttaattgtaccaaatcccatatggatttctataccccagaaagtatggctacccgtcttgctcatttccaactttgtgcttttattttttctggttcttgttgcatgtgcttgcattttttccttggtttttcaactactccacttctgccttgtctttcaaagcctggcttaagactaacctcttttagtaagacttacttaatgaactctaagtgactcttattctgagtcttcttggaattatctactcagtttttgttctattaatttgcccttatttgtttgacatgttgaaagcattctgaaaccttttttttttttttttttttttttaagtacatgaatgagttctggctccagttagaaaatttgatrattgtttcttagaatgtgtcttcttttcctttttttattttccccaaaccacagagtttaatgtgctcattaaataatattggctccctaattcttagaaagcatagaatattgattatgtttgtcatagcaaacattttattaggaaataacaagataattatttttgtaaaatttaaatttcatcttaaaacggtgaaactcatttttgttgtagttatacattaaagcatcccaaacagtaggtttctaagccagtttctttgttttccctcctattattcatattctttccagattgaggcatatggctttaattatcaagtatatgctgaggatatgcagagctacagcttttttcctgacttttctaatgaagccagttcctaacagcaacatttgccagaatattttgttgtattatgacattaaacatgggccagcagaggtctggctaattgagaatgatacctttccccttccaactgcttatttactttccacgaagctaatttagttcagttataaaatgaaacctcataatacagtgtaaatgagtttgttcacataatatcaattgctaggatggggaaaatcctaaaaataaataaacaaaaattccaaaaaagttattttagaaaaattaataaatgcagctttgttgcttttatttactacctgcaagactggaaatgacatagagtaattgtttttcttccttcttttaataattggca

SEQ ID NO: 724569 - DNA, 2142 bp, Homo sapiens
actccctgcttcactcttgctctcttaaacaattttgcacatagaggaatgaaagcattacaaacgccataaatcagattctgtgacttccctactaaaacttgccctttactcttagagtcaaagccagtatccttattttaacctgcaaggccccatctggcctgacccttatgaacctctctgcctaaatctcctccctctctccccacagctcacattgctccagccctgctggtctttctctttctcagttatgcagccaggctattttggcttgattttcattagctactccctctccctgcctggcaatctttccttagctattggcagggtagaggctgctcctcattcaagccttagctcccatgtcatctcctcagttagcccttccctgacctcccagtttaaagccaaaagtcaacctctagcacatctccctgatggactgaatcataggcaacagccagtactcaactatattgacttataaaaatgttcacttcgtatggttcagctaatattctcatcacagcattgccagtatctgccatctgcatatgtatttgtttactgattatctctctcccctattagaatgcactgtttgtgtatttaactgttacatacccaatatctaaaagatttcctagcacacgacaatgaatgaatgaatgaatgagtgaaggagtcactctttgtctctcttatcctactttatactcactccatggggccaggggctttgtatatgtcattcacatcccacccctagtatttagcactgtgatattgtgttatgtggaatgaatgaattgactgatgaattaatgactcctaacacctagttgagtaattctatcttcagttgcttttttctgtgccaatcagaaaagtgtctaatatggtaatgtagaaaattctaaaatcctctctgagaatctgatctatatgtagtgttgaggtggaatttattctttctaaacaagagaatgatctggaacagatgttgacaaatttcttcatcaagggccagatgatgaatatttcaggttttgctgaccatacagtttctgtcacaactatacaactttgctatgttagcctgagagcagccatagatggtatgtaaacagcttgggtgtgacctaataaaactttatttaaacagattgtctttaaacactgggctggatatggcccagggcccatagtctaacttggtccatgatctagactaatgatctgactagcaggaaaatagaagtggctttgacagatagtyggagggatgctttcaaatctcatacgacaaggcaaatatcaaaaactagtcttgttattaggaaaaaacttcagaggagccctggtgatatttcaaaggtcagagatgttttaggttatgagcacttgatctcacaaagatgatgaatgtctggaggaaatgtatggtttactgcatcccttaaatgtttgaatgagccttaaagctgtaacgaactacacttttgcgtgttcccttatggagtgtgtgagaacctcccattaatgaaaacagcacacgttgatgggaaacatagaacagaccccgaaatgttgtaagtcactgcttggccttgatgctttctttttcatttctgtctctggctcatttagtgtacatttctctttcacatgccgggaagtctcctaagatgcatcccagattcacagaggagagcacgctgtgtaagtttggaggaatgtcatgtgtggatacccttcggttcatgtcacatgacatcttaaagatgtatagagccagaaaaggttgcatggatgctctgcttgtattccttgtgagcaggctggccatctgaagatcaggaatttatattcttagatgataatatacaagaattatcagtgctttctacatgccatgccttatgctaagtgcttttcatgtaatgtctcattttatctttgtaatagccctgtgaagtaggtagtggttcttttgctcttatttagaaggaagtgatacttgtaaagttccggtcactcatccaaacacacacatacaacaggtgtggagccccagtgtggacttgggtattgctaaccctgagctagagcaattaaacagtgacaccacat

SEQ ID NO: 724570 - DNA, 2142 bp, Homo sapiens
actccctgcttcactcttgctctcttaaacaattttgcacatagaggaatgaaagcattacaaacgccataaatcagattctgtgacttccctactaaaacttgccctttactcttagagtcaaagccagtatccttattttaacctgcaaggccccatctggcctgacccttatgaacctctctgcctaaatctcctccctctctccccacagctcacattgctccagccctgctggtctttctctttctcagttatgcagccaggctattttggcttgattttcattagctactccctctccctgcctggcaatctttccttagctattggcagggtagaggctgctcctcattcaagccttagctcccatgtcatctcctcagttagcccttccctgacctcccagtttaaagccaaaagtcaacctctagcacatctccctgatggactgaatcataggcaacagccagtactcaactatattgacttataaaaatgttcacttcgtatggttcagctaatattctcatcacagcattgccagtatctgccatctgcatatgtatttgtttactgattatctctctcccctattagaatgcactgtttgtgtatttaactgttacatacccaatatctaaaagatttcctagcacacgacaatgaatgaatgaatgaatgagtgaaggagtcactctttgtctctcttatcctactttatactcactccatggggccaggggctttgtatatgtcattcacatcccacccctagtatttagcactgtgatattgtgttatgtggaatgaatgaattgactgatgaattaatgactcctaacacctagttgagtaattctatcttcagttgcttttttctgtgccaatcagaaaagtgtctaatatggtaatgtagaaaattctaaaatcctctctgagaatctgatctatatgtagtgttgaggtggaatttattctttctaaacaagagaatgatctggaacagatgttgacaaatttcttcatcaagggccagatgatgaatatttcaggttttgctgaccatacagtttctgtcacaactatacaactttgctatgttagcctgagagcagccatagatggtatgtaaacagcttgggtgtgacctaataaaactttatttaaacagattgtctttaaacactgggctggatatggcccagggcccatagtctaacttggtccatgatctagactaatgatctgactagcaggaaaatagaagtggctttgacagatagttggagggatgctttcaaatctcatacgacaaggcaaatatcaaaaactagtcttgttattaggaaaaaacttcagaggagccctggtgatatttcaaaggtcagagatgttttaggttatgagcacttgatctcacaaagatgatgaatgtctggaggaaatgtatggtttactgcatcccttaaatgtttgaatgagccttaaagctgtaacraactacacttttgcgtgttcccttatggagtgtgtgagaacctcccattaatgaaaacagcacacgttgatgggaaacatagaacagaccccgaaatgttgtaagtcactgcttggccttgatgctttctttttcatttctgtctctggctcatttagtgtacatttctctttcacatgccgggaagtctcctaagatgcatcccagattcacagaggagagcacgctgtgtaagtttggaggaatgtcatgtgtggatacccttcggttcatgtcacatgacatcttaaagatgtatagagccagaaaaggttgcatggatgctctgcttgtattccttgtgagcaggctggccatctgaagatcaggaatttatattcttagatgataatatacaagaattatcagtgctttctacatgccatgccttatgctaagtgcttttcatgtaatgtctcattttatctttgtaatagccctgtgaagtaggtagtggttcttttgctcttatttagaaggaagtgatacttgtaaagttccggtcactcatccaaacacacacatacaacaggtgtggagccccagtgtggacttgggtattgctaaccctgagctagagcaattaaacagtgacaccacat

SEQ ID NO: 724571 - DNA, 603 bp, Homo sapiens
agccaaacactatatttcaaaaaaaaaaaaacttacgctaaaaataattcagcatgtgattcatataaacagaatattctatgtgtcacatgaaaactattttcatttactaatacttactattttaccaaatattgagttcctttatagcaggcactatttttggcgtaggggttacagcaaaggacaaatcaaatccatgaagggtgataataaaaagtaaaatgaaagtgagtgaacaatatgtagcgataggtgatacaattttagttagaatgttcagataagaaggttccaggctgggaayggtggctcacacctgtaaacccaacactttgtgaggccgaggaaggtggatcataatgtcagcagtttgaaaccagtctggccaacatggtgaaaccctgcctctactgaaaatacgaaaattagccaggcatgggggcatgcacctctaatcctagctactctggaggctgaggcaggataatcacttgaatccgggaggtagaggttgcagtgagccaagatcgtgccattgtactccagcctgggtgacaagagtgaaattctgtctcaaccggaagaagaagaaagaagaaa

SEQ ID NO: 724572 - DNA, 603 bp, Homo sapiens
agccaaacactatatttcaaaaaaaaaaaaacttacgctaaaaataattcagcatgtgattcatataaacagaatattctatgtgtcacatgaaaactattttcatttactaatacttactattttaccaaatattgagttcctttatagcaggcactatttttggcgtaggggttacagcaaaggacaaatcaaatccatgaagggtgataataaaaagtaaaatgaaagtgagtgaacaatatgtagcgataggtgatacaattttagttagaatgttcagataagaaggttccaggctgggaacggtggctcacacctgtaaacccaacactttgtgaggccgaggaaggtggatcataatgtcagcagtttgaaaccagtctggccaacatggtgaaaccctgcctctactgaaaatacgaaaattagccaggcatgggggcatgcrcctctaatcctagctactctggaggctgaggcaggataatcacttgaatccgggaggtagaggttgcagtgagccaagatcgtgccattgtactccagcctgggtgacaagagtgaaattctgtctcaaccggaagaagaagaaagaagaaa

SEQ ID NO: 724573 - DNA, 609 bp, Homo sapiens
ttattactctgtttttttaaaagtaccatttgaataaagttggrgtaatttgaaactatcaggatagaacaggggagagagagatcaaggggagaggagacagaagcatttagaaaggttgaattctgttggggaagaatggaggaaaaatataacagaatatgggattaattccagtgcttcttatattgtaccatgtagtcatctactacgaggaacaaataattaagtggaaaaccgcatctctctcatgctctttcacttttctaacatcaccatcacacatatatacattctccccctcagagttgtgtgtgtgtgtatgtgtgttgcacaaaggtgtcgatcatgaactatttagtcataaagcttttacacaaaagaatttcgagcacttattagttattatgagagattagagaaataatactgtaaatcttagtactgcattcagtgaagacactgatacttgctgttcaggttgttgtcacagtattttaaaaatatcatatatttagttgttagtttggcattgagcctggtaaacacttggccacggcagaacagctagctgttcaccaacatacagttctctccttccttagatta

SEQ ID NO: 724574 - DNA, 617 bp, Homo sapiens
tcaattcacaataataggcttgttcaaacagtctgaactaggcaactgagaatctgacagccagaattatgcagtgattcaaggtgctgggcaagaaacaggacccttgaaatgggattcaggactcagcacaagatggctgttgctaaggaaccaggaaagaaaactgcaaagacaagaaaaagacacaggaatgtagagcaagtaaacagtaccagaaatagggtacaaggtggggacaatctctttgaacttggcagaggtaaaaagaaggtgtgcgattcaatgctcaattatcaatgatgaactagagcattttcaattgcattttcaactttttcataagtctgctggctaggtgaaataaatttaaatacacagataaatagtcatcaaaattattaatataaatgttatgcatcatttcctgggcagaacaatrtgtgaatcacttaatcttctgactaccaagcaacttctcaacttctcaaaacaactttttctgtaggttattatttaccagagataacataggtaataagaaaattgtgatttgggtccagaaatatagtttctctcataatgaaaatgaaagagaaagatttctggataagggc

SEQ ID NO: 724575 - DNA, 558 bp, Homo sapiens
  misc_feature 421, 430, 431, 432, 433, 434, 435, 436, 437, 438, 439, 440,441, 442, 443, 444, 445, 446, 447, 448, 449, 450, 451, 452,453, 454, 455, 456, 457, 458, 459, 460, 461, 462, 463, 464,465, 466, 467, 468, 469, 470, 471, 472, 473, 474, 475: n = A,T,C or G
  misc_feature 476, 477, 478, 479, 480, 481, 482, 483, 484, 485, 486, 487,488, 489, 490, 491, 492, 493, 494, 495, 496, 497, 498, 499,500, 501, 502, 503, 504, 505, 506, 507, 508, 509, 510, 511,512, 513, 514, 515, 516, 517, 518, 519, 520, 521, 522: n = A,T,C or G
  misc_feature 523, 524, 525, 526, 527, 528, 529: n = A,T,C or G
tgctttgatgaagggcagatcaaggaagggaggaaagataaaagctgaagatactctgtcagtgtgatctgtacatgaagctgggggtgggaggcaaaacaaaaattatyttgcaatttctactcattctgatgaaatcagcaagaagcccctttatctatggactttgaagtgacttatctgtgttgtgcacattgaaaaacaatctacgctggggatgtttagagcatcaacactgtccatttcttctggacacactagagtcaaagatgcatttggtaggttaattaagcaaaatgaggggcagacaaagaaaaccaacacctactgaaagcctactaaatgccagctacatcagtgacatttaattcacataaaggaagcatagctcctttattgagtccctactatggtccagagncctccggannnnnnnnnnnnnnnnnnnnnnnnnnnnnnnnnnnnnnnnnnnnnnnnnnnnnnnnnnnnnnnnnnnnnnnnnnnnnnnnnnnnnnnnnnnnnnnnnnnncctgggtaagccgtctgtcttcctcccct

SEQ ID NO: 724576 - DNA, 1077 bp, Homo sapiens
aaacaaggcattctcctacattttgtcctagaaggcttgttgttttgttctatgatcatgatcagcctggaattgattttctatagatgatggtgagggaaaatttgtatttttccatatggatattcaattggccaaacaccagtaattgtaaaaaaaaaaaaaaattgtttacttactagtctatagtgtcacctttgtcataaatcaccggctgtcatgcatgagtctgtttttgaactctatattctgtttcatcagtctatttatgtattcttcagacaatcctactctgatttacttactgaggtttaatcttgataacaaatagtgtaaagccttcatattcagaaggctggtcttttaaattgctttgtttatttttatccctaatcacttgctcctcttcacatatagacaagaaaatgtggcaatccctaaagggacttcactagacctttagataaatttgaggagcattaacatcttaataaatgttgagttcaatacaagaaaatagtagatctctccatttttaaataatattttagtctgtttagatttttctatgcagagatttttaaaatatttcattaggtttttaataggtgcttgttttgtgctgttataattggtattcttttttgaagtagcatcattgtctggtgcacctgattttatagacaggtttgaggaggcaatgtctaatttatgtagggcccacagattggttggaccaggtgtgatatttacatagcatgaggagaaggctggccaccccactctaatcttattatgcaaataggttttccatttagccagtgccatgttgtctgctctttactgtacacctgtctggtgaagagaagggaacatagagccgccattttgaacatgcctagctccagatagccttttcctattggcacagctgccagcattcacccgtgcaagcttccaacttrcttgtctatgtctgcagctcgactttacaggctgctctttgttagaaaagaaaatgatttgggggctgcttttcattaaaaggaaaatcttatcgaggactttcttaccctc

SEQ ID NO: 724577 - DNA, 611 bp, Homo sapiens
tggatacctcttatacgcctatacatgttaatatacatgttaataagcatctatttgcttttctcttgataatttgtcttttgctacagagtttcttttgcaaccaagaacttatgaggattgagcttacaatagcctagcatggcttccatgcccctctctcatcagctggctctggcttttcgtatctccttttttctaggctctgtgttgatttagcatgtctcttttaagccacgtgtttaatattagctttcaggtcaagtaacgacaaacatcttcaatatgatacatggacaatggtagayaggaaaatcatttctgcagtaggcaatgagaaatgcctcatcaactgcagtgatcattcaatctacaactcttctttgcaaaagggtataacgaaaggctaaacctgatcgctaacttcaaaatgtctttttaatttaaacatttaattataaattagaaaatattgcatacaaatctcaaatgccagcttctcttgaaagttcagaaatctggcagcagtaaaataacattcttacatagaaacaatggctgtgcttaacaatgctggtttcttcctttatagattgggcctgggatctgca

SEQ ID NO: 724578 - DNA, 1284 bp, Homo sapiens
tgtctttcacttcttatargttattggccttcttttctaaaatatctcctacctttccaactaaggtttctcctattcagaaacaatggcttaatcattttccaaaggactcttttcttcatagcagtcttgatagccacctaccagaagcctgatttaataggtcttcggtggatccatttcacccatgagaacaatcagtaaggactggtggcttctcagccaggtgttttttgagtgtgtgggtgcctgagtggtgccatacaaaacaactctgattcatttgtccacagagaactcaagtgacattttgggtaattcatttgtttagagatgtgtcctttctacccaccttcatcttgacccaagtgtttagctttaaggctatttttggacatatgacactaaaaaggatattaactgctcctgagaatgtgacactcctagtgagtctcaaattggaaacaggcttcaatgcatcagccatttttcataagtatttaatagcttcaaggaaatgacagttccacgtcccacgtgggttttagttagggtgtaaggttcacaactgaatacatgggagacaattgttgaaccatacattatgcaaactgttgtgaaagttaaggatacacaactggcctactttatacatatgcacatgaaatactacccctaccccttaatctatttaaaatatgttcctagactttaaattcctcaggccttagggaaataaaaccaaggccatagctatataattgcaaagctccaactgtgtcctattaacccagtcatttcatgaactaattcagggacaatgggttcacaaagcctcagtgtgtttaagatttataattaaatttcaaaaatgaaagctcatcttgcctgtttaagaatctatgaagtgtgtggctatcctacagaatcttgtagacagactctgtttcttaaatccagccttttctttttattatgatgccagtttgtattttaaaatatgccatttctttctaaaaagtccagcttaaaactcaagatattaaataacaaaccctgacagaacatgtgagaaagtttcatacttttttttcaatttgcctgaaaaaaaaaaaaagctaaaaatacagacaatttctatctatgaatatcaacgattttaaaatgcccaccagagaacattgtttctaagtctggagtaaggaagagataagagattgtcctagtccaggtcttttaagaaactgattaaacacaaagggagcgtttcgtgggatattccgc

SEQ ID NO: 724579 - DNA, 766 bp, Homo sapiens
gcagagtaaaagaaatgcaggagtgtagactcagaaatggagatagtgcaatcggggtgggggaggatgtgccccaatatgaatgaatctatgggtttagaccaggggagtccaattgtttggctcccctgggtctcgttggaagaagaattgtctcgggccacacataaaatatactaacactaataatccatgatgagctaatttttaaaaaaatarggtccatgcataaatctcgtaatgttttaggaaagtttatgaatttgtattgggccacattcaaagctgtcctgggctgcatgtggcccatggactgcgggatagataagcttgctttagattgtctctaaaacagaagcatatatttgaagccacccacccccatttgagctgccagatgacccaagctgcataagtgaccccagactagaccaacagaagaatcgcttagttaagcacagttcaaattgttcttccactgaatcatgagtatataaaatggttattgtcttcaatcactgagtctgtggtggttggttacgcataaataaataattaatatagtaatttaagcaacaaccagtgattgcttaataagggaagacgttgacatttcaaaaatatttgaaagattatttagccctggttaaaatatctcaagattttattgtaaactctttgttgcaggtaggcccactgtgcatcagatatatctcgtaaactcccttctgtgccgttgcttatgcatcccctaagcgtgggatgc

SEQ ID NO: 724580 - DNA, 598 bp, Homo sapiens
tttttttttttttttttagacggagtctccctctgtcgcccaggctggagtgcagtggtgcgatctcggctcactgcaagctccgcctcccgggttcacgtcattctcctgcttcagccacctgagtagctgggactacaggcacccgccaccacgtgcggctaattgttttttttttgtatttttagtaaagatagggtttcactgtggtctccatctcctgacctcttgatctgctcacctyggcctcccaaagtgctgggattacaggcatgagccaccgcacccggcctcagttcttaataatataacaattcattttgatatcaatacctttttttgaacacttgtcatttgaagcctaaagaaatattatttttaacctactgtatgagggcagatattaggtattataatcatagaacaggtgtcttagaggccatcctgtcccaaccctcattttaccatagaaaaagctaacagcagaataggtttgtccaaggccactcagagagctagtggtagaaccaggactggaatggtgatgtcctgacctctgtgccattgttctatctatactacatttgcaaattaccag

SEQ ID NO: 724581 - DNA, 1214 bp, Homo sapiens
tagtcatataacactagcctctcagaaaaagtaatactctgagtagtgacagagatactttatttgatttggcatctgaagaacagggtttgagtcctggctttgctacttaatagatgtgtgatcactggcaagtcacttcacctccccacatccagctcagtttcctaagtctaaaatgccagtggttggggcctgcttgttagggttgttcattcatctattcatttttgttcatttgtttattcacctgctatcataggcactaagctatgcgctagaaatgcaggccgggcgcagtggctcatgcctgtaatcccagcactttgggaggccgaggcagatggatcatgagatcaggagttcaagaccagctgaccaatatggtgaaaccccatctctactaaaaatacaaaaattagctgggcatggtgacacacgcctgtaatcccagctactcaggaggctgaggtaggagaatcccttgaacctgggaggcggaggttgcaatgagccaagatcatgccactgtactccagcctgggtgacagaatgagactccatcgccaaaaaaaaaaaaagcaaagtaaggcatggtccctgctctcatggagtgtactgtatagtgaaagagactgtcttagtccactttgtgctgctataacaaataccacagactgggtaattataataaatggaaatttactggctcatgattctggaggctgggaagtccaagatgaagggactggccttggtgagggccttcttactgcatcatcccatgatagaagggcaaagagtgggtgacagagagcaagagatcaaacttaaacctccagcctttttgcaagcagcatcactgcattcatgaggttggagcccccatgatccaaacgcctgccattaggtcctacctcccaacactgctgcattagtgattaagtttccaacacatgctttttgggggacacactcaaaccatgtagcagagacaatgaaggaatcacattgagtgtgtcattccaaattgagtgtacattctaaatctaagggttaagagcatagctctgtgggagagtacagcaagggagtctgacctacatgaaagggkggagagagagtagagtgggaaaacagtttagggaagggttctgtgaggaaaacaaatttgaacttggagcaggtaaatatcccattaaagagtgggatta

SEQ ID NO: 724582 - DNA, 633 bp, Homo sapiens
cttggatttgtacaaaccactttgtgattgacttacccatcaaaaaggttgaccccggtcacacacacacacacacacacacacacacacatcatagggtgtcattgctgaaacagattgtagcaatcatgtatatttatgtatatgtgcacataatatgtatatgttatatgtatgtatggctgkgtgtgtataaaatttggagaaagaatatatagtaatgcatcatgtgacaacagggatatatctgagaaacgtgtcattaggtgatttcgtcattgtgcaaacatcatagagtatatttacacacttagtatagccgaccacacacctaggctatgtggcctattgctcccaggacgcaaacctgcacagcatgatactatactgaataatgtaggctgttgtaacacaatggtaagtatttgtgtatctaaacatagttaaacattggaaaggtacagtaaaaatatggtattatataatcttcggagaccactgttgtatatttagttcatcattgaccaaaatgttgttatgtgtacatgactgtatattcatgtatagctatcagaagaatgactctatccatctatctgtcgataacacacacacacacacacacacacacac

SEQ ID NO: 724583 - DNA, 2796 bp, Homo sapiens
ctcggaaattcaaaatatgtccatcaaaatgaaaaaaattagatatgttgaacgcagaataaatacagctaaagattgaattatccaactgggcagttgagtctgagttatgcaatacaaaaagtaagaaacaggccaagtatgggggaaaaaaagctaacggatatggaagatggatctagagattaaatatccagctgtggatcccagaaggagagaacaaacagaatgaagagtcaggaattcccaaaagctgaagaagctcatgactcctgagactaagggagacttagaactgataaggtttgccaagcaagatacacgactgcacatgggctagcgaggttataagcaccaaacaaaaaaagaatcataaaactttacacaaagaaaaatcagttaactacaaattaaagaggatcagctcaacatcagacttctcatcattgatagaaaacaatgtagataacaatggagagtgtctttaaagtcatttgataaaaaacaacttggaatgtagaattgtttcatactgagttattttttcattcaagtgtgaaggtgaaataaaaatgcttgtaagtaatgaaagccttataaaaattacccacaataggcattttataaaataatcactcaaggaggtatccaaacttgattaaggaaaaatataaaaaagatgatggtatgagctataagaaagggtggcacacaaggaaatcagtgtagtgcctagctgaatttccgtaattgttgatgtatgatttgaaagaacacaagcccctcctcccttggtaaaaattcagaaatgtaaactccatataatttcaacatgggaaacagtgaaaaataagaaaagaaagcttgtgaaacattgccaaggtccttagtctgtttgcggcgaggcggtatatagagtaattctagacagcaacaaaaaaatccacatataaatacatgctaacattttaatgacaacccttccaaatatgattaaaatgcatatcctaactgaataagaaaatttgggtgggaaattgatcagtttacaaaaaagactctcaaaaataatgatcagaaaccggatgatggaaaacagaaaaaatagccacctctttcactcctcctaaatatggcaggaaaatatggatagcctgttagtaattatctaaatgtgaacatgtttgtcaaaaagaacagggtatcctgtaccatgtatccttttcaacttgtttcttccatttaatatcatgttttttgtgtatatctttgttttttgatacaatacaatttaggttagtgcgctctctctctctctctctctmtatatatatattttattttattttattttattttttattttttttgagatggagtctcgctctgttacccaggctggagtgcagtggcgcgatctcagctcactgcaagctctgcctcctaagttcatgccattatcctgcctcagcctccagagtagctgggactacaggcgcccgccaccacgcccggctaattttttgtatttttagtggagatggggtttcacgtgttagccaggatggttttgatctcctgacctcgtgatccgcctgcctcagcctcccaaagtgctgggattatgggcatgagccaccgcgcctggccaggttagcaatattaattgctctaaggtataccttgtatgaataaattgcgtttcattcacttattatcctcattcaaagccagttatgttttttctatttttttcactattagaataattcagtatacactttgcgtattttcatatgcacaggagagctaattctgggtgagtgttgggtgatagaattgtagggtttcaggtgatcggcatctccgattttaggagatatggcctaattgcactccaaagtgataaataattgtttaattcatttaaatgggctcatgcaaatgaaaaagtactgaggatgcatgaagtcaggctgacacacacttcagaacagttgttatctatgaggaaggcaggagggagaaggtgggaaactttggactggatccataatattttatttctttaaagggattgaaaactaaactaacatgataagctgttctctgttaaatctggatagggaatacaagagcatgtgttatgctatttcctcatctttatttgaaacatttcataatgacatgtattagagatgaaaattccatatgtattggtgtaaagaagggagggtacaaaaggaaactttcacagtttaactgttggggaacaaataattcattatctggtgacagatgatcaatagcaaggagttagaaaagagcaggacacttttggtggaaggctgcactggtgagagatggacaggaatttagactcaaggaccaggattgggccagattattagaggtcctgagattctgggcagagtttctgaatttcccagaagccatctgaagggtgagttgaggtggagaaatattcgaagcaggaaggcacattagaacatgcaatactgtggttatgaaggatgaagaagttaaataaaccgtggcaggatggacaggcatgacagcaaactgaatatgaagaatgatcaccacgggaaagtcgcaaagcaatcctcctaaatttggggatggagaatggtgccattaagacaataaatacagaagatagatgaagctgggaagaaagatacttagttggatttgggacactatggatgtgaaatgcacatgcaatttgcagatgttcagtaagtaataggaaagactttttgttctcaaatg

SEQ ID NO: 724584 - DNA, 1361 bp, Homo sapiens
tgacctagtcagctgaccaaacaggaaaatgtttgactgtaccctctaggagagaaatttataatactttattgcaacccagtaatatttacttgttttattgtctgaaaaactattctttattattcctgctgtttttgcctaggaaaagttagttttctttctccaagagacttgccatctgttgacaggcattcacaccagttggcatgaaagatcacggaacagctttcctggtggagtttggatccatgtatatcatttacagttaattagaggtgatttccctgaacttcttgggtagttttgagaccagattgagaggaagagattttcgtttctttgtgtttgtgtaaccacatgaaacagtttgtctcctcctgcccatccatcccctttttgctgtaagaaaataactccagtcttgtgctactaactctcctgataaaaattattggccttttgttaggcgaaacaaactaaacccatggcccagattcatggataatatttttggggttaactgcttacagagatctttaaaagttattattatccagagaagagatagcaataatagttagggaccattttgtagcagttaccactgtcctagaaatatcagcacagaattattgattttctaatgaaaagaagagtaaggcatacaagtagttgtaatgtgtgtagtgcagagaataaggctgatccattttcagtagggaatgggacttcagttatttttccaggactgatgatgagtctttgatgagtcatccttactctcagctggttacagtcaagtcaacaaatatttcctgagaaatacagaggagcactgagacaagtatggattttacaccaaggatttctttgggaatgaaggtacgagctttctgggcccgtggatctcattgcattgtttgggaacatatggattggatttgtgatgttagtcatattagcaagatactcaggtcaacagagtcaagaagtgtgtgtgtgtctaagtcacataatagaacaataaattcttttggttgtcttttattttaaacatagtgagaccttttatctaacaaaagccaggtgtgcccatgtatgctggtggtcctagctactctgaaggctgaggtgggaggattgcttgagctcaggagatygaggctgtagtgagctgtgatcactccactgtacttcagcctgggcaacagaacaagactctctctcaaaaaagtaaaataaaataaaataaagcagcaattagagcatccaaagagtgcctccagatagtcatggtgagaacaggtcagtcagttgggaattgataacaactgtgatgaaggtggcaactgaggtca

SEQ ID NO: 724585 - DNA, 643 bp, Homo sapiens
gaggttactgtgtggttccctgatgaatgacagaggaagggctgaactgcaggtctcaatttgatacttatctcagcatagatagaattttgggcccagatatagagttaacctttgaggaccttcagaattaaatgtccaggtggaagatgatgactttgcaaatgactcagagaaggaaaggccgggaaaaatggggaaaccggamaataaggagagaaagcattggacgtgaagcacattggatgctgctgggaatggactgacaagtctcctgggttcagcgacggggagcttatttgcaagctctgcaagagttgtgaacttatgcaatgaaggcagggaccaagctggagcaggctgagaagtgagagggagctaagaaacaaaaatggcagctcccaagatctttaaagaagcttggttatgaaagagcagggaggaaccaggagccacttgatagccatggggtgagcactgaagacacagaagagtcaatgaatagaaaaagttccaaactccaaggcacaggccttggaaagggggacagattaaatggaattgtcagcatggtgtctggagacagtgggaattcccatttgatgactccaagttttttatgtaaattaggactcaggtgact

SEQ ID NO: 724586 - DNA, 643 bp, Homo sapiens
gaggttactgtgtggttccctgatgaatgacagaggaagggctgaactgcaggtctcaatttgatacttatctcagcatagatagaattttgggcccagatatagagttaacctttgaggaccttcagaattaaatgtccaggtggaagatgatgactttgcaaatgactcagagaaggaaaggccgggaaaaatggggaaaccggacaataaggagagaaagcattggacgtgaagcacattggatgctgctgggaatggactgacaagtctcctgggttcagcgacggggagcttatttgcaagctctgcaagagttgtraacttatgcaatgaaggcagggaccaagctggagcaggctgagaagtgagagggagctaagaaacaaaaatggcagctcccaagatctttaaagaagcttggttatgaaagagcagggaggaaccaggagccacttgatagccatggggtgagcactgaagacacagaagagtcaatgaatagaaaaagttccaaactccaaggcacaggccttggaaagggggacagattaaatggaattgtcagcatggtgtctggagacagtgggaattcccatttgatgactccaagttttttatgtaaattaggactcaggtgact

SEQ ID NO: 724587 - DNA, 2520 bp, Homo sapiens
gtaggtttattaccatctgttatattaaggtgctgcagaaagccgtgtcctccaaatttttaactacttggattttaaaaacatgtacattggttgttaagatttcagaacactagttactaaacaccaactggaactacagaaaccctctctgagcttggtaagttaggaaggtgctctgggtttatttctcgccatggcactgcttagctacatgatgtagaacgatctgcttaattgatgtacctgtttttgttttaaaatctgtaacatgcaggccgggcgcggtggctcacgtctgtaatcccagcactttgggaggccaaggagggcggataacgaggtcaggagatctagaccatcctgcctaacayggtgaaaccctgtctctactaaaaaattcaaaacattagctggacgtggtggcgggcacctgtagtcccagctactcgggaggctgaggcaggagaatggtgtgaacccgggaggcggagcttggcagtgagccaaggtcgtgccactgcacgccagcctgggtgacagagtgagactccgtctcaaaaaaaaaaaaaaaaaagtctgtaacatgcaaagtatacccatctctaaggctcctgccaatgctaataacctaggactgcaaatgccataataagttaaatccattgtaggggtacacagttcttccatgttgtgtttataaatgcaagcctagtcgtttaggttaaagttcatttatattcaaatcattgtaatctgtgaacaccacggtgggttctggggaggtcaagagctctgatgcatgctgagatgctcaggaaatcagttcatagtttgttgccccagcagacagagaggatattttcaaaatataaaaggttcattgaagctggaagtggaactagtaattcatctatagagttttcattttcaaaaacctttataaacaagaaatttagtggaacctgggttaagcgattctggaaccccaaacacaagggtcacgtgcagaagcagagctgtttggatccaaattcagcctctccctacagagtcaaacgttcctcttcaaagctcagtctcatgtgtgcccctgctcttgtgcgtgtccttctgagacagctctcaagctttattaagcacacgggactgcaactaatgtggggattatttgtgaaactgcagcgtatttaagtcaaagagccaagaatgttagtattatataatgaagtgaacccatgaattctgggttttctaacttcattagtgatggacaccaggattcacttctttgatgaatgtctgccttgtttttaacattaaaaccagtaaagcttacctgtttcatataatcgtaaaggagaatattttaaaaattaagcctggctggccactgtggctcacgcctgtaacgccagcactttgggattacaggtgggcaaatcacctgaggtcaggagttcgagaccagcttggccaacaaggtgaaaccctgtctctactaaaaatacaaaaattagccaggcatggtagcgagcacctgtaatcccagctactcaggaggctgaggcaggagaattgcttgaacccgggaggcagaagttgcactgagcaagatcataccactgcactccagcttcggtggcagagtgagactctggctcaaaaaaaaaaaagaaaaagaaattaggttctacatggtggttcaagcctgtaattccaacagtttaggaggtcaaggtgggaggatcacttgggaccaggagttccagaccagcctgggcaacatagtgagacccagataattaattaattaaccctacagataattaattaattaacatactgagtgctctgaggaattctagtgaaggtcacttgttgacgttgggccttgctaatgcatttgaatcttctgccttttcctgcttccctcccacctgctgtgcctgacagggtcctacttactcctcaaagccttccttgactcctccagctgagctctaatccttctctctcctgtgatcccaaaaccttctgcatattcctctgttatagagcttatccagataacaatcactagggcagtccctgtgataacatgagtacttcatgagggaagggcacgagtcatgttcatccttgcagcccagcgcctgccacgcagggggtatggaatggttgttagttaagtaacaaatggggctacccataaacattgctgctttatagctagggagcctcccgtggctaagaaagatcgagagctatcattaagtgaacgttgttattttttctaattcatgcatcacttcaagggtaataatgtgctgtctcagagcaggctaaccattactttaggccagtctggtattctccttttcttcactgctgccatttaactgggcgtgcaaatggagtcaggtcttcatgttgctgtttactcacctcagtagggcctctcagatgaaccttgaagtagactgcacagtctactttttccttttttccagaaacaat

SEQ ID NO: 724588 - DNA, 2520 bp, Homo sapiens
gtaggtttattaccatctgttatattaaggtgctgcagaaagccgtgtcctccaaatttttaactacttggattttaaaaacatgtacattggttgttaagatttcagaacactagttactaaacaccaactggaactacagaaaccctctctgagcttggtaagttaggaaggtgctctgggtttatttctcgccatggcactgcttagctacatgatgtagaacgatctgcttaattgatgtacctgtttttgttttaaaatctgtaacatgcaggccgggcgcggtggctcacgtctgtaatcccagcactttgggaggccaaggagggcggataacgaggtcaggagatctagaccatcctgcctaacatggtgaaaccctgtctctactaaaaaattcaaaacattagctggacgtggtggcgggcacctgtagtcccagctactcgggaggctgaggcaggagaatggtgtgaacccgggaggcggagcttggcagtgagccaaggtcgtgccactgcackccagcctgggtgacagagtgagactccgtctcaaaaaaaaaaaaaaaaaagtctgtaacatgcaaagtatacccatctctaaggctcctgccaatgctaataacctaggactgcaaatgccataataagttaaatccattgtaggggtacacagttcttccatgttgtgtttataaatgcaagcctagtcgtttaggttaaagttcatttatattcaaatcattgtaatctgtgaacaccacggtgggttctggggaggtcaagagctctgatgcatgctgagatgctcaggaaatcagttcatagtttgttgccccagcagacagagaggatattttcaaaatataaaaggttcattgaagctggaagtggaactagtaattcatctatagagttttcattttcaaaaacctttataaacaagaaatttagtggaacctgggttaagcgattctggaaccccaaacacaagggtcacgtgcagaagcagagctgtttggatccaaattcagcctctccctacagagtcaaacgttcctcttcaaagctcagtctcatgtgtgcccctgctcttgtgcgtgtccttctgagacagctctcaagctttattaagcacacgggactgcaactaatgtggggattatttgtgaaactgcagcgtatttaagtcaaagagccaagaatgttagtattatataatgaagtgaacccatgaattctgggttttctaacttcattagtgatggacaccaggattcacttctttgatgaatgtctgccttgtttttaacattaaaaccagtaaagcttacctgtttcatataatcgtaaaggagaatattttaaaaattaagcctggctggccactgtggctcacgcctgtaacgccagcactttgggattacaggtgggcaaatcacctgaggtcaggagttcgagaccagcttggccaacaaggtgaaaccctgtctctactaaaaatacaaaaattagccaggcatggtagcgagcacctgtaatcccagctactcaggaggctgaggcaggagaattgcttgaacccgggaggcagaagttgcactgagcaagatcataccactgcactccagcttcggtggcagagtgagactctggctcaaaaaaaaaaaagaaaaagaaattaggttctacatggtggttcaagcctgtaattccaacagtttaggaggtcaaggtgggaggatcacttgggaccaggagttccagaccagcctgggcaacatagtgagacccagataattaattaattaaccctacagataattaattaattaacatactgagtgctctgaggaattctagtgaaggtcacttgttgacgttgggccttgctaatgcatttgaatcttctgccttttcctgcttccctcccacctgctgtgcctgacagggtcctacttactcctcaaagccttccttgactcctccagctgagctctaatccttctctctcctgtgatcccaaaaccttctgcatattcctctgttatagagcttatccagataacaatcactagggcagtccctgtgataacatgagtacttcatgagggaagggcacgagtcatgttcatccttgcagcccagcgcctgccacgcagggggtatggaatggttgttagttaagtaacaaatggggctacccataaacattgctgctttatagctagggagcctcccgtggctaagaaagatcgagagctatcattaagtgaacgttgttattttttctaattcatgcatcacttcaagggtaataatgtgctgtctcagagcaggctaaccattactttaggccagtctggtattctccttttcttcactgctgccatttaactgggcgtgcaaatggagtcaggtcttcatgttgctgtttactcacctcagtagggcctctcagatgaaccttgaagtagactgcacagtctactttttccttttttccagaaacaat

SEQ ID NO: 724589 - DNA, 652 bp, Homo sapiens
ttagattaaggatgtgtaggcttttctaaacccactttcaccttaattttactaatttatcgcactgagctttccttccaatgatactgttctacttactgtagagtgatcagttaccccatttgcaaggaacttkgctggtttcaaccctgaaagtcccatatcctgagatacccttcattcctgggtcagtcagacacctggtcccccaaatgtactgcctcccagttgtactgtgtgtcgttgactgttgctttgctcttgccagtttcttatctagaatgagcgattaccttatcattgccttgaattcctcatgggacccgcacagacgcttgtacccagtagatgctcatgaagtgggtatatgcataaatgttggtacctcttcctctgtagacagcactgaaatacagatcactgaaatgactgactcaagagccatatgacagcaccaaggttaggccgattcccatgtcttgggcccttgtttccttcttggttataaaaggtcttatagtgccctctggtggtgtcaggaagctgtctaatcccctgaattacaaggcagaaatcatgccttctcttctgtattcagtgcgagtcataagaagaccattactactaatgtcagtgcctgtgaactggactt

SEQ ID NO: 724590 - DNA, 652 bp, Homo sapiens
ttagattaaggatgtgtaggcttttctaaacccactttcaccttaattttactaatttatcgcactgagctttccttccaatgatactgttctacttactgtagagtgatcagttaccccatttgcaaggaactttgctggtttcaaccctgaaagtcccatatcctgagatacccytcattcctgggtcagtcagacacctggtcccccaaatgtactgcctcccagttgtactgtgtgtcgttgactgttgctttgctcttgccagtttcttatctagaatgagcgattaccttatcattgccttgaattcctcatgggacccgcacagacgcttgtacccagtagatgctcatgaagtgggtatatgcataaatgttggtacctcttcctctgtagacagcactgaaatacagatcactgaaatgactgactcaagagccatatgacagcaccaaggttaggccgattcccatgtcttgggcccttgtttccttcttggttataaaaggtcttatagtgccctctggtggtgtcaggaagctgtctaatcccctgaattacaaggcagaaatcatgccttctcttctgtattcagtgcgagtcataagaagaccattactactaatgtcagtgcctgtgaactggactt

SEQ ID NO: 724591 - DNA, 652 bp, Homo sapiens
ttagattaaggatgtgtaggcttttctaaacccactttcaccttaattttactaatttatcgcactgagctttccttccaatgatactgttctacttactgtagagtgatcagttaccccatttgcaaggaactttgctggtttcaaccctgaaagtcccatatcctgagatacccttcattcctgggtcagtcagacacctggtcccccaaatgtactgcctcccagttgtactgtgtgtcgttgactgttgctttgctcttgccagtttcttatctagaatgagcgattaccttatcaytgccttgaattcctcatgggacccgcacagacgcttgtacccagtagatgctcatgaagtgggtatatgcataaatgttggtacctcttcctctgtagacagcactgaaatacagatcactgaaatgactgactcaagagccatatgacagcaccaaggttaggccgattcccatgtcttgggcccttgtttccttcttggttataaaaggtcttatagtgccctctggtggtgtcaggaagctgtctaatcccctgaattacaaggcagaaatcatgccttctcttctgtattcagtgcgagtcataagaagaccattactactaatgtcagtgcctgtgaactggactt

SEQ ID NO: 724592 - DNA, 652 bp, Homo sapiens
ttagattaaggatgtgtaggcttttctaaacccactttcaccttaattttactaatttatcgcactgagctttccttccaatgatactgttctacttactgtagagtgatcagttaccccatttgcaaggaactttgctggtttcaaccctgaaagtcccatatcctgagatacccttcattcctgggtcagtcagacacctggtcccccaaatgtactgcctcccagttgtactgtgtgtcgttgactgttgctttgctcttgccagtttcttatctagaatgagcgattaccttatcattgccttgaattcctcatgggacccgcacagacgcttgtacccagtagatgctcatgaagtgggtatatgcataaatgttggtacctcttcctctgtagacagcactgaartacagatcactgaaatgactgactcaagagccatatgacagcaccaaggttaggccgattcccatgtcttgggcccttgtttccttcttggttataaaaggtcttatagtgccctctggtggtgtcaggaagctgtctaatcccctgaattacaaggcagaaatcatgccttctcttctgtattcagtgcgagtcataagaagaccattactactaatgtcagtgcctgtgaactggactt

SEQ ID NO: 724593 - DNA, 3183 bp, Homo sapiens
  misc_feature 2245: n = A,T,C or G
ttcactataaaaagtattgcatgtaaatgttaatagtggtttccaagtaggcagaaataaccttttgaaacacaatttttttaaaagaaaaatcaaaatctgctcctcagatttgtgctaattctaaagagataataaaaaaacccctcaatttagaccgtgatagttttttttttaataatactaacatagatttcattttagcatttgtgagtgctttgtgcagattttttatagagtagaaataaaatggaacagtcaatgatattagcctcacatactatgtttctaaaattttccaaggtttggtttttayattttttcagctttaaaaatacatggtcattgttaaaacttggggtaatttcaataacaattcaaagaattaaataaaatttgcccatatttccaccacccacagataattatcattaatcttggagtgtgctttaattaatagactatttttagagcagttttaggtttagaaaacaggaatggaaagtacacggagttctgatgtactccctcacgcccctccctccacacacagctgcttgtactgacatcttacattcgagtggcacatgtgttatgattgatgggcccatgttgttacattaagatgaactaagtccattacttacaggaggctcacgccgcatgctgttcattctgtgagttttgagaaatgcataatgacatgaagccaccattataatgtcatacagagttttttcaatattttaaaaaacatacataaaattaattttcacttttcattgggtaatataatttttgttttttattttacagattgtgggtattgttctttgattataaaagacaatagacatttataaataatagtgctggccactaaatgaatcatctaaaaaactacactggtagaaagcatgcatttattttatgaattccattagctgcctatcagggaacatggagcactggggcacagatcccagcacagaagggtttgcttctctcctgtggttttcatgtcaattaatgattagaccttgagcctcacaagaaaggtgataggcctttgagtcggtttactgcaacagtctactcaagacttgccccaggccctgggaaacatgtaggtttaaaaatccctaccctccgttttcctttcacagggagtgaacttctggcccaggcagtgggcagtggggcacggttgccccggagatgagactcctcttcccgccctggggggtgggggctggctggtggctgagggaactatttttgtttgtttctttttttaaaaaacggagtctggctgtgtcctccaggttggagtgcagtggcgcgatctcggcacactgcaacctccgcctctcgggttcaagtgattctcctgccttagcctcctgagtagctgggatcacaggcgcctgtcaccacgcccggttaatttttatttttattagagacggggtttcaccatgttggccaagctgctctcaaattcctgacctcaggtgatccgcccacctcggcctccaaaagtgctaggattacaggcaagagccactgcgcctggccggggaactgtttttgatgggtggggtccccggctgtggttggtagtgtgggggcgtggccgagggtgtggcctgagggagtgagctaaccgggggcgtggcctgatatggggcggggggaagagccgggctgggggcgtggcctggtggggagcggggctggggcgtggcttggctgagtgtgctgccgcggcgcgggaggagagtgtgcgttgcgctttctcccgcgatcgccctgccggtcgctagctccgagggcgcgcactggatcccaggctcctccgagagtgcggcgacctcggggctccgccggcgccggaggtggctctgagggcagggacgtgttggacacgctgactttgtaggctccgccaagaggcgccgcagaaggtaagacggcttcgggcgcgcggctctgccgggcgggcgcgggcatgggctgttaggtagaatatcgggaggatttgagtcccagtggactgcctcggggcttcgggatgtccagctcccagctgcttggcctctgcttcccccgccggtggaggctaccgggtgctcacctgttaggtccgtgcgcccgctccctgcccggcggtggctctgcgccctctgggccaccgggcaccatcgcttttgggaggacatgcacgtggtgttctcgcaaaagnccgtttccagcccgaagccctgcagggaggtcgcccttgtaacttcacccgcgctcccagctcgcggggcctggcctacaggggcggccgtgggggtggcagagtctggggagcctggcgcgccggagccctgtacgctctgctccatcgggtggcgtggctggtgcctccggggacccggagcgatgcggttggagagcttagtttagaaagcaagtttctcttggtaccagcggagtctcgtcccaggggaaagattttgggacccggtgcccatcgtctgtggactgcagggaatgcattggcggagttggtttggtcccattctgtgcaggaggtgggggaattggtactccagccccaggcaggtagaagcccgcgctgctgccagcgtcagggggagctcgggtgacttgggctgggccacccatctgactgcaaggttacagagcttgagcaaatttcccctccctccaagtgcaggaaaaccaaaccaaagcaagcaaacaaaaccctgtgggtcatttgcttcccagcattgcatagggatgtggataaatagaataatactgtgaatttattcagctcttgttcccatggcttcccatagccttatattatgcacctccccctgccagcattttctctgtccccaccttcggtttttgctgcctcgtgttttcttctctgtgaacctttcctggtcacccagcgatttgctctcctttattccccttgctaacaggcggagaaatctcactccttttctttttccacctttcccaacaaattctccttttttcctaatgtccccctcccccgtcttgcaaacttcctcactgcattattctcggggtgcctgtcatgcaccctccctgttctctgccctcctcccgcactttagagtttcatgtggctttgtcttattatcccatatc

SEQ ID NO: 724594 - DNA, 1089 bp, Homo sapiens
ccccagaggcggaggttgcagtaagccaagatcgtgccattgcactccagcctgggcaacaagagtgaaactccatcccaaaaaaataatggttacaatattaaattatgcatgttttaacacaattttaagaaaaaaataattgaataaaagggcaaaaaataatccaaacacgtaagtcttcacttgctctactcctgttgtattttatatgaactgttagaacagttagccatacacaattgctgctggagttgggggagacctctatcttggcagggatgctggtggaccgtggcaagaggctgaacctctgggcctgcacctcggcctgataaagcaactcttgtgtctgctactgccctcccatggtcaccccatattacaaacactgcctcagcagcctgtttcccttctgccttccttctgtctgcactcccacaaaaccagggacagcatcctcatccctacctcccactgcattagcagtgggtattcctgacctgccaaagcccaggcagctctgctgctgtgacacggcacacttttcaacacggggaggaaatggaaggatgcagtgtttaacgcccacgkagcattttggcactgttgccctccatggtggcatgggcaagatgacctttaattgacctcaagtctcattctcttatttatagactgttttatacgtgggtcactagggaatttattctgtctcccatccctacactctgaatcatcgtgaagccttaatcaattcttaatcaaaaatcaattctttcatttttttcagtctctaagaaagaattctcatttcccttattcaaactaatatccatgctaatcttttataccttggatttaaagtcaccttgggttggggcaacagggttctcactcgtgtttaagatctccttatttcagcctcatacgatcaaagggcagtcttccccttttctctttcaccctcaggactcccatgccttggagctgactcttccaggcagtttccacagatctgcagtcctgctctgccactgtctctctgttgtccccacatctacccaacgtcctgttgtattgcccttc

SEQ ID NO: 724595 - DNA, 1339 bp, Homo sapiens
gctaaggtgggaggatcacttgagcctggtaggttgaggctgcagtgagccgagatggctccactgccttccagcctagacaacagagggagactctgtctcagaaaaaaaaaaagaaaaattaagaagtactctcaattgatttaacaaaaaaccagaaaagtattgggtaaaaacaagcatataaataaactatttaggattatggaggtaaatgccaagataatggctaaaaagatgtgaaaaatggttgcctctgacaaggagaaaatgagagcaactgggtgggaccactgttatttttcataataaactttgtaaagttatctcactctttaaatgtatgcagccataacacagatagaaaataaaatagatgtgactcatattaccaaccattttatctttgacatgctgatctacaaatattggaagtttatttattatcactgcaagcaatacattgtttttgcacagtgtgcccgtgtcttttctaactttcctcagtgacacttatttctggaagtgttggaaatttaatttgaaattgtgttatagtaacttctcttgaatctctctgttgacatcagctcattttctctatttgatgtttcaggaaatagctcatctctggtctggccttaaagctttccttaacgaacagcttcaatctttaacatgtttctgggtctactggaggcattttcattccttttgttttggcatctatattcatgttattgtttggtggtgaaatgactcctaagtaagtagaatcaaaggatgaacttgaagactgctgattaaaaacatgggcatgtattaataacagaaggtaaacttctaggaggttatcctaagagtaatcagagatgaagttaaagattttcattcaaagatgtccatcaaagccttacttatgacttaataaataaaggattacaatacatccaaatgacagaactgtatgtagctgctagacaacatattaaagaaaatatcaattggtatggaaaatatttataatatgttgctaagtaaaataaatagatcagtgaccaaaagactttatgtataaacatgtaatttttgtaaaaaaaaatctatttaaatataaaagagacatacattagaatgcctgaagtagtcctggcaagatcttaaagtgaccttgaatctgttgtgtttttgttttccaagctttccccatgaagcataaatggattttgtaattaggagaaaagtgctattttaaaagcaaaagccaacaagaaaatacaccctgacttrtttttcttgtcactgaggagacttggctttgctggaattaagattattg

SEQ ID NO: 724596 - DNA, 631 bp, Homo sapiens
caagttcacattcaagtgttttgtgacttaccctttgaccccttcacacaccagcatacctcattccatcactcttttccatgtgccaataaaatcctggtaaacacataagcmcaagtaaaaggctgtgcacaccaagtgcctcccagcttcctgacacacggacacaaaacaagaatggatacagctctcctcaaactgctaaacaagaacaaagaagtctcaggcttgcaaagatctctcaggcagcccagccgttcctctggaaaatgagttcgtcagaaaaaaacacttggaatggaaaggactcaagtccagagggcttttatttaaaccccaaacacacagagccctctacggtaaggtttcaggtgcccagatctgggaggcaggggccacggaagatggggagcagccaggggcctgcgatccaatcccatgtgccctgcagggactcccaggcaatgagaaaagccatctctatggctcgtgaattgtggaagccactgctaaggggaggaagaaggaacagaatcagtgcttcatttgcagcagcttgagtttttatctgttttctgtgtgtgattctacatgcatatttgattgaattttttaaaagttccagcagtta

SEQ ID NO: 724597 - DNA, 631 bp, Homo sapiens
caagttcacattcaagtgttttgtgacttaccctttgaccccttcacacaccagcatacctcattccatcactcttttccatgtgccaataaaatcctggtaaacacataagccyaagtaaaaggctgtgcacaccaagtgcctcccagcttcctgacacacggacacaaaacaagaatggatacagctctcctcaaactgctaaacaagaacaaagaagtctcaggcttgcaaagatctctcaggcagcccagccgttcctctggaaaatgagttcgtcagaaaaaaacacttggaatggaaaggactcaagtccagagggcttttatttaaaccccaaacacacagagccctctacggtaaggtttcaggtgcccagatctgggaggcaggggccacggaagatggggagcagccaggggcctgcgatccaatcccatgtgccctgcagggactcccaggcaatgagaaaagccatctctatggctcgtgaattgtggaagccactgctaaggggaggaagaaggaacagaatcagtgcttcatttgcagcagcttgagtttttatctgttttctgtgtgtgattctacatgcatatttgattgaattttttaaaagttccagcagtta

SEQ ID NO: 724598 - DNA, 631 bp, Homo sapiens
caagttcacattcaagtgttttgtgacttaccctttgaccccttcacacaccagcatacctcattccatcactcttttccatgtgccaataaaatcctggtaaacacataagcccragtaaaaggctgtgcacaccaagtgcctcccagcttcctgacacacggacacaaaacaagaatggatacagctctcctcaaactgctaaacaagaacaaagaagtctcaggcttgcaaagatctctcaggcagcccagccgttcctctggaaaatgagttcgtcagaaaaaaacacttggaatggaaaggactcaagtccagagggcttttatttaaaccccaaacacacagagccctctacggtaaggtttcaggtgcccagatctgggaggcaggggccacggaagatggggagcagccaggggcctgcgatccaatcccatgtgccctgcagggactcccaggcaatgagaaaagccatctctatggctcgtgaattgtggaagccactgctaaggggaggaagaaggaacagaatcagtgcttcatttgcagcagcttgagtttttatctgttttctgtgtgtgattctacatgcatatttgattgaattttttaaaagttccagcagtta

SEQ ID NO: 724599 - DNA, 752 bp, Homo sapiens
aaagttgtcaaaatgtattttccattccccctttctcccgtagttactcaaggatgggttccaccagtacaaaggagtaaacaaagatccaagaatcaagaaaacgttgtagaggagacaaagagaagccccagaaacatgaggaagagacagctgtgtaccaactggtggaggcagtgcatccatacagggcaaaaaaaggctgcaggcatgactttttaggaagatgctcaacaaaatacttgctgagaaaaaaaaaaacaaaacttagaaatgctggttccaaaacatgtgcttttgtttgtttgttttttcttgttctgacttttaattcattacaccactgctctccaagaaaaggctatcaattattcccttccaacaatgcataagaatgactttttccctacttctccaggacagaatataattatcatttattttaatcttttttgaactgttaaaaagataaactgaggcacagtaaaattttaaagagttttggtgmgttttttttagcatgaacaatttatgaactgagcagctccgaaccagaaatagtttgggagctccactgaggaacacaaagaggagacttttataagacagacacagaagtaaagcaaagtatttaattggttactgttatacaattgctttttttggtctctcaacttggaaagcccctcgttatctaagtttgtataaatagtaacttctgattggttgagcttaagttctgcttttaaaaa

SEQ ID NO: 724600 - DNA, 752 bp, Homo sapiens
aaagttgtcaaaatgtattttccattccccctttctcccgtagttactcaaggatgggttccaccagtacaaaggagtaaacaaagatccaagaatcaagaaaacgttgtagaggagacaaagagaagccccagaaacatgaggaagagacagctgtgtaccaactggtggaggcagtgcatccatacagggcaaaaaaaggctgcaggcatgactttttaggaagatgctcaacaaaatacttgctgagaaaaaaaaaaacaaaacttagaaatgctggttccaaaacatgtgcttttgtttgtttgttttttcttgttctgacttttaattcattacaccactgctctccaagaaaaggctatcaattattcccttccaacaatgcataagaatgactttttccctacttctccaggacagaatataattatcatttattttaatcttttttgaactgttaaaaagataaactgaggcacagtaaaattttaaagagttttggtgcgttttttttagcatgaacamtttatgaactgagcagctccgaaccagaaatagtttgggagctccactgaggaacacaaagaggagacttttataagacagacacagaagtaaagcaaagtatttaattggttactgttatacaattgctttttttggtctctcaacttggaaagcccctcgttatctaagtttgtataaatagtaacttctgattggttgagcttaagttctgcttttaaaaa

SEQ ID NO: 724601 - DNA, 1031 bp, Homo sapiens
gtgatgcctccagatttgttcttttctcttactcttgcttttgctatgtggaatctaaaagaaaattttattatttttgatcacatcagttaatctggaggacagcatattagttgaaataagccaggcacagaaagattaacatctcatgaccaaataacatattgttactctcttttacctccctccttgagtaaagtgaaaaaggttaaagttaatggcataataacgcttcattgaatgcacaatagtcttaacatgttaaagaaatgtttaattataaaattaagcttatacataatctaaaaattttcaaatgtactgcatttatagcataaaagtacaattagtaaaatgattcactagtaatttaattacatttaatttaaagtaaaattaaaaatgcttttctctatgatgcagaatattactccaaacacctacctcatgcatcactcaatatgaaaagtaaactaacagggcctctccacttagaytttcatcataaaccttacattttaatgcccatactcttccacagaaaaaaccataaataatgcccatctaataaaaaagaatctctcctatatctgacacagcaacaatttatcacatgctttcacatgtgaatacaataggaatgaaataaagtaatttgagagttgaatttcatcattatttacttttcaaataagccataattttttcaagaaaaaaagtatactttcaatgtaattataactctccaaagaatcttctactccttttaaagttatttacaaataatctaacaacttatagatttttttatactcaacactctgttttagtgtaatgtctaaagtgtcagtgccttagttatttctactgtaaattatttaatatttacatagactcaattttggattaaatatttttcatacttactgcatctgcaaaaacacatttcaatataaattcatgttttctacgccgtagtttttgaaaaaaaatgtttttccaaattcattacatttgcaggatttttctcc

SEQ ID NO: 724602 - DNA, 1223 bp, Homo sapiens
caacaatatattccataattatagtttatggacaagtgaaacaaatgaaagcaatgtgacaagggccagcagggaagaactggaaatactctgttatatggtacctgcagtattcatgaagcagcatactattatttaaaagtggatttggatttgttataaatgtatactataaactctgaggcaaccaataaacattttttaaaaacaagtatataattsataggctaaaactggagagaaaacgaacttagggttagtatttgtttctccttaaatgaattaacttcttacttgcaatatctgctaaacttctcttttggagctacttatatttcacattttgtctccactaactgctccttttgctgcccatgttttggcaagatggtaaataaacaaaaaatgctgcccataaaattaaaagaattgatccaacaactacagtagctaaacaggtggaaatgtgtcagaattttatagcctgtgtctcaccatgaacatataattaggtattagttgatataactgtgtgggtgagtctgattatactcataataatatatttgtatctgcagtgcctagaacaaaacctgccatatggcaaatagtcaatatttgttgaagaaataaattaattgacattaaaagggagaatatttaatccctgttgaggactaataaaatcatttttattattgtcaacttgctttaacaaccatctcacaaataaaatgaagtctactatattgttttgcagttctgaatctaactttacaaaaatattgaagagcatgctaagaaaagatcatatatctggcacattaaaaggtgtttagaatagctatacaagtctttgaaaataaaccattcccttgtgaaaaaatacttcaaagcttttcaaatatatatgcagatttaggaagacttatgccatggtaaaatttcatggatgtttaatataacctttcaaaacatcatgggtctatagtgaatgaaaatgaataaagtgagcaaaaatctgcctctaatcttaatttcatgtggcttggcacttaaaaaacaacaattactactaaaccattcgttctataaaagccagaagaggtaagtgagacatcatctctgataactcatctaacaacattacttattaggtactctttctatatcctcttacattatctaaactaatttttactacagggcttactgaaaatgtc

SEQ ID NO: 724603 - DNA, 801 bp, Homo sapiens
cggatacatatcaaatatttatacagatgccagaaggagaaaaggcaggagttttttttttttctccacacactctacaaaaacttagcagtttacatcttaagccaatagccctgtattttctatacataaagatttatttagaaacttgaataagaatgccaccattatattcatacctaatcagtgttgatcataaataaattatttttgtaatctaatttataggcatgtgttggagatattgtgggtccaataccaaaataaagcaaatattgcaataaaatgagtgacaacaaattttttgttttctcatgcatataaaagttatctttatactatagtctattgagtgtgcaaaaggattctgtcttaaaaacaatctatataccttaattaaatatattttattgcaaaaaatcctaacgatcatctgagccttcaggaagtcctaattttttgctgataaagggtctttgatgttgatggctgctgactaatcagggtggtggctgctgaagattaggatggctgtggcaaattcttaaaataagacaacaatgaagtttacttcagtgactgactctgcctttcatgaaagatttctctgcagtatgagtgtgagaagctatttgatagcatttcagccacagtagaatttctttcaaagttggagtcaattttctcaaatcctgctacggctttattagctaagttaatgcaaygttctaaatcctttgttgtcttttcaacaatgttcatggcatcttcaccagtagtagattccatctcaaaaaacca

SEQ ID NO: 724604 - DNA, 801 bp, Homo sapiens
cggatacatatcaaatatttatacagatgccagaaggagaaaaggcaggagttttttttttttctccacacactctacaaaaacttagcagtttacatcttaagccaatagccctgtattttctatacataaagatttatttagaaacttgaataagaatgccaccattatattcatacctaatcagtgttgatcataaataaattatttttgtaatctaatttataggcatgtgttggagatattgtgggtccaataccaaaataaagcaaatattgcaataaaatgagtgacaacaaattttttgttttctcatgcatataaaagttatctttatactatagtctattgagtgtgcaaaaggattctgtcttaaaaacaatctatataccttaattaaatatattttattgcaaaaaatcctaacgatcatctgagccttcaggaagtcctaattttttgctgataaagggtctttgatgttgatggctgctgactaatcagggtggtggctgctgaagattaggatggctgtggcaaattcttaaaataagacaacaatgaagtttacttcagtgactgactctgcctttcatgaaagatttctctgcagtatgagtgtgagaagctatttgatagcatttcagccacagtagaatttctttcaaagttggagtcaattttctcaaatcctgctacggctttattagctaagttaatgcaatgttctaaatcctttgytgtcttttcaacaatgttcatggcatcttcaccagtagtagattccatctcaaaaaacca

SEQ ID NO: 724605 - DNA, 1355 bp, Homo sapiens
tatttgaaaacttggttctgtcagagggaatttaagttaatgttaataacagagcctcttgaaaagaggtcaagggggtaacgtcgctttaaaaaattctgtttcataatcctgttagtttagaaggaggaggagttcagtttgtctgaaggagacaagggggagccacggcctcaggtccttgctttgaacttttgagcttcttagcaaagggaatcaatattcagaaagatttcactacaagttgcaagaacttggactcttcgttcaacgtgattatttcctaccctctagctgtccataagagaatctcttaaacacgctgttcaggcctgatcaaaacattagccaagccttatgatgtctggacatgctaggcaacacgggagtcattaatcagggggttactgacmgatgttaagtacaagcatctgtatgttaagatttttcttttactgattaacacataacggggcctgaggcctggaaaaagggataaaacatatttggagatgtgcagtgcaggcagagttgacccagattcaggaaccagaagataaaatgcaaagtgggaatcttgacattagtaagtgaatttgaacagtattaaacatcttaattctcctaatgatcctgaatgttttaaggataattaaggttaactaaaataaataggcctgctcgttcaagtgcacatggtgagcatattcttaggaaatgaaattatccatttttgtttcccaggtaagaattaatttatagaaagaatccaccagcagaaaattttttttaatactcggtttaagtaggtaccaattccttagaaattttctcagtaaccaggaagaaagttcctatattattatgccagtgtaatagaccagcatgttagtcacttaagtctagaggaaatgaatttattacagtgtaatctgtgctattaagtactcggggatcaccattaagctataaatcagtgtcactgttgattcaggggaaaaaaaaaccagtaacgagtcttcacaggtttttctcacagacccacaggaatctagaaaaaatgagaaaaacctcaaccttggggtttaatgtacatgcaatatgactgctatataaggaagaataaaagtcccttcagggtagtatattttaactccaattacatgcagtagttccccttaatctgtggaggatgcattccaaggccaccagtgaatgcctgaaaccatggctatatatatatatatatatatatatatactgttttttttttctgatacatacatccctattgataaagtttagtttataaattaggtacagtaagagataacaacaataggtaataataaaat

SEQ ID NO: 724606 - DNA, 697 bp, Homo sapiens
gagaagccttctggacaaataagttgacacttcaaggggcacaatttacattgtagtatatgtgaagttgtgcagggtttcagcacttctgccattttgtgcatgtcaactcatttaaaccttgtgaaagctcagtgaaggaagatgttatttttacagatgaggaaatagacctgggtcttgacttcagctccccaatgtattagctatgctatctttgaatgttacttaaccttgctgagcttagaagtccctccttattccactatcccacatggatgtcagatggcagccactgcagtataaatggcttccatggaaacmaaaactaaagaaattgtctaaatctgttttgtgttgctataggagataccacaaactgagtaatacaggcctatgaaggccctttaaaggcctatgaagccttgaccttggactaccctgcctctagaactgtaagaagtaaatcttcttacaaggtcaaatatcttgtgagggccttcttgctgtgtcatcccatggcagaaagcagaagggcaagagagcacacacttgtgagagaggaagggagaccaacttacccttttatcaggaaaccactgtcatgataactaacctactcctacattaatgggattaatccatttatgtgggcagagcccttatgacttaatcacctcttaaaggtcccagctct

SEQ ID NO: 724607 - DNA, 646 bp, Homo sapiens
agactttgctggcctaagcaaaatgctgacatggacagaatttccctcatcaaaacttttctcctcaaggtatgagctttttaaagatcttcctcttttcaaaaaccagctctcaaattctgcctttatgtcagggcataaaattcccatgaaacttttttggtgtctaccctttcaaaaatatctgcattttaacagataggtaagcattgaactagggtcctttagtagccattgacatctgtctggaaacctgagaatcttacctgaaaaagttttcctgccaagtccttttcttttcttttcttctttctttttctttttttttttttttagacggagtctcastctgtcatccaggctggagtgcagtggcacaatcttggctcactgcaacctctctctcctgggttcaagcagttctcctacctcagcctcctgagtagctcggattacaggcacctgccaccatgcccagctaatttttgcatttttagtagaaatggggtttcaccacattggccaggctggtctcaaactcctgacctcaggtgatctgcccaccttggcctcccaaagtgctgggattacaggtgtgagtcacggcacctggctctggcccttgccaagtttcttaaggagccta

SEQ ID NO: 724608 - DNA, 638 bp, Homo sapiens
ctatagcaggtttcctaatgagctgttaaaacgaaagcatgtgtttgttcactgtggcacagaacagtagctttgacacttcagtagttttcaccatagcatggcttgttggggcttgaagactggcattccttcttaaaggcccatcaaggttttcattcactgtgagctatgtgttaagctggtaytgatctcgtttttgaccatcattcacccatggcagccaaccagggaggtgtaaaatgcttttgtccccctgcccacatatgcacctcctttggtgtgacccatgggatgacagttgcgatgcagcttgaaaggatggctctacattgcagcttctctgcgtcatccccgttgcccttttagaatgagaaaagaggattgaaaggttcaaaagcctagagagaaaattctgcagtcctgtgtttttctgagcagagggaaaggtgctacttcgtaagactgcttgcaatccccaatataatagaataaaactgtccctactgccagcattaatatgaaatttgtataaaggtggagggattactttactgttttattaatatgcaatcccaatattttcattgcagggcagcttgcaaattcattgcaaattatgctgagttaaaatcaaa

SEQ ID NO: 724609 - DNA, 681 bp, Homo sapiens
agattcttactcctgggtctaggatgggggcctaagattctgcatttctaactagctgtagagcatgctggtgctgctggaccacaggccatgacttgagtagcaggttgtcaggaagtgtgtgcttcagtgggctgtgactctgcatatccctgttgtgaaatatgcagatgagagtggcacacaccagaccctcaactggcaggaggagctgtgttttagctagaggttagggtgagagggaccacccagacttgtaaagcttaagtattgtccccggtctctttaccagtcttaaggtatccctaacagaggcccaatgttcctgctaatgaaatgaataaagaaatgttrcagtccatggatttgtaattccagtaacggcttattttacatctattaaaggctacaaggaaagaagtggagggaagggctggaagactaagaaaataggaaatgagaagaaatgcacaaaggagagttgcatttcctcctgcttctgtcaaaggaaaaaaagatgttatgtgccttctctttccacctctaaataaagcaacagggccaccactaactagtttgtgtgactatattctggctatttaacctctgctatttcacaaaaagtcctcatctgtgaaaggaggaatttggaatcgggacagttttcggaaccccttcaat

SEQ ID NO: 724610 - DNA, 681 bp, Homo sapiens
agattcttactcctgggtctaggatgggggcctaagattctgcatttctaactagctgtagagcatgctggtgctgctggaccacaggccatgacttgagtagcaggttgtcaggaagtgtgtgcttcagtgggctgtgactctgcatatccctgttgtgaaatatgcagatgagagtggcacacaccagaccctcaactggcaggaggagctgtgttttagctagaggttagggtgagagggaccacccagacttgtaaagcttaagtattgtccccggtctctttaccagtcttaaggtatccctaacagaggcccaatgttcctgctaatgaaatgaataaagaaatgttgcagtccatggatttgtaattccagtaacggcttattttacatctattaaagrctacaaggaaagaagtggagggaagggctggaagactaagaaaataggaaatgagaagaaatgcacaaaggagagttgcatttcctcctgcttctgtcaaaggaaaaaaagatgttatgtgccttctctttccacctctaaataaagcaacagggccaccactaactagtttgtgtgactatattctggctatttaacctctgctatttcacaaaaagtcctcatctgtgaaaggaggaatttggaatcgggacagttttcggaaccccttcaat

SEQ ID NO: 724611 - DNA, 681 bp, Homo sapiens
agattcttactcctgggtctaggatgggggcctaagattctgcatttctaactagctgtagagcatgctggtgctgctggaccacaggccatgacttgagtagcaggttgtcaggaagtgtgtgcttcagtgggctgtgactctgcatatccctgttgtgaaatatgcagatgagagtggcacacaccagaccctcaactggcaggaggagctgtgttttagctagaggttagggtgagagggaccacccagacttgtaaagcttaagtattgtccccggtctctttaccagtcttaaggtatccctaacagaggcccaatgttcctgctaatgaaatgaataaagaaatgttgcagtccatggatttgtaattccagtaacggcttattttacatctattaaaggctacaaggaaagaagtggagggaagggctggaagactaagaaaataggaaatgagaagaaatgcacaaaggagagttgcatttcctcctgcttctgtcaaaggaaaaaaagatgttatgtgccttctctttccacctctaaataaagsaacagggccaccactaactagtttgtgtgactatattctggctatttaacctctgctatttcacaaaaagtcctcatctgtgaaaggaggaatttggaatcgggacagttttcggaaccccttcaat

SEQ ID NO: 724612 - DNA, 610 bp, Homo sapiens
tttttttgagattgaattttgttctttgttgcccaggctggagtgcagtggcgtgatctcagctcactgcaacctccacctccagggttcaagcgattctgctgtctcagcctcccaagtagctgggattacaggcacctgccaccatgcccggctaatttttgtatttttagtagagacggggtttcaccatgttggccaggctggtctcaaactcctgaccttgtgatccacctgcctcagcctcccaaagtactgggattacaggcgtgagccaccgcacccagccaaagcaagcaccagcaagcaccagccaaggtgctttttaaaaagttttttcttacctataagttttaaaacttttgaagtcatttgttgacatatggggcacaaactattgaaattttacaraacacaaagtttctagttttaggccatgttccttctaagactgccatttattttaatgctcagtattttgtatgatgtaagcatttacttctgaaaggtacataaatctattatccattgttctgagggtgttggtttgatggttagcttggctatttagaaagaataagcttcacaaaatgtggaagataagcaccta

SEQ ID NO: 724613 - DNA, 610 bp, Homo sapiens
tttttttgagattgaattttgttctttgttgcccaggctggagtgcagtggcgtgatctcagctcactgcaacctccacctccagggttcaagcgattctgctgtctcagcctcccaagtagctgggattacaggcacctgccaccatgcccggctaatttttgtatttttagtagagacggggtttcaccatgttggccaggctggtctcaaactcctgaccttgtgatccacctgcctcagcctcccaaagtactgggattacaggcgtgagccaccgcacccagccaaagcaagcaccagcaagcaccagccaaggtgctttttaaaaagttttttcttacctataagttttaaaacttttgaagtcatttgttgacatatggggcacaaactattgaaattttacagaacacaaagtttctagttttaggccatgttccttctaagactgcmatttattttaatgctcagtattttgtatgatgtaagcatttacttctgaaaggtacataaatctattatccattgttctgagggtgttggtttgatggttagcttggctatttagaaagaataagcttcacaaaatgtggaagataagcaccta

SEQ ID NO: 724614 - DNA, 1813 bp, Homo sapiens
tgagaaatttaatttcactttgcctctctatccttagtttctttgatgtgctctccttccctcttttcattgggcttttcaaatatagcatagaggtttgctgcctttctttctgtcagccacccatcacctgcttcctggtctgacttcttctgtcccccttttcctgttccctgtattcattctacaaatgtgtcttaagagccttctgtgttccgagggttgtggtgtaacacggaggagaagcgttgatactttatcttcattgtcaatcagaattagatcttggatctcttatctccttgtcagctttatcagtacctctgcgtaataaggatgtgaaatcctccagtaaagattattctgtagctttcttgtgtttccacttacagatggagcaaagacagtgactgtgctgagaacatgtatattgacatgatgctctggagacatgctcggcgcctcttagaagatgtgaggttaaaggaccttggctgctttgcagcccagctgggctttgaactaattagttggctatgcaaggaacgtacccgagccgcccgggtagacaactttgtaatagccctgaagagactccacaaagatttcctgtggccacttccaatcatcccagcctcttctatcagttctcctttcaaaaatggaaaataccgaactggtaatgtagacttcatgtcacttgtacaaggagaattgtattttactccgtgtatttacacattttgctattagttgatattcaaggaattattttcattccaaacttaggaatggataaaagccaactttttgtacatgagttggaatgcccactgtttgaccaaagatgtaaataaagtagaacctatgtctctaagtcttgtgaccttgaagtctaattcaaaaatctaatcatwcttggattataaagaagttgagaactgcctgaatataaaagctaccatgcttatgttattgtgggaaggagttctggaatcagatagacatggacctcaaagtaagctgacagaactcattccaggggaacagtaaggccaccttctaaactaggagaggacaaactgaaagtgtatattttggtgaaataaaaatttaaagttttttaattcaggactttttatgaagactgttctaattattattatttgtgaatattgaaaccaaaacttttaactttggcatttggaaacttcatgttatcttaagagccaaagcaaatcacttagaagatcaacataataaagttttgcctagctccagtaagaaataggatgatataacttttaggtggtattgtggtcagtccattgttacacaatcccatgtctctagttttggggtggctgatacagtacaggacagtaattgcctttgaactgttcttattgggtaggcaggtaggggaagctaaaagagctgaattgaaaatgtcagtgtgtgcatcttcaatttcttcctccattttttgttttcggacccactctgcagtgggagagcagctgttaaagtctcaatcagctgacccatttttgaaccttgagatggatgctggcatctccaacatccagcgaagtcagagctggctcagcaacattggccccacccatcatgagatagacacagcttcatcccatggaccacaaatgcaagatgccttcttgtcacctttatctaataaaggtaaatgtaattttaaatcctagctcttcagttcctttgaagaaaatttatgtgctatagcacttcagagatagaccttcattctttttctatcgtgatggaggattaacca

SEQ ID NO: 724615 - DNA, 1813 bp, Homo sapiens
tgagaaatttaatttcactttgcctctctatccttagtttctttgatgtgctctccttccctcttttcattgggcttttcaaatatagcatagaggtttgctgcctttctttctgtcagccacccatcacctgcttcctggtctgacttcttctgtcccccttttcctgttccctgtattcattctacaaatgtgtcttaagagccttctgtgttccgagggttgtggtgtaacacggaggagaagcgttgatactttatcttcattgtcaatcagaattagatcttggatctcttatctccttgtcagctttatcagtacctctgcgtaataaggatgtgaaatcctccagtaaagattattctgtagctttcttgtgtttccacttacagatggagcaaagacagtgactgtgctgagaacatgtatattgacatgatgctctggagacatgctcggcgcctcttagaagatgtgaggttaaaggaccttggctgctttgcagcccagctgggctttgaactaattagttggctatgcaaggaacgtacccgagccgcccgggtagacaactttgtaatagccctgaagagactccacaaagatttcctgtggccacttccaatcatcccagcctcttctatcagttctcctttcaaaaatggaaaataccgaactggtaatgtagacttcatgtcacttgtacaaggagaattgtattttactccgtgtatttacacattttgctattagttgatattcaaggaattattttcattccaaacttaggaatggataaaagccaactttttgtacatgagttggaatgcccactgtttgaccaaagatgtaaataaagtagaacctatgtctctaagtcttgtgaccttgaagtctaattcaaaaatctaatcatacttggattataaagaagttgagaactgcctgaatataaaagctaccatgcttatgttattgtgggaaggagttctggaatcagatagacatggacctcaaagtaagctgacagaactcattccaggggaacagtaaggccaccttctaaactaggagaggacaaactgaaagtgtatattttggtgaaataaaaatttaaagttttttaattcaggactttttatgaagactgttctaattattattatttgtgaatattgaaaccaaaacttttaactttggcatttggaaacttcatgttatcttaagagccaaagcaaatcacttagaagatcaacataataaagttttgcctagctccagtaagaaataggatgatataacttttaggtggtattgtggtcagtccattgttacacaatcccatgtctctagttttggggtggctgatacagtacaggacagtaattgcctttgaactgttcttattgggtaggcaggtrggggaagctaaaagagctgaattgaaaatgtcagtgtgtgcatcttcaatttcttcctccattttttgttttcggacccactctgcagtgggagagcagctgttaaagtctcaatcagctgacccatttttgaaccttgagatggatgctggcatctccaacatccagcgaagtcagagctggctcagcaacattggccccacccatcatgagatagacacagcttcatcccatggaccacaaatgcaagatgccttcttgtcacctttatctaataaaggtaaatgtaattttaaatcctagctcttcagttcctttgaagaaaatttatgtgctatagcacttcagagatagaccttcattctttttctatcgtgatggaggattaacca

SEQ ID NO: 724616 - DNA, 1813 bp, Homo sapiens
tgagaaatttaatttcactttgcctctctatccttagtttctttgatgtgctctccttccctcttttcattgggcttttcaaatatagcatagaggtttgctgcctttctttctgtcagccacccatcacctgcttcctggtctgacttcttctgtcccccttttcctgttccctgtattcattctacaaatgtgtcttaagagccttctgtgttccgagggttgtggtgtaacacggaggagaagcgttgatactttatcttcattgtcaatcagaattagatcttggatctcttatctccttgtcagctttatcagtacctctgcgtaataaggatgtgaaatcctccagtaaagattattctgtagctttcttgtgtttccacttacagatggagcaaagacagtgactgtgctgagaacatgtatattgacatgatgctctggagacatgctcggcgcctcttagaagatgtgaggttaaaggaccttggctgctttgcagcccagctgggctttgaactaattagttggctatgcaaggaacgtacccgagccgcccgggtagacaactttgtaatagccctgaagagactccacaaagatttcctgtggccacttccaatcatcccagcctcttctatcagttctcctttcaaaaatggaaaataccgaactggtaatgtagacttcatgtcacttgtacaaggagaattgtattttactccgtgtatttacacattttgctattagttgatattcaaggaattattttcattccaaacttaggaatggataaaagccaactttttgtacatgagttggaatgcccactgtttgaccaaagatgtaaataaagtagaacctatgtctctaagtcttgtgaccttgaagtctaattcaaaaatctaatcatacttggattataaagaagttgagaactgcctgaatataaaagctaccatgcttatgttattgtgggaaggagttctggaatcagatagacatggacctcaaagtaagctgacagaactcattccaggggaacagtaaggccaccttctaaactaggagaggacaaactgaaagtgtatattttggtgaaataaaaatttaaagttttttaattcaggactttttatgaagactgttctaattattattatttgtgaatattgaaaccaaaacttttaactttggcatttggaaacttcatgttatcttaagagccaaagcaaatcacttagaagatcaacataataaagttttgcctagctccagtaagaaataggatgatataacttttaggtggtattgtggtcagtccattgttacacaatcccatgtctctagttttggggtggctgatacagtacaggacagtaattgcctttgaactgttcttattgggtaggcaggtaggggaagctaaaagagctgaattgaaaatgtcagtgtgtgcatcttcartttcttcctccattttttgttttcggacccactctgcagtgggagagcagctgttaaagtctcaatcagctgacccatttttgaaccttgagatggatgctggcatctccaacatccagcgaagtcagagctggctcagcaacattggccccacccatcatgagatagacacagcttcatcccatggaccacaaatgcaagatgccttcttgtcacctttatctaataaaggtaaatgtaattttaaatcctagctcttcagttcctttgaagaaaatttatgtgctatagcacttcagagatagaccttcattctttttctatcgtgatggaggattaacca

SEQ ID NO: 724617 - DNA, 1502 bp, Homo sapiens
ggagactcattcagtaggactagattattaggacagaacctcctgaggactaaaagagctggagaaaaaatatattttttaatatgcttgaagcccttagagagcaaacaagacagtaaagagttgccagactaagggaggccagcaatccagtgagctaagcccaatatttaagcctacaatgaacatgaacaaattaggctatatgcaacaacacagatagatcttacagacatggtaagcaaaaaacagctagacacaaaggaatacatgctatgattccattttaggtaaaaattaaagggcaaataatgtaggcatttctaaattagagtatatatgggtgcatgtttaagtggtaatgatttaaaagaaagaaggaggtgattaccatgtaaatctggatattttttgttgtaggggtgtgaggatacagtgattgggaagggcactattgggagacttttgggtactcatgattcttggcctgagtagcaattccacaagtgtttgctttgtgatattgagatgtacatttcattttcatgtattctttattataattcatgacagaaaagtttaaaaaatttgaatattcttcttctatataacttgaagaaaaagccaaaattcttatggtggccttcaaagccctaattatctgacctcctgttacatctcttaccacatatactactttcctttcacaacccatccacttcactctatccacacaggcttctttgctggtctttgagcatgccagaaatgctcctacattagggcttttacacttgttttatttctttgaggactttcctcaaaaggcatccttatagggaaacctgtttaatattacatccttcccctgtactccctcttcaccagcattgcttaattttttttgtatagtattttttaacctccagtattcaatatacttttttaacttgtctgtctcttgactcaaatgtaaagcaagcatacaagtagagattttggtgtgctagtatagcctcagcacctagagcagtgcctggtgaatggtaaccacctagaaaatacttattgtaggactgaatttcagtctaagcagcagttcagagaaataatgctcactgctgtctttaccatttgtgacataaaatgtccagttttattattaaaattaaaagatacaattcctactaaagcaaagattccgtgtttagatagtagattatatagctgattgtggaattaaatgaaatctgtaggattctagttcatatagttgtgattatattgtatctttaatgtttactattaggatcatccaaaaataaagtgctatattatagtgtgccactttttctgctaactgaactaatgattatgacctttgccttggaatttatcatctaaaatgtctgtgatttgacagataggagcaaacaactgagctgaatctattctctatatatggagatrgcatatggaaatagcatatatgcttactaata

SEQ ID NO: 724618 - DNA, 621 bp, Homo sapiens
attccagctcttctgggccccaataataccagagtttatatttatttgtgagttacagagaatgcaattcatccaatgttcaagaagttcacaaaataatttggcatactttgaattcaatccactgtgttgtgtacctcttacttctctgaagccataaacttccttcaggacagaacaaactactctctcctctgagctctcataacacatttttcctgtttgtcaagggaaggctgagataaaccccaagaattccacaggagcagaaggagaaggggcaggatgttcatggttcttcagctttacagcatcccatgaggaggcargtgtagcttgccctcactgctccccagtacctccccttgtttttttaaataggatctttggaagcaaatagacagcacccagctgatttggtgacagcagagagagggcttgcaagaggagaaaaacttgatgtgacttgatgcccagggaggttgcatacagtgctgatatgcaaagtgtctcccactatagggaggaagagccaccagtcccatttgactttttcctagggatctgaagagaacccctaggcagatcatctatcagacaatcttatttgtctctccttta

SEQ ID NO: 724619 - DNA, 1244 bp, Homo sapiens
atacccagaagaaagggaggcacatgccaccagttcaacacactggagcccaactcctactaccccattgttcaactcagggtatgacagggaggctgacaccaccttcctgaagactaacttccatgataaggaatttcccccctgactattccatacaactacacatgcatttacattttgaaacagtaatcacactgccaggaacttacaactagaaacagaaggtatttgtactcggctacatgtaatcacaaaatattggacacaaactaaatatccatccatagagacaggctgaatactctgtgaaacatctattttaaggcacactatgcaaccattttttgaaaatgaggaagatctctaggaatttacatgcaataatttctaggaagatacagttaagtgaaaaaagcaagttgtaaaagagtatgtatagaatgctgcgtcttgtataagaatgaagggaaacaagaaaaatatgtgtgtttatgtctgtgtgtgtgtcacatgtacatcccaaaaggaaatacaggatggagaaggcagaatctaatgcaaatgattatctttctagagaggggggtggaatgaggtgagagagagaaggaaagtttctgagcacacctttaaatataagttacttacaaccccattcaagaaataaaatagaaagacaaaccttaaaattgaaacaaatagaaaatacatacctatatgagtaacctttgaaaacagtagtttgtggaatttgactgtccttattctaaggacaaaaagactgccaaaaacaaaacaaaaaaaatcctgaatttcaacatcactgagtagaatgttgttggtggcactagggccctaatcctgaactgcttgtgagtgcagtgggtagggcggtgtcgccgggaccacagtcgtcagtgagaaagagcagcactggcacagagcaggagaagggagagtcccatgggatttgggttggaggtgtaagcaggaacttaactttatcttcagctgaagccatctgaagacttgcaggttttctgccttcataggaaaactacagccattcagaggcagccctcctgccccagtccatgcaaggtcacaagctgctgctcaacgtcacatcatagcctagctcctgacattttcaaagtcacaaatgggtgcaagaygatttgggcccaagtattatggaaactaagtttctcttcatagccctggccacaggtttagggatt

SEQ ID NO: 724620 - DNA, 637 bp, Homo sapiens
gcatgagccaccacacccagcctgtttttttatattttaaaatgtataatagaacatttaatgttagaaaaatatcagtttacatatattgcttgcatttgtagcttgtgttgggtttgtactgagcagctctagggtctagtggacaaagacagatgttaatgaaacaatcccacaaataaaaatagaagagacagaggtgcttggtgttcagagtatgttaaagagaaagggaggtctggaaggctcccaataaaagacactgagacacagaacattagctggacatgcagacccagagacccgggacccagagactcggagacccgagacctggacacccagtgggagaagggctgggctggttcgcctcccctccccgtcctcctccccactcttccccttcctctgcttcctcatcttcttcctctgtgaaatgcccctaacccctacaaataggatttcaggatttcaaccagtgttcccaacaaattccatcagctttagtggtttctgaaaagcagacagtgacggtgccccycaccacggccctgggggctgttggtcacttacctaccctcaccttgaatctcttggcttggtagagacagtgggctgccgttaggatgtagaactc

SEQ ID NO: 724621 - DNA, 1267 bp, Homo sapiens
tgcagtcattaaagactgttcagcatatagacagataatttccacagtrtatggtttaagaagttaaacagaaagttaacagagaaactgttcttgaagtatgagaatgattaagtggaaatgttaaattttcaaggcaaagtattttttaaataacctcaaaaattaaaaaaaaaaaaaaaaaaaagatcttcactgaagctaaaaagacatgaccaatgaaggaaaagcattaaattaggagtctggagtctggttttcagcctcagccatcaaacaaacaggctgtgtgttgtaggagtggtcatttaaccgcactaagcctcaaatgtttcctctgtaaaattagaacattaggttcaattaaagccatttaagctttaaaattctacgattgtccgtccaattcaataaaataaactgtatttaataatacctgctttttcaactaagctaattttttaaaaggcagaaaatctaaccagaaaagaataaaaaatgtttaacttgtacaacataaactttgtccagaaatcagtatctgctcttccaaagaaaaatagccttttgttttctattgttcagtgtacagcttaccactaagcaaggaataaatgtggggctacagttcatctgtatgtgccagcatgttactttcaagggttcagtagctccacggcagaaagaaacttctctattactcactattaaactgcatttcaaaacctacaaaaacagctccaaaattaagccagcaaaatgttgctgtcatccatctgaacctgttagaaatctcaagctcgtcatagaatctttgacctcaccattcaatgttttacaaattgagtaactatgtccctgtcatttactactaaaatgacaaaaataaaaataaaaggtaaagagaacactgaaggttaggagtaggtgaggatgggaaaagggaagaacaaacatgtccggctgaattcagagctagattccaagtgggtttcagggaggactgaagtcagagaactgcaaatgttgtttcaccatctgtttattcacagctttacctttgactcatcagagtgaggtctgaaaactgtttgtgggtcatagtaaaaagagttctgaaggacaatgtgacttccagggagaggtaagccaacctacactgcatgagccagcagagcagacactgaaaggtgataagaagaaaaagaagcacttgtttttattaacgtaagacctcaccaacttcctcagacttccccaaatgaaa

SEQ ID NO: 724622 - DNA, 1387 bp, Homo sapiens
ggcccatgaaggaaaatcagcagtcctgttgctactgttattcactggggtgacgaaaaataaatccattctccctctctcccacctctgtcacacacatacacatgcatatgcatatatgtgttcacacacaagcaattgaaaaaccaatattttcctctgagccagggaagattctgcttgtttctcattgacaaggacattgtgttgactcacacacattcccacaaatactaaggttttgaagaactaaatttaaagataagaaaaacttagaaaggaattagtgcaaaatagactgttgtgtttgtgtgcaaatgtaaatgtaaaaataaatgagtatgaaaagagccagacatcttatataagtattattttaccaagcatattaaaattacagctagataattttaagacaagtataaatattactatacaacaaaatatttaaggagatataaaagactcaggatatatattagttaataaaatgagaggaatcccaatggcagaattccagaaaaaatagaggataaattaaatgccagtattcactggcccttttgtttcctctccatgatagcagtgcaaatgcactgcttctagtctgccatcttgacccaacatccctttaaatgtattttctaactcattccctagcttctagggtgtcctggcatcttagctatggatatcccagtacctgcaggtcacaaggtaacagagactatgacagtcatctgggtctcctggaacggaggacacagagcagtggagatggaccccaagctctaggtggagtaagagacctactttgaattctttatccagcatcccaacatttcattttgtttaggattcaagatccagtattactatgctgatttttttctcatctggagaaacacttcttactcttgtttactttttttggggtgggacttttcttgaggatgtgcctatgatgtatgttgagtaagrccatttggctttgcttctgggtatgtttagtggctgtattagtctgttttcacgctgctgataaagacatactagacacgggggaaaaaaaggtttcattggacttacagctccacatggctaaagaggcctcagaatcatgatgggaggcgaaaggtatgtcttacatggtggtggcaagagaaaaataaggaagaagcaaaaggaaaaacccctgacaaacccatcagatcccatgagacttaatgactatcacgagaatagcacaggaaagacctgcctccatgattcaattacctccccctgggtcccttccataacatgtgggaattctgggatatacaattcaagttgagatttggatggggatatagtcaaaccatatcatttcacccatggcccttcc

SEQ ID NO: 724623 - DNA, 1872 bp, Homo sapiens
ttttatatattagaaatataagtgggcttgactctttttctccttagggtcttaccagactaaaattagttgttggccagacagatcttttctggaggctctggggaggaattttttataagctcattcaagttgtgcttagaatccagttccttacaggtagattgaacatgcacatttccttgttgagtgttaatcacaggccaccctttgttgctagaggcaacctgtgtaccttctcatgtagtgccccccatctttaatatcaccaaagaaagacttccccttatgttcaccagctggacaaaattttctactaaaaaaagaaaggtatgtgattagattaggcccagccataggagccccttttttatataataatttaatataatcatgggagttatatctcatcatattagtaggtttcactcacactcacagggagaagattacaggaaggcagtatttatggaagtcattcctacaattttgcttattacaggagccgatattttatctgaaaaaattgagattaattatatcttccatgaacaattgttggtagtagtagaagagctaatgtttagactcacttgccacatcataaacagcgaaattactaattgttctgataaacatttgaccctcatggatgcatattttatttataaacaagaatgtatgttagcacattctttctatattaactataaatctatctccttataatttcccccagcctttgaagtcaaacagataatatgtaatctctcatccatgtttattcactctgtggcattggtccagcatttgtagaaactccatttcatgtaaggcactcagtgctggggatcagtgaacaaaaatacatgacccccataatctcagagggtcctccctgaagaagtaacttgaaatgagatatggtagaagttaattaggtgaatagggaaagaatgagcctttcagaaataagcataggcatattagaaagggaaataagacagcaggaggaattaaacagctagaagactgaaaattattcaaaaagtgttacagtattagatagaaaaggtaggcagaacttgttacaggtagctgagagggagaaaagacagtaattgaaagccactaaagttttttaaaagttttttaagcatgaaggtaacataatagacattaattgtgagaataaaattattctatttactatgcagatgaaggtaaattagttcaaaagtaattaagaagaccgatcagatagaatattagactagttttgtggtaatagagatagacatgatttattttgaaatagctagatgacaaccaacataattttattgtaaatttaatatagtagggaagatgcaagggatattaggaatttcttcaagattcctagttggcatatgttgataatttgtgtatcattaactgttttaagttcaaagcccagcagtttaaacttgtgtacattgtggtggtttggcagtatttaaaatgagatatcaattagcatatttaacaaggtctggcatttagagtggagcagaaacttgagaaaataacatggaagcgactgcacatggatgaaatggagctgccaccatgcatggagaaggtggagaacctgattcagaagtcaccaaagagggttcagagttctgaacatcaagccagaaagaattattcctatgacttgaggcaatagagttttccttgatgacatctggacttgttgaaggccagtggctcctttgtttcgtgatttttttwaaaaaaataaggacatccatgcctatcccaccataaaatgtcagaagcaaataatttatgttctagagtcaaagattcacatatggagagaaa

SEQ ID NO: 724624 - DNA, 662 bp, Homo sapiens
ttgctatctggtcagtggccatctcatttctatttcagtggttccaccaagactatttcatgattcatgatttcttatgaaaatttataatttattttattaataaaaagttttatttgaaaaagttccccttaatgatattttaaaaaaaatacttaggccctaatatctaggtctggataaataataaccataaccaacatttatgtgttgttttgttgtttgcaaattgtttcaatacaaattacctaaattttaacatgagattgcaatttctgcttttatacatcaatgatttttatttatttatttatttattattttgagacagggtctgtctctatcacccaggttggagttcagtggtgcaatcacggctcactgcagcctccacctcccaggcccaagctgatcctcccacctcagcttctccagtagctgggcctataggcgcacagctctacrcccagctaatttgatggtattttttgtagaggcagcgtttcaccatgttgcccaggctggtctcaaactcctgagctcaagctatctgcccacctaggcctctcaaagtgctggaattacaggcatgagccattacacctggcccatgctgcaatgagttttgaaaaaacatataggtctctctcatttctccttta

SEQ ID NO: 724625 - DNA, 1553 bp, Homo sapiens
atccagtgggcagaaactggagaagagcatggaaaaccccacaggtgcacttataaaaagcctcagccagcccagatgtgacacaagtcactttcactcaaaagccaaggaagaatgggaactgaagtcttagcatttgcctggcagtattcccttcactaaagcagaggagagactggactcaggtagatagctgacaaccacagccattctctcaaatccagtacttaaggcttatgtcttagtcaataaggtaaaaagaaaatcaataaggtaaaaagtcaaatctcagaaaaatgctgaggttttttccttgtacttacttaatccacccattatttattaaaggcttgtgctgaatgccataataataaatcctggacttcacacaacttatataaattagcaaagaatataagactgtgcaattaaagttacacaaataagatttttttaaatcaaaagcatactcagattgaaatgaactttcagtatcacccaaagcacaaaattactacttaaaagaaagtaatcagtcaataatacacattccctgaacatatggtttgcacaagacactgttctgcaatgctctgagtacacacaagtatagtatttgcatcctattagttcctctctaattgtggaactaatcattgaaggcagtctatgatttctttttcaattttaaaatcagcaatgctgctgccacacctctgaggtaaggtcatttccttgttacatgtaaccttgctctcttttcagtttttaattctattttgattatttttatttatagagttcacctgtcctgaacacactacttcttcatcgaatatatcaggtatatataatccagtctttgtctcttctatcaccatgtcttgtagacaaagcaaggaatgccacagtcttggtctaattacagcttagcctaatgagtacacgctgagcggtataagcccaaatcaacaggccacccaccaagagagtaaaaagaagaccctgagtcctcccacagagacctggaagagcttctgatggaaacaggagataattgtgttttgccattggcaaatgcatatagcacctagcacagcaatacatatgmtttagtgtttaatatatattactgaaagtgtgataacgaaaagaaaaatagtgatttgacagacatacagcccagtgtcttcctccatactttctccccatatttctaaaggaggaattctaggaagaaactagtggagaaaaaatatatagtcacttacattaggccacttatatttgactggggcttttcaaactaagattcaagacacatttaaattaaaaggttgtgagcctctaagtggatttcaaaatatttaaaaatgtataccttttttctactaccttgtaatgatctaggcagtttttcacttcacagaattcctggtttgtttttaatgttaaattttgccaattggaagcaagtaaacacttgcggatgtgctacagataagtgagtctcgaatgggagctgatagaagaatatcagaatctctgcagag

SEQ ID NO: 724626 - DNA, 625 bp, Homo sapiens
tatttctatagtatatttttatatgttattaaatatatatttatatagtatgtttatatatattattaaatatatatttmtatagtatatttttatatgttattaaatatatatttatatagtatgtttatatatattattaaatatatatttatatagtatatttatatattatatttatatattattaaatatgtatatattatatttatatatatctttatgtatgtatatattatatttatatatcgttaaatatgtgcatatatattatatttatatatcgttaaatacatatgtatatattatatttataggtgttgtaaaataccgacgtatatattatatttataggggttgtaaaataccgacatatatattatatttataggggtcgtaaaataccgatgtatatattatatttataggggtcgtaaaatactgaagtatatattatatttataggtatcgtaaaacaccgatgtatatattatatttataggtatcgtaaaataccgacgtatatattataggtatcgtaaaataccgacgtatatattatatttataggtgtcgtaaaataccgacgtatatgttatattcatcagtgtcgtaaaataccaac

SEQ ID NO: 724627 - DNA, 625 bp, Homo sapiens
tatttctatagtatatttttatatgttattaaatatatatttatatagtatgtttatatatattattaaatatatatttctwtagtatatttttatatgttattaaatatatatttatatagtatgtttatatatattattaaatatatatttatatagtatatttatatattatatttatatattattaaatatgtatatattatatttatatatatctttatgtatgtatatattatatttatatatcgttaaatatgtgcatatatattatatttatatatcgttaaatacatatgtatatattatatttataggtgttgtaaaataccgacgtatatattatatttataggggttgtaaaataccgacatatatattatatttataggggtcgtaaaataccgatgtatatattatatttataggggtcgtaaaatactgaagtatatattatatttataggtatcgtaaaacaccgatgtatatattatatttataggtatcgtaaaataccgacgtatatattataggtatcgtaaaataccgacgtatatattatatttataggtgtcgtaaaataccgacgtatatgttatattcatcagtgtcgtaaaataccaac

SEQ ID NO: 724628 - DNA, 625 bp, Homo sapiens
tatttctatagtatatttttatatgttattaaatatatatttatatagtatgtttatatatattattaaatatatatttctatagtatatttttatatgttattaaatatatatttatatagtatgtttatatatattattaaatatatatttatatagtatatttatatattatatttatatattattaaatatgtatatattatatttatatatatctttatgtatgtatatattatatttatatatcgttaaatatgtgcatatatattatatttatatatcgttaaatacatatgtatatattatatttataggtgtygtaaaataccgacgtatatattatatttataggggttgtaaaataccgacatatatattatatttataggggtcgtaaaataccgatgtatatattatatttataggggtcgtaaaatactgaagtatatattatatttataggtatcgtaaaacaccgatgtatatattatatttataggtatcgtaaaataccgacgtatatattataggtatcgtaaaataccgacgtatatattatatttataggtgtcgtaaaataccgacgtatatgttatattcatcagtgtcgtaaaataccaac

SEQ ID NO: 724629 - DNA, 625 bp, Homo sapiens
tatttctatagtatatttttatatgttattaaatatatatttatatagtatgtttatatatattattaaatatatatttctatagtatatttttatatgttattaaatatatatttatatagtatgtttatatatattattaaatatatatttatatagtatatttatatattatatttatatattattaaatatgtatatattatatttatatatatctttatgtatgtatatattatatttatatatcgttaaatatgtgcatatatattatatttatatatcgttaaatacatatgtatatattatatttataggtgttgtaaaataccgacgtatatattatatttataggggttgtaaaataccgacatatatattatatttataggggtcgtaaaataccgatgtatatattatatttataggggtcgtaaaatactgaagtatatattatatttataggtatcgtaaaacaccgatgtatatattatatttataggtatcgtaaaataccgacgtatatattataggtatcgtaaaatacygacgtatatattatatttataggtgtcgtaaaataccgacgtatatgttatattcatcagtgtcgtaaaataccaac

SEQ ID NO: 724630 - DNA, 1080 bp, Homo sapiens
attcgtcgttgtcatgaaacaccgacgtataccttatattagtcggtgtcgtgaaataccaacgtatatattatatttgtaggtgttgtaaaataacgtcatatatattatatttgtaggtgtcgtaaaataccgacgtatatagtataggtgtcgtgaaataccgacgtacatattatattcctggtgtcgcaaaataacgacatatatattacatttgtaggtgtcgtaaaataccgacgtatatagtataggtgtcgtgaaataccaacgtatatcttatattcgtaggtgtcgtgaaattccgtcgtatatgttatattcgtcggtgtcgtaaaataccgamgtatatgttatattcgtcgctgtcgtaaaataaggacatatatgttacattcgtcggtgtcataaaataccgacgtatatgtcacattcgtcgttgtcgtgaaataccgacgtataccttatattagtcagtgtcgtgaaataccgacgtatatattaaatttgtaggtgtcataaaataacgtcatatatattatatttgtaggtgtcgtaaaataccgacgtatataatataggtgtcgtgaaataccgacgtatgtattatattcgtaggtgtcatgaaattccgtcgtatatgttatattcgtcggtgtcgtaaaataccgacgtatatgttatattcgtcggtgtcgtaaaataccgatatatatcttagattcgtcggtgtcataaaataaggacgtatatgttacattcgtcagtgtcataaaataacgacgtatatgttacattcgtcgttgtcatgaaataccgacgtataccttatattagtcggtgtcgtgaaataccggcgtatatattatattcataggtgtcgtaaaataacgacatatatattatatttgtaggtgtcgtaaaatactggcgtatatattatagtcttccgtgtcgtaaaataccgacgtatttgttataatcgtcggcgtcgtaaaataccgacgtatatgttatgttcatcggtgtcataaaatagcaacatatatattacatttgtaggtgtcgtaaaataccgac

SEQ ID NO: 724631 - DNA, 1080 bp, Homo sapiens
attcgtcgttgtcatgaaacaccgacgtataccttatattagtcggtgtcgtgaaataccaacgtatatattatatttgtaggtgttgtaaaataacgtcatatatattatatttgtaggtgtcgtaaaataccgacgtatatagtataggtgtcgtgaaataccgacgtacatattatattcctggtgtcgcaaaataacgacatatatattacatttgtaggtgtcgtaaaataccgacgtatatagtataggtgtcgtgaaataccaacgtatatcttatattcgtaggtgtcgtgaaattccgtcgtatatgttatattcgtcggtgtcgtaaaataccgaagtatatgttatattcgtcgctgtcgtaaaataaggacatatatgttacattcgtcggtgtcataaaataccgaygtatatgtcacattcgtcgttgtcgtgaaataccgacgtataccttatattagtcagtgtcgtgaaataccgacgtatatattaaatttgtaggtgtcataaaataacgtcatatatattatatttgtaggtgtcgtaaaataccgacgtatataatataggtgtcgtgaaataccgacgtatgtattatattcgtaggtgtcatgaaattccgtcgtatatgttatattcgtcggtgtcgtaaaataccgacgtatatgttatattcgtcggtgtcgtaaaataccgatatatatcttagattcgtcggtgtcataaaataaggacgtatatgttacattcgtcagtgtcataaaataacgacgtatatgttacattcgtcgttgtcatgaaataccgacgtataccttatattagtcggtgtcgtgaaataccggcgtatatattatattcataggtgtcgtaaaataacgacatatatattatatttgtaggtgtcgtaaaatactggcgtatatattatagtcttccgtgtcgtaaaataccgacgtatttgttataatcgtcggcgtcgtaaaataccgacgtatatgttatgttcatcggtgtcataaaatagcaacatatatattacatttgtaggtgtcgtaaaataccgac

SEQ ID NO: 724632 - DNA, 1080 bp, Homo sapiens
attcgtcgttgtcatgaaacaccgacgtataccttatattagtcggtgtcgtgaaataccaacgtatatattatatttgtaggtgttgtaaaataacgtcatatatattatatttgtaggtgtcgtaaaataccgacgtatatagtataggtgtcgtgaaataccgacgtacatattatattcctggtgtcgcaaaataacgacatatatattacatttgtaggtgtcgtaaaataccgacgtatatagtataggtgtcgtgaaataccaacgtatatcttatattcgtaggtgtcgtgaaattccgtcgtatatgttatattcgtcggtgtcgtaaaataccgaagtatatgttatattcgtcgctgtcgtaaaataaggacatatatgttacattcgtcggtgtcataaaataccgacgtatatgtcacattcgtcgttgtcgtgaaataccgacgtataccttatattagtcagtgtcgtgaaataccgacgtatatattawatttgtaggtgtcataaaataacgtcatatatattatatttgtaggtgtcgtaaaataccgacgtatataatataggtgtcgtgaaataccgacgtatgtattatattcgtaggtgtcatgaaattccgtcgtatatgttatattcgtcggtgtcgtaaaataccgacgtatatgttatattcgtcggtgtcgtaaaataccgatatatatcttagattcgtcggtgtcataaaataaggacgtatatgttacattcgtcagtgtcataaaataacgacgtatatgttacattcgtcgttgtcatgaaataccgacgtataccttatattagtcggtgtcgtgaaataccggcgtatatattatattcataggtgtcgtaaaataacgacatatatattatatttgtaggtgtcgtaaaatactggcgtatatattatagtcttccgtgtcgtaaaataccgacgtatttgttataatcgtcggcgtcgtaaaataccgacgtatatgttatgttcatcggtgtcataaaatagcaacatatatattacatttgtaggtgtcgtaaaataccgac

SEQ ID NO: 724633 - DNA, 1080 bp, Homo sapiens
attcgtcgttgtcatgaaacaccgacgtataccttatattagtcggtgtcgtgaaataccaacgtatatattatatttgtaggtgttgtaaaataacgtcatatatattatatttgtaggtgtcgtaaaataccgacgtatatagtataggtgtcgtgaaataccgacgtacatattatattcctggtgtcgcaaaataacgacatatatattacatttgtaggtgtcgtaaaataccgacgtatatagtataggtgtcgtgaaataccaacgtatatcttatattcgtaggtgtcgtgaaattccgtcgtatatgttatattcgtcggtgtcgtaaaataccgaagtatatgttatattcgtcgctgtcgtaaaataaggacatatatgttacattcgtcggtgtcataaaataccgacgtatatgtcacattcgtcgttgtcgtgaaataccgacgtataccttatattagtcagtgtcgtgaaataccgacgtatatattaaatttgtaggtgtcataaaataacgtcatatatattatatttgtaggtgtcgtaaaataccgacgtatataatataggtgtcgtgaaataccgacrtatgtattatattcgtaggtgtcatgaaattccgtcgtatatgttatattcgtcggtgtcgtaaaataccgacgtatatgttatattcgtcggtgtcgtaaaataccgatatatatcttagattcgtcggtgtcataaaataaggacgtatatgttacattcgtcagtgtcataaaataacgacgtatatgttacattcgtcgttgtcatgaaataccgacgtataccttatattagtcggtgtcgtgaaataccggcgtatatattatattcataggtgtcgtaaaataacgacatatatattatatttgtaggtgtcgtaaaatactggcgtatatattatagtcttccgtgtcgtaaaataccgacgtatttgttataatcgtcggcgtcgtaaaataccgacgtatatgttatgttcatcggtgtcataaaatagcaacatatatattacatttgtaggtgtcgtaaaataccgac

SEQ ID NO: 724634 - DNA, 2916 bp, Homo sapiens
ggagtaaagaaggggcctagatgggaaatgaatcagatattgaaacacttgtgcctcagccactcatcttttctcccttacagaagaagaaatgtagtgatggatgattctggggacaaaggattttcagccttttccattgctgtattctgcagaacactgtttctaggagatgtgaaaaaagtgttcgagggtcaaataagttttggaaatagcatattggaattcacagaacacattagcatattaaagactctgacaatttcacattaaataaacctgtttacctttgtttacctcagcattccctaaacttattcgagcttgaaacatttgccccagtttacgcggggcgacctgcagaacgacattcctcggactacccaattagaagacaaagaaatacaattttattatctcaaaagtgacagcctctttgcagacattaaggacaagagtttaattttcttccccagttattgttcactgcctgctctcagaggctggagccatgggtcttattgactcagaggcagagctccgagggcgggttcttgacattttgagtgagacaacaggcaggcgaaacaggctctatggagagggaaaggatttttaaaactttctttagctccagtttgacatatctggggataagtctggtggagtggacagaattttacatgagggacatctaggcaagaagaggaagtgggaaggaaagcccatttcttctagtgctggcaacattaggaggataatcrtggcaagaaagggtggaaagtgaattgatcagctctgttccaatctccccccctgggcctttgctctagagacaaggaaggagtagtgagtaaatatggaagtactcaagtgcccaattcctacagaaggccttgggtttagccgctggcatggacagccaaaataagtgtttggaatttcattttactgctcagctctaggcttctctatggcgtggctgacacccacacattccacagcagtcaagggcagataaattgtcagcgagccttgcttgaggccagataggtctagtggtactgctctacagtgattcttagtgtcacacagaaccaggatgaagaggctgactcagccacaaagggccactagaccctgatcaagatgagagaagctggtacacaaggtctgccagccctgcctttagtatttgtaccagcaggaatcgagggcaaaacaggggcactgtgtggtctctgaccactcactccatcctctacaagatcatgtgagccctgctgcttgcccagctgtgcacttgatgccctgttgtagagatctggggaaaaggggcacagatgattgagacatatataaggaaacatatataagaaactatattttctctgcatgtatgaattttagtgtgattgaaatttcagcattgctacataattttttttttttttttttttttttgctatccactgaagcttagatgggaccacttaatctcgaggtatttgttttccctcaaactgcaggattgccacagcaaacccagaagtgtggtactgtgattattgattgattggaccatgggctacttcactacagagacctagtttcattcatctttctcccaacacatagagtagcaccttaatataatatgcattcaataaatgatagttgaatgaatgaatgaaatacacttaggctctgcacctcagtagatgctctagggggaacctcacctatggattccttttgactaaaggaagaaaaacgagtcttccttggagagtttgatgacagctacctttcttcataggtctatgtcctttcttcttttccttacctcttccatctctattcaattactttctttttactctgccttttttggaaatgcgttggagatggaggtagctggcagaatggaagagtggtcctgccattgagttttcccaaatcctcctaaactgtcactcaagaagattcttaaatttctatggcaattcttggcttaaagaaaaaaaatcagagcgctctgttcatagcatgataatcttactaatcactccatgattttccctgtctttatcctgcactctgtgcccttccaccactgtgagctctacaggccagatgcaggtggcatggctttgtagtttttatactctcctctgtgatcccatgaggcttttctcatacttttatgatgacacattttgttggattataagtgaactgatttgcatgtctattttctcctatagactgcaagctcattgagaaccttcgctttcattgttgtatcttcatgttttatggtgcttcatacaatgcggacatgtaatatatgtttgctaactgatcaaactgtatatcttatgaatctttaaaagcagaaaaaaggaaaaacttactttcccaatgtttgtaagtctttatatttttctgtcccaaccagctcatcaagcctaccaaacttctgcccttcctccaaccattcctctagctgaacatgccagaatatttccaggagcacccaggaggacattcagaaataaatccatttgtatcctccttctctgactgctttgatatgggcccctcccatatcacatcgctcaggaacagtcctacttccctgcctggggaacctctgacagctcctgaagatgcaaagctctcaagttgtaaaatggtgctgagttcccttcagacctcactgcactggagccatactgagatccagcagaaatatgaagaagattccctcttttctgcttgtgtccttcccacaaaagccagaaaagatgtgtgttttggtagctgtctctggaaagggactactccatggcccctttcaggtctcagtgccaaaaagaagtcttctctagattcccaactaagggttaaatg

SEQ ID NO: 724635 - DNA, 2047 bp, Homo sapiens
agtgataacataacagttaggagcaccggcagaattgtcaatgtctcatgcttcctatggctgagctacagagggaagaaatagtcccttcatcatccctcaattctcggatcctgtggatgaaattgcagcagctgttggtgggtaagcactttcttttcgcaaagccaccaccagctgacactctgggtccactgctgctccagtgtcctgcaccttaggagcgccgcctccccaccactgctaccatggggcctgcagcaacaacctctctggccagcagtactccctgaaagtgaattccatccattcagattctgatgtaataaattattttctatgcattggcatatttttattggaaaaaaaccacttattcttcataatttgggaatagatgttggtttttaaataagagagtattcattgtatgactaatttactttgaattcaatttatgacttaatcagaaaataaatgttaatttcctttatttatgaaagctcactaaaatgtaggcatagaaaatattgtaatataaaccctttccaattcaataggttaatggtggagattaagaagataactctgacccactatactggagggagcaagcaagaaagaggcatttaggtaaagccataagcttatggtaataaagcaagcatatgtagttctgaatttttaattcaggtactcaattacagttacatgggtaaaattttttttgcttgaacaaactctagtagatcactgactgctgctacaccaacacgagggacagaaaataacagattatacagcgaattaagacttcttcttgccatggtagttgactctgaggaagaaaagaaaaaaaaaaagctttcctgacttttcaatgagcaaatgatgttataatttgaataaacggatccagggaatgacaatgcaactggtgaaaactacagttgtcaaagccatgtgatcaaaatcaggattctgtcctttttctaatgtttcctcattaaagacttgtcaaggaatctagtttgagaatggcttgccttttccctgaaatgctatttatttatttatttatttatttgagacacagcctcatcctgtcacccaggctggagtgcagtggcacgatctcagcttactgcaacctctgcctcccaggttcaagtgagtctcatgcctccgcctcccaagtagctgggatgacaggcactcaccatcttrcctggctaatttttttatttttcgtagagagggggttttgtcattttggccaggctggtcttgaactcatgacctcaagtgatccagccacctcggcctcccaaagtgctggaattacaggtgtgagccaccacgtccggccctgaaatgctttataattgacattttggagagacagtttttgtaagattatatcatagtctccctgatgtttcatgaacaggtattacgtttggtataaaatatagacaatatgggcatggaaataatggggcctttgagatatttctcaaatgattctacaaaatttaaaagcagataatttctcaatgtaattcaaaattagaattttctctcataacttgggctttaacatttctgaaaactaactcaatgttgtgttggttttagagtaaaaacacattttaacaacagcaagaaggaaacccaatgtcagcaaactctttgttgatgaaaacaaccattggttattatgacactcagtcacaataacctcatgaagagtgaaccaggactgcaaacttggacatggatctggccactcagtagatcctgactcttcttctacccctggattgtagtctacttaatcacattttttaaaaaaaaacttctgaagtcaatggtaaagagtccttttgctaatggaaaactcactctagagagtctatcaatggaggctggatggtgggtgagtgcacaaggcagccttaaaatagtaagaagaaatatgatttgttgcatgcctgccaggcaccagtgttgcatttctaccatgtgctcctgttctaagtggctt

SEQ ID NO: 724636 - DNA, 3090 bp, Homo sapiens
tggctcatgttctaggatgacaagatatctttttagtggggactgaattcttaatgccatcttactagcagagaaagcagggggcacactgctgtggcctggcgctgccaaatattcattggtcatctgaattttcaggctagtatttcaactatctttctactttaactgagacctttgtattaattcagtcctcaacaaacaaacaaacagaaagcttgtattgaagctatgatcagataaatgcttgtgaagatagatagtgaccttctattcttttttttttttaagttattcaaattgcatctggaagaggctggactttgggttgttctacactcccttctaaggtttagccatggctaaacagggctgactgtgtctgctcattatttatgcagcttttaaataacaaactcctgcaactgtccaaaatgaaatgaaagagcccaggtgcttcggtgaagcatatctttccctgatgtaggataggagggcacagacaaaaagcaatgatgattggacctaacctgggcttctcaggttgcaattgcagagaagggaaggaagtccagttcaagatgcaaatacatggcactaggagtcaggaggcccagattctggtcctgattttgatgctaagctggatcaccccaagcaaatcactttacttttctggttctcatttatctcacctgtgcaatcaagagtttggagtaaatcagtggttgtcaaacttaagtgtggactgagatctcccaacgaaagggcttgttaaagcaccaattgttgsactccatctctaaggtctgattcagcaggtggggcctgagaattcgcgatctccaactgttaattggaaattaacaatttcccaggtgatgctgacgctgtgggtcagggagtcactcattgagaactgttgaattagatgatttccaagagatcttcaagttctaaagtgctacagatcatttcatgtcagttctagatggttgcatattgtttacgcctgggtcaagaaaactaaaactggctccatagctcagcctactctggtttttgtaggaaatcataagatcccaattttctttgaagtcatttgcttgatacttaaaacagagggtgtaaaataattgaaagtgcaaaataattttttcaaacaggtacacggtctatcaattagtggttgtacaaattggcctgcaaagatagagtgggtgattcatttaagttcatgcttatagaacttgtgctttctctttgaatccatttactccttgcatttaaaaatcacatttttgacataaatttcacctcactgttgaatactacccttagtgcttgatacataagtggtaatctgttagtcactggtaagttatgtgatgccaattctggttatagttctgttactgataaaatatggcctttgagaagtaattttactactccgggtctcaaaattcttattggtaaaaagagcattcttacaaggaattcttaatatttatttatgattctgaattttcaaatatgtaagtagatgaaatgtttggttcctgaaacagaaccaaaatgtaaatgaaaaaagaggcaaactatgtaagtctcatctggtggctccagattcaggaagaaaaataattgttaaaacccatctgctcccgccaggactaccgaaaattggtcttcctgcttccacttctgctccgtgcccctctgtgtaagatcctccaacagcttctccctgctctcagaataaaatccaaactctttatcaaggctccttcccctctccgaacgcatccaccctaagtcagcttcccatggcttcctaaactccacagtgaccttctttctgatacttgaacattccaagtttatttcttcctcatggtctttccaccaaaaacacctgtctgaaatgctctctcacttaggtccccgctttgattcagatcttcagacagttcttccatgactgccagtctttctccattatattgccctattttaacggcatagcacttattattattattattattttgtgtctttatatctttattgcctgtctctctgtgagggcagaaatcttctctgcattgaccgccttatactgagagcctagaagggtgcaccgtgcatgatatgtgctcaatatattagtttatggaatgaatgagtgaataaataaatgatattataaacatgatatcattttctatactgagcaaaagaagcccttttgctcagtatagaaacatgaccctacgttgaactattgatagctaaacacttatgttgtgcatattacatgctagccatttttaaagtgctctatttattaatatattaatatttaactctcataacactcttaagatgtagtcccatcatcatattccacatttcacaaaggaggaaatggaagtggagagaagttattgacttgctcaaagtcagaaagccaggaagtacatggccaggattcaaactcaggttgtctgttttcagagcctgtgttcttaatcattatgttatagatgataagatgaaattctgaaaatcctccccacaaaacatatccttgccaaatgattacccaataacacttgatcacttccactgatgagattctcattaccttagaatcagcccatttcttacagtgaaagctctgataagaaattctcccttttctgaccccaaatttctcccagctacctccaccctttagtcgaagcttcactccttgagacctatagaagaactgtaacctctcttccacctgacggccccccagcatttgcaagctactcagcattgcctccttgaatctttccttctccactgaccgtcctttgtcctttcaatagcctcttgtgtagtgatacctcagctctcttactatgctcttccctgaatatgctccatctagtctatatcctctaaaaatttggtcccagcactggataccatatttttggtatgatccagtcaacaaaaaagggtgaaaaagtactccataataaacttttgaaaatcaaacgaatggcaaccactataatttttttcccaggacaa

SEQ ID NO: 724637 - DNA, 3090 bp, Homo sapiens
tggctcatgttctaggatgacaagatatctttttagtggggactgaattcttaatgccatcttactagcagagaaagcagggggcacactgctgtggcctggcgctgccaaatattcattggtcatctgaattttcaggctagtatttcaactatctttctactttaactgagacctttgtattaattcagtcctcaacaaacaaacaaacagaaagcttgtattgaagctatgatcagataaatgcttgtgaagatagatagtgaccttctattcttttttttttttaagttattcaaattgcatctggaagaggctggactttgggttgttctacactcccttctaaggtttagccatggctaaacagggctgactgtgtctgctcattatttatgcagcttttaaataacaaactcctgcaactgtccaaaatgaaatgaaagagcccaggtgcttcggtgaagcatatctttccctgatgtaggataggagggcacagacaaaaagcaatgatgattggacctaacctgggcttctcaggttgcaattgcagagaagggaaggaagtccagttcaagatgcaaatacatggcactaggagtcaggaggcccagattctggtcctgattttgatgctaagctggatcaccccaagcaaatcactttacttttctggttctcatttatctcacctgtgcaatcaagagtttggagtaaatcagtggttgtcaaacttaagtgtggactgagatctcccaacgaaagggcttgttaaagcaccaattgttggactccatctctaaggtctgattcagcaggtggggcctgagaattcgcgatctccaactgttaattggaaattaacaatttcccaggtgatgctgacgctgtgggtcagggagtcactcattgagaactgttgaattagatgatttccaagagatcttcaagttctaaagtgctacagatcatttcatgtcagttctagatggttgcatattgtttacgcctgggtcaagaaaactaaaaytggctccatagctcagcctactctggtttttgtaggaaatcataagatcccaattttctttgaagtcatttgcttgatacttaaaacagagggtgtaaaataattgaaagtgcaaaataattttttcaaacaggtacacggtctatcaattagtggttgtacaaattggcctgcaaagatagagtgggtgattcatttaagttcatgcttatagaacttgtgctttctctttgaatccatttactccttgcatttaaaaatcacatttttgacataaatttcacctcactgttgaatactacccttagtgcttgatacataagtggtaatctgttagtcactggtaagttatgtgatgccaattctggttatagttctgttactgataaaatatggcctttgagaagtaattttactactccgggtctcaaaattcttattggtaaaaagagcattcttacaaggaattcttaatatttatttatgattctgaattttcaaatatgtaagtagatgaaatgtttggttcctgaaacagaaccaaaatgtaaatgaaaaaagaggcaaactatgtaagtctcatctggtggctccagattcaggaagaaaaataattgttaaaacccatctgctcccgccaggactaccgaaaattggtcttcctgcttccacttctgctccgtgcccctctgtgtaagatcctccaacagcttctccctgctctcagaataaaatccaaactctttatcaaggctccttcccctctccgaacgcatccaccctaagtcagcttcccatggcttcctaaactccacagtgaccttctttctgatacttgaacattccaagtttatttcttcctcatggtctttccaccaaaaacacctgtctgaaatgctctctcacttaggtccccgctttgattcagatcttcagacagttcttccatgactgccagtctttctccattatattgccctattttaacggcatagcacttattattattattattattttgtgtctttatatctttattgcctgtctctctgtgagggcagaaatcttctctgcattgaccgccttatactgagagcctagaagggtgcaccgtgcatgatatgtgctcaatatattagtttatggaatgaatgagtgaataaataaatgatattataaacatgatatcattttctatactgagcaaaagaagcccttttgctcagtatagaaacatgaccctacgttgaactattgatagctaaacacttatgttgtgcatattacatgctagccatttttaaagtgctctatttattaatatattaatatttaactctcataacactcttaagatgtagtcccatcatcatattccacatttcacaaaggaggaaatggaagtggagagaagttattgacttgctcaaagtcagaaagccaggaagtacatggccaggattcaaactcaggttgtctgttttcagagcctgtgttcttaatcattatgttatagatgataagatgaaattctgaaaatcctccccacaaaacatatccttgccaaatgattacccaataacacttgatcacttccactgatgagattctcattaccttagaatcagcccatttcttacagtgaaagctctgataagaaattctcccttttctgaccccaaatttctcccagctacctccaccctttagtcgaagcttcactccttgagacctatagaagaactgtaacctctcttccacctgacggccccccagcatttgcaagctactcagcattgcctccttgaatctttccttctccactgaccgtcctttgtcctttcaatagcctcttgtgtagtgatacctcagctctcttactatgctcttccctgaatatgctccatctagtctatatcctctaaaaatttggtcccagcactggataccatatttttggtatgatccagtcaacaaaaaagggtgaaaaagtactccataataaacttttgaaaatcaaacgaatggcaaccactataatttttttcccaggacaa

SEQ ID NO: 724638 - DNA, 1492 bp, Homo sapiens
aataaagtcaattggagtatcccagtttcgatttgacaacttctggtcataagaagaagtgctttcttcagaagatttccaggttttttagctgacatttgtcctaactcttaattatattaattatatatagcaccatctagtgaaataacttagaatacttgggtttttaaaagacaaaattaaagaaatgggtaaaaacataaatcaatgcaagttgtgttttttaatgatgggttgagcaagaatttgcctatgttcttacctgaaatgtatttttaagtgcttagattatttaaggacgcttttaattcagtcagtcacttgatatagtgatcatctcaaggatggtttggcattacggggagagaaatgtcggagtaaggaaggatggaaaatactgattgtggaggtaataagtggggataaattaagggcctatgaattcctgaaaagaggagaatgtgcaatggtgtgctagagccagctagtaccactggagagagccaactgcgtgtatctttctttctccaacttcttgctcagtgatgtctcattggtagcttcaggtcagctggggtgagattatttacataatggatattggcaaatgctatgaatcacagctacccacccccagagaagcagctgttaaacatttattagcacatcgccaggacatatcagcatctgatcctcccaactgaccacagtccttatagatagaggccagatagagggactggtggtggctaaggacccacaagcaaaagatatctgagtctaaatgacatgtggtttgttgtgctaactagtgactgtaagcccttgacaatatgtcagaattgcccaaacttatgaaaaaaaaaaaaaacagttcaagatacttcatatttcagcaagcaatggaaaatgtctccagcacctttgagaagaaataaatcaggtgctgattattagctgcaggaggctaatgtggaggctgaatgcaggaaagagtgtggaggcagccgagtcagattgcagacagggcttgaccttcaccaatggggtagccttgggcaatttggacactgggctgtttcttcaactaaaagtcaaaatgagaccactggggttttctttctttaattartgaaatcttttcttcaaatcacctcttacatataatatcaatactctctagtaaagattagtgtcatttaaaagaccagcccccttgtgagatccccaaactcctctgaaaacctcagaatcccttgtaaaagtcattgagttaaactatttccaagagtacaatttcccttccaacactgatattctaagcaaagaattggctatcagcttcactacctaatttccccgtttacccagaggtatgagcttcctctttctccaaccaatctaaggaatttggggggagtgaagacaaaaagttgtttatctccataaatgcccccagagactctactccagatgggttttcaaccta

SEQ ID NO: 724639 - DNA, 1492 bp, Homo sapiens
aataaagtcaattggagtatcccagtttcgatttgacaacttctggtcataagaagaagtgctttcttcagaagatttccaggttttttagctgacatttgtcctaactcttaattatattaattatatatagcaccatctagtgaaataacttagaatacttgggtttttaaaagacaaaattaaagaaatgggtaaaaacataaatcaatgcaagttgtgttttttaatgatgggttgagcaagaatttgcctatgttcttacctgaaatgtatttttaagtgcttagattatttaaggacgcttttaattcagtcagtcacttgatatagtgatcatctcaaggatggtttggcattacggggagagaaatgtcggagtaaggaaggatggaaaatactgattgtggaggtaataagtggggataaattaagggcctatgaattcctgaaaagaggagaatgtgcaatggtgtgctagagccagctagtaccactggagagagccaactgcgtgtatctttctttctccaacttcttgctcagtgatgtctcattggtagcttcaggtcagctggggtgagattatttacataatggatattggcaaatgctatgaatcacagctacccacccccagagaagcagctgttaaacatttattagcacatcgccaggacatatcagcatctgatcctcccaactgaccacagtccttatagatagaggccagatagagggactggtggtggctaaggacccacaagcaaaagatatctgagtctaaatgacatgtggtttgttgtgctaactagtgactgtaagcccttgacaatatgtcagaattgcccaaacttatgaaaaaaaaaaaaaacagttcaagatacttcatatttcagcaagcaatggaaaatgtctccagcacctttgagaagaaataaatcaggtgctgattattagctgcaggaggctaatgtggaggctgaatgcaggaaagagtgtggaggcagccgagtcagattgcagacagggcttgaccttcaccaatggggtagccttgggcaatttggacactgggctgtttcttcaactaaaagtcaaaatgagaccactggggttttctttctttaattagtgaaatcttttcttcaaatcacctcttacatataatatcaatactctctagtaaagattagtgtcatttaaaagaccagcccccttgtgagatccccaaactcctctgaaaacctcagaatcccttgtaaaagtcattgagttaaactatttccaagagtacaatttcccttccaacactgatattctaagcaaagaattggctatcagcttcactacctaatttccccrtttacccagaggtatgagcttcctctttctccaaccaatctaaggaatttggggggagtgaagacaaaaagttgtttatctccataaatgcccccagagactctactccagatgggttttcaaccta

SEQ ID NO: 724640 - DNA, 609 bp, Homo sapiens
cctcagcctcccaagtagctgggactacaggcacccgccaccacgcctggctaattttttgtatttttagtagagacggggtttcaacgtgttaaccaggatggtctcgatctcctgaccttgtgatctgctcgcctcggcctcccaaagtgctgggattacaggcgggagccactgttcctggctttttttttttttttttttgagatggagtctcactccattgcccaggctggaatgcagtggcgtgagctcagctcattgcaacctccgcctcccaggttaagcaattctccagtctcagcctcctgagtatctgggactacgggcgcctgccaccatgcctggctgatttttgtatttttagtagagacggggtttcaccttgctagtcaggctggtcttgaactcctgacctcakttgatccacctgcctcggcctcccaaaatgctaggattacagccgtgagccactgtgcccgactattaggtaaatttctggtggcagtcctctacttaggaagctgcagggactgtcaatttatcgtgtccacatttacattttcaaggcttcagaatttttcttcattttcttgtccatccctattt

SEQ ID NO: 724641 - DNA, 1228 bp, Homo sapiens
cgactataatttcatttctgtttataatggagaaaatagttacctctggtgggaactggaattatcagaagccaaaattttatttgtaatgtcaaaatttttataacaaagcttaaaatttcaaacagtaatgaaaacgacatggtaaatccacagccactgggatactaagaattaaaacaagtagtatgaagggaaaacactaaggaaagttaaataaattgtgatatcatttgggtcccatacagcaagccataacaccagattataatacatagaaaagagctgaaaggccaactgacaaaacagcttaagtagttttctgtaaaaaatgaaatttgagattttgagagtgttggaaatgggagactttcttgataatatctagttcctttgtattaaagaaagcaaactcacagacacacacataaagaaattaaacctttttacaagaaacgtacaatttaaaattaatgtgactgtgggtatttatatcttttttctattttcttttaattagatgaaaatttaaaacggcacctatgatctcttccagactctttcagtgtactataacttctttccaatctaacctacggtgatatcaaaactgttcatccttacagaacaaaataaataaataaaatcaaacagtctgtgctcattgccagccttgttttatgtttaatgagcatgscttttccaggaacaataacacccagcataaaatgattcactattacaaagatctggctatactgctagtcagccaatgttccccaaaacaaaacagaaaatatatatactaaaatgcctgttgtaacatgattactctataaggcagctgttatttctgtctccaaagaacagcatttaaaaaaccattctgctgtatatttttttcctcagggtggttaaaagataaatgaaaaaatataaaatctgatcatattctgaacagttttgtacttttcctgatgaggtccctttcgctcacctaataccactgacaaaatccccttttaacaatgccagctatttttaaaatttggtttcataaaaaatcaccactgagatgaaaagttagcatagcaattcataacatggaatgatttctttatgcctcagttattaaaccatggaaaagagtatttataatcaaaatgctgacacaacattgacagtggtgagaacagcattgttgtaatatggctgtcacagttgttca

SEQ ID NO: 724642 - DNA, 650 bp, Homo sapiens
tggacatgcttgttctactcagtgggaataactcaaggtttttctcatagaacaatccaatagtcacatcaatgaacctttctttaatttttattgactcctggactgttggtactggcttagctatttgatctacttggaaaattactgactggcagaataaagcaattcttttggggccatgaatgattgaaataaatcatggtgctgatagaactgtctataccactcatgtaggggtccacagtaaggctgtattcacygattggatgcaacagaatcaagttgctcatgaggccacaccattcaaattgccactattgctgcctacgccatcataccagttgtggaaacatatttcaccatcatagactggatacaaaagaaaaaaaaaactcatttttcagaggataccactgcattgccaaacttatgactcttgtcaatagttgagtcattgatatcactttgaaggagggcacattgcctaggcacaacttcgggcccttcctggtagactaagtacatcagacctctaacccattctgcagctactcaaaggccttaggccttgaccaaggtgtcagctaaactttaagcaggttcttcctgcctgtcttgacatccctctcattctggtccttactaaa

SEQ ID NO: 724643 - DNA, 614 bp, Homo sapiens
taagctaatatattttcaaggccacagatttaaacggcttattgggttccagaacaatgaatataaaaaaattgtgaaaaaatatattttaaaatgtgtaaagtaaaaagatgtgcaaattaagtttaaacaaaggttgaaaattaaaagtttaggaaaaaacagtggattgacaggaggatggatacaaggaaaaggttaaaatctattcacttttaatgttatagagcataataacaggcttcctatggtagtcagcatccaaggtgtcttttaataacccacatctgttgatactggcagtcttttatagcctccttccacatttcaccagggtttatttatatgatcactagtatatgatagatatgatgatcagtcacttgtgagattagttaataaaaagactttagcttccattttgggcttgctatctctcactctctcatgaaagatgagctcyttcatctttctttctctgtttgtctcttggtgttgtcttcctctctctctcactgtctgtctctctcatcggcttctgctctttctcttggatctgtgagtaacctgctgtgttttaagcaatccaataaagaggctcatgtagtgacaaa

SEQ ID NO: 724644 - DNA, 629 bp, Homo sapiens
ttgtaacaccttcagcaaatgagaaaaataattgaaggtataattaataaactaataaggaagaaatatagtcatgcaattaaaattggttgcgaatataaggcaaattgtttgtatcccaatatttgaattgtataacatggcattctggtaatcccatcgtgyggcaccatgttttccaaggttttctcccattatgctgtctctttccttgtgtgtatttggatgtattcttcccatttaaagtgcttctttcctattttcaccttttataaattcaaaccatcctacaattttcaaatgttttaaattatatcacataggtgactttcaaatctacttttcttccattatcaatgtggtaaattatttcagattttccctatcacgcatattattaatctgggctaaatgtgtgggaaatacaaatttaaattaaaaaataacaaaaaagttaaaaagtagaggtggaactaatatgctataaataattacaatacaatgtcacaagaaggctgctaaatagtccagtatgtacacaatgtggaatataatgttttgaatgagacattttttaagaaggtgaaagttgagagcaacagttagttaatactaacattttctagtaa

SEQ ID NO: 724645 - DNA, 679 bp, Homo sapiens
agtttctttatgtaaaaagataatagacatatctacctcacatttcttggtaggatcaaaggagataatgcacggaaaggtcaaagattacttaaataaatatttgcctacatattttatatgtacaagctactatatcagcacagataaataagtagttatgtttctctattgttgttgttttgggtaggagggtgaagctagacaagaccaaaggcttcacatagaaaattttcacctaggtctttgcctacatattttatatgtacaagatactatatcagcacagataaataagtagttttttcattgttgttgttctgggtaggagggtgaagctacacaagacaaaagactttacatagaaaaatttgacctaggtcttgaaaaattaatagatgttggrcagacaatgctgataaatgtgccttgcgcaagccatacgactgcaatttgctactatgagaacagccccgggggttcaaggcataaggataatatttttaaaagcctggtgagttcctcctaataaacatcatcgcttcagttgttgtcatgagctagaatgcaagatgatgtagtagataatagcacatgctttgaaataagatagacatgggttctgagccagtccctgctacttacaactgcatgaccttatgcccattacttcacttct

SEQ ID NO: 724646 - DNA, 725 bp, Homo sapiens
gggcggtgataacaataacaatggcaatgataatgattgccaacactaataaagcactcagtaggtaccaggcactggtcaagcactctataaccctaactcatttaatctacatggcatgtctttaagatggacatttttatccccacacaacaatctaataatttgcttcagatcacgcagagagccagtggcaaaggtggagaattcaagcctaggcagttttccttcacactctatgtccttaagcattatttactgcctgactgcctgtctgtcaaagctgggaatagaatcaagtctgacccttaatttcatcttgctgcttatagcattaaataatgataaaagtgtgattctagttaaaaaacatttattcattcattcacacatgtgctaggtgactacagcatgcctggcactggtttggtcagtggaaacacagaattgagagagaatagtcttctatttggttctaagtgttacaagcacrgtggccattctatctccagctcctgaaattgggcatggcacatcttgggcactgaataaatatgtgttgaatgaatgggttgtacctgctcttgagaatcaagacttataagtggatatatgttcattttcttatatattatgtaaaatagttagataatatagagtgttgagacctacagtgtggtctggagatggaatagatgagcacaagaatgtagtagatttcctgg

SEQ ID NO: 724647 - DNA, 961 bp, Homo sapiens
gctcagctcgtccagccgccgctccagctcgtcgatacgctctcgctgggtgtggatgaggctctgctgcttctgcacgatggccgtgagctccttgaggcagagcacggcgcgcaccggattctccagcaggctctccatgccgcccgccgccgcctgcgccctgcctgcgcctggggtggcggcggggagcgcgagggcgcgggagcccagcagcccaggggtcggctcgcctccctctcccaccggcccagcctccctccccccgccggcgccgcgtcactgccaccccgaccttcacacacgcatcgcggggcggggcggctgcgcaaggccccacccccaccccaccccctacctccagacctccccaactcctcgcctccccacctcsctgcctcttggcgtcagcgaaggctctgctgcctgcagggcagagaggagagggaggaggccagcgagagggagcctctgtcggggcgtgggaggaaagcaagataacgcaggcgacccgagaaggacggtgaatctgactggccagactgggaagtaggcgaaggggaagcagcgatactgggaaggtgcggtgggacctgtaggagaagagaaacagaaaagaaaggaagagaaggggagaggccagcagagaggaagcagaaaaagggaaggtggggccaagaaagagaaatgtgctggaggagaggaaggtgtggggccctgaagggacgcgaattcttttttcccaggtccaggccttccagaggctggggttcatctagagacctgctgaggaggggccacactcgcctcttttgctcgcagcaatctattctgccaggggattccctggaacacaagaatcctggggctctaagggaccctaaagagcgtctggtcctgctccttccttcatccgtgacgaaacttgggatgggaaggctgttcctgctgggtttcctct

SEQ ID NO: 724648 - DNA, 655 bp, Homo sapiens
gggaactgaaagccaccagctgacagcacacccaggtcttagggagcactccacagcatagtgcttgtcctcctcaaggaataaactcgcctcatccatcagagaaaacagaagtcctcgggtctaatcaccatccattttcttccctggtccccacttctaagctaacctcagtgagtgcctatcctttccttccttccttcctcctgactccaaagatgaatctgttcctatttctgttcaatgcggtcctggaagatgtctaattgtctgtggagacatggggtaaatacccctcttgtgtggctccgtggctgattcggcatctgtcacctctgtcgccccaggtcagtgctyctcccatcttgacacagctgtctctgctctgaatctgttagacacatctgtctccccgtggggtggcgagctgctcaagggtggtgaccgtacctgattcctgttttctcttcagaatgtagcacatcacttgcatactatacatgccccttataggattgtggaacagtgacaaaatgagtcatacgcttcaaggaaattaacatggaagtgctgtgtgaaatggacaggagaatagaaaaattggtgatgagactaactgtcagaaagctttcagaagagtctgcttcataggcaa

SEQ ID NO: 724649 - DNA, 627 bp, Homo sapiens
gtaaaccaacgagaaattttaagggaattgggattgttttgtaacatgttgctgagctcagaggctgtgaatggggacagatcaagccagttctagcattctattgtttttgttgttctgttttatgaagagagtggcctcgctaccagcaacccagatgttcactgatgtattttaaggaagctccatctatagctgttacatttttttcttcttctaaaccatcaattgtttaccatatttataagggtawttccagtttaaaatataagaaatataagacatagattgtcattaacatgtttagccctgaagagtccaacagaggaacgcctagaatagtgttatcagaaaaacaattaattcattttaagagttcccttcattagaggccaacttcatgagtttcaggtataagaacatttgcttctagaaagatgtcattacttcccccaaagaaagaaaaagtgctaagtctataataatattaattaaacactttctataggcatttttaagttgactgacgaagtcatgatggtcaatgatataagggatttttctggatatttctttctcatcaataaatttctgagttccaatcaggaaaacaaactgtcttgctgc

SEQ ID NO: 724650 - DNA, 1151 bp, Homo sapiens
gatttcaccatggtgtatgcctatgtattcaattaagaaaattgcttagcttaacttcctaaattttccaatcagaaaagttttccaacattgaaattagcctgcatctctgggaaaaggtgagtgccttatggctatagacaccagacaggtgctggagggccgtctcctaaagacactgacaacgttccttttagagagaaagactgaactggcaagggagtattgtcagcagccataaggttttatatccagctgctgtgacttgatactgctgatataactaaatctggagaacatttcttttagtctctccctttcaggcaagggtttttgtcagaaatactattccctgttagagcaaggacactctgttgagatgggggttagacatctaggtactgttcctgttcatctactractagctacacaattgtgagcacattgcttctttatctgtttctctaagtccttcttcatcaaaataatttgaatttccattttgctggggtgaaacagtaattcctaatatggtgcttcccttccccacatccactggttgtctcagagcctgctcccaagacacatgttgtcttcaactaaccttgcttaggtttgcaggcaggtaattagacaagagcgtcttggcatttcatcttcatcatgtctatctgtttcactagaagaatacagtattgaagattctgtgttattgaagtttggcgggcataatattaattgcattatctgatatataatacaatttttcaaacacataaatattttttgaatacttacaatgggcagttagctagatacccagtgcatgggctagggttattatattaaaataaaggattcaggtcttatttcaaactgcttacagtctacttggagatacaagtcctacagagagaaatacacctaacaacagaaggcttgctttcttacttcatttggctacagctcaatgtcacccccttagagaggctaccattgaccactctaaatcaagtaataccaagacatactctctgtttccttaccctgttttattttttctccatagaatttatcactagttgaccatttatatttttatgtgtgtgttctcaaatttgttagttgcttttctccttcactcaattta

SEQ ID NO: 724651 - DNA, 620 bp, Homo sapiens
cacgcctgtaatcccagcactttgggaggctgaggcgggcggatcacgargtcaggagatcgagaccatcctggctaacatggtgaaaccccgtctgtactaaaaatacaaaaaaattagctgggcgtggtggtgggcgcctgtagtcccagctactcgcgaggctgaggcaggagaatggcgtgaacccgggaggcggagtttgcagtgagctgagatcgcgccactgcactccagagtgggcgacagagcgagactccgtctcaaaaaaaaaaaaaaaaaaaaaaaaaaaaaaaaaaaaaaaaaaatcagctttgtgctcctaccctttctgaccctagtctttctttttcgtcacagactgtattctcttccccgcttcctccccacaatttccttcttgctttccacaatcatttattaaatgagagcttagtatgtggcaggtgggacatttggagattcagagattaatatgacatgtttactgccttggaggagccccctgtaggtacaggtgtgtctggtaggtttttaattgtgtgtcctctctaatctactgcaactaagttcatggagtactgagttggtaagaaagggtaccaagatctattagtgat

SEQ ID NO: 724652 - DNA, 654 bp, Homo sapiens
ataagaataattagtggtcaactgtgtctaatgcaatacagattgtgtaaattgagactagggaaaaaaaccattagatttgacaacatggtgatcattgatgactttagcaaggccagtttgagcacagtgttagaaacaaaaatctggattagaggggattgaagagtgaatggggctaggcattctcactaggaaagcatgccacagattcataccaaatttataataaaatcccagataactcaaaaccttacttccttttctacaaagagctaaaaagctttaatttatgatcatatggaggacaatattctctaaaattctgaccttataaaagctatgtaatcttaatttttaagtgcactacagagtacaaaataaaggaaaaaatatagagaggtggaaaaacaaagtaaaagtttgaaccctgagaaatagtggagggccaacaaatgctttcactatgaaattactttctaaaccctagtgaatttatgtgttgttatttttgatgacctcataggatgagggaaactggagataaagtttagatcccacccaaaaaggaaagtctaacagaaaagctcttgttgtgtaacaaaccaccccaatacttagtaacctaaatcaacaatgyattattacattcta

SEQ ID NO: 724653 - DNA, 854 bp, Homo sapiens
gaaaccccgtctctactaaaactacaaaattaacctggtgtggtggcacatgtctgtaatcccagctacttgggaggctgagataggagattagcttcaaccccggaggcagaggtggtggtgagccgagatcacaccactgtactccagcctgggcaacaagagtgaaactccatctcaaggaaaaaaaaaaaaaaaaawaaatatatatatatatatatacacacacacacacacatatatataaactaaaaatgaaatcagactacaacattcacttcttacgtggcttttcagtatacttaggagaaagcctacaattcttccccttacctgtatgtaatatttccgtctgctttgatccctacctacaatctaggttcactttcagccctactcttccccaccttgctcattaagcttcagctaaactaaactaagccttctttcaggctgtggaagagttcaagctcctcatctcaggatcttcctctgcctgaaaagactccttttcacgcttccgtctattctctgcttaaatgtctctctttcaaagaaaagatcctcctgcatcaaacactccactaatccatcgctggtctcaactaggtgtctcctgctacaatctcagatcatactcatttcctcagctgcatttatccaatttgtagttatgtttgttgatttgtaatctgtaacccccagaagactgcaaggtccatgagggaaaagacctatgctcttattgccttactataaccttgaacttaataaaagcctggccaataaatatttactgaatgaatatttttctttaacaaataacctttctgagaggatgccctttttttttt

SEQ ID NO: 724654 - DNA, 854 bp, Homo sapiens
gaaaccccgtctctactaaaactacaaaattaacctggtgtggtggcacatgtctgtaatcccagctacttgggaggctgagataggagattagcttcaaccccggaggcagaggtggtggtgagccgagatcacaccactgtactccagcctgggcaacaagagtgaaactccatctcaaggaaaaaaaaaaaaaaaaaaawatatatatatatatatatacacacacacacacacatatatataaactaaaaatgaaatcagactacaacattcacttcttacgtggcttttcagtatacttaggagaaagcctacaattcttccccttacctgtatgtaatatttccgtctgctttgatccctacctacaatctaggttcactttcagccctactcttccccaccttgctcattaagcttcagctaaactaaactaagccttctttcaggctgtggaagagttcaagctcctcatctcaggatcttcctctgcctgaaaagactccttttcacgcttccgtctattctctgcttaaatgtctctctttcaaagaaaagatcctcctgcatcaaacactccactaatccatcgctggtctcaactaggtgtctcctgctacaatctcagatcatactcatttcctcagctgcatttatccaatttgtagttatgtttgttgatttgtaatctgtaacccccagaagactgcaaggtccatgagggaaaagacctatgctcttattgccttactataaccttgaacttaataaaagcctggccaataaatatttactgaatgaatatttttctttaacaaataacctttctgagaggatgccctttttttttt

SEQ ID NO: 724655 - DNA, 854 bp, Homo sapiens
gaaaccccgtctctactaaaactacaaaattaacctggtgtggtggcacatgtctgtaatcccagctacttgggaggctgagataggagattagcttcaaccccggaggcagaggtggtggtgagccgagatcacaccactgtactccagcctgggcaacaagagtgaaactccatctcaaggaaaaaaaaaaaaaaaaaaaaatatatatatatatatayacacacacacacacacatatatataaactaaaaatgaaatcagactacaacattcacttcttacgtggcttttcagtatacttaggagaaagcctacaattcttccccttacctgtatgtaatatttccgtctgctttgatccctacctacaatctaggttcactttcagccctactcttccccaccttgctcattaagcttcagctaaactaaactaagccttctttcaggctgtggaagagttcaagctcctcatctcaggatcttcctctgcctgaaaagactccttttcacgcttccgtctattctctgcttaaatgtctctctttcaaagaaaagatcctcctgcatcaaacactccactaatccatcgctggtctcaactaggtgtctcctgctacaatctcagatcatactcatttcctcagctgcatttatccaatttgtagttatgtttgttgatttgtaatctgtaacccccagaagactgcaaggtccatgagggaaaagacctatgctcttattgccttactataaccttgaacttaataaaagcctggccaataaatatttactgaatgaatatttttctttaacaaataacctttctgagaggatgccctttttttttt

SEQ ID NO: 724656 - DNA, 1470 bp, Homo sapiens
tagtcaacagatggcatcattcattctacaaatatttattgaaggcctcctttgtgctggactgggccaggcactgggtatgaagtaatctagataatctctatattgttgtgatttaattgtatctgcaggataattagcttctttgaaagtaataatagtaccaagcacatacacaggaagattgaattagatgatgcattaaatgtgcctagtgctgcctggcactagtgtctggcatctagtaaaatactagcatatatgtacttgctttattccaagctccatcaatagatctaaagggatcagaggcatgtgactctaaggcttgatcaaacaagtagtgcagcaataaactgcaaatgagaaattattctatgcaaatcataaaaaacaggggttatctagacacgcaactaaatttaaagcatagtgtttgtgccaagtaacctctgcaaagcyaataaataccctcttttccctttgaacaagattttaggctctttgattaatcaacagtacaaataaataaaatccatattgtcagatgatttgttcctaaaaatgaattttaaaaatagctctaaatatttgggatgtcaaaggttgttgtgaacaactgaaaacactggaaccaactgtttttccctatatcatggcaggcatttttcttttagttattcagggaaggggcattaagtattcctcatcttggggagtaggtcatgttaagaaggctatatggctttcttaaagaaaatagtttttaaaaagatgatgccaagaagtcagagttttgttttttcatctcaaaagtttcttaacattctgaaaataactgtttggggaaaatgatataaatcaagaaacacctctgtacaaagtctccataaactagttctaatagctccattaattgttcagctctggagaggggaaatctctcgatgagatttgtctaatatgatgctcttactaaatcccacctttaacagaatggaatttagtcagaagatcatattagacaaatttaaaattttacctaatgcaaagcactataatgcccagtatctctaaaatacaaatatttgaaccttattagagttccttgaggtaaataaggatggtatcattatcatttttttgtggctataaaacaaaaactcagtaatattgttatttgtttcatatcctacatgtagtaaaaaattaaagaaagtctttcagctctagatttggtgtctttttattgtgtcatgtttcctctatgcaaattgctattcttcaaataaatcttcatcatgtagtgatgaaactcttaatcacagtcaactcatgaatgggacaacaaaagagtttgaatacttggtcatcctttacttttattttttaaatggcatggactagatacgcaagttccatgagatgtaataatactttaaaaatagatctacattttaaaaatccaca

SEQ ID NO: 724657 - DNA, 1470 bp, Homo sapiens
tagtcaacagatggcatcattcattctacaaatatttattgaaggcctcctttgtgctggactgggccaggcactgggtatgaagtaatctagataatctctatattgttgtgatttaattgtatctgcaggataattagcttctttgaaagtaataatagtaccaagcacatacacaggaagattgaattagatgatgcattaaatgtgcctagtgctgcctggcactagtgtctggcatctagtaaaatactagcatatatgtacttgctttattccaagctccatcaatagatctaaagggatcagaggcatgtgactctaaggcttgatcaaacaagtagtgcagcaataaactgcaaatgagaaattattctatgcaaatcataaaaaacaggggttatctagacacgcaactaaatttaaagcatagtgtttgtgccaagtaacctctgcaaagccaataaataccctcttttccctttgaacaagattttaggctctttgattaatcaacagtacaaataaataaaatccatattgtcagatgatttgttcctaaaaatgaattttaaaaatagctctaaatatttgggatgtcaaaggttgttgtgaacaactgaaaacactggaaccaactgtttttccctatatcatggcaggcatttttcttttagttattcagggaaggggcattaagtattcctcatcttggggagtaggtcatgttaagaaggctatatggctttcttaaagaaaatagtttttaaaaagatgatgccaagaagtcagagttttgttttttcatctcaaaagtttcttaacattctgaaaataactgtttggggaaaatgatataaatcaagaaacacctctgtacaaagtctccataaactagttctaatagctccattaattgttcagctctggagaggggaaatctctcgatgagatttgtctaatatgatgctcttactaaatcccacctttaacagaatggaatttagtcagaagatcatattagacaaatttaaaattttacctaatgcaaagcactataatgcccagtatctctaaaatacaaatatttgaaccttattagagttccttsaggtaaataaggatggtatcattatcatttttttgtggctataaaacaaaaactcagtaatattgttatttgtttcatatcctacatgtagtaaaaaattaaagaaagtctttcagctctagatttggtgtctttttattgtgtcatgtttcctctatgcaaattgctattcttcaaataaatcttcatcatgtagtgatgaaactcttaatcacagtcaactcatgaatgggacaacaaaagagtttgaatacttggtcatcctttacttttattttttaaatggcatggactagatacgcaagttccatgagatgtaataatactttaaaaatagatctacattttaaaaatccaca

SEQ ID NO: 724658 - DNA, 1470 bp, Homo sapiens
tagtcaacagatggcatcattcattctacaaatatttattgaaggcctcctttgtgctggactgggccaggcactgggtatgaagtaatctagataatctctatattgttgtgatttaattgtatctgcaggataattagcttctttgaaagtaataatagtaccaagcacatacacaggaagattgaattagatgatgcattaaatgtgcctagtgctgcctggcactagtgtctggcatctagtaaaatactagcatatatgtacttgctttattccaagctccatcaatagatctaaagggatcagaggcatgtgactctaaggcttgatcaaacaagtagtgcagcaataaactgcaaatgagaaattattctatgcaaatcataaaaaacaggggttatctagacacgcaactaaatttaaagcatagtgtttgtgccaagtaacctctgcaaagccaataaataccctcttttccctttgaacaagattttaggctctttgattaatcaacagtacaaataaataaaatccatattgtcagatgatttgttcctaaaaatgaattttaaaaatagctctaaatatttgggatgtcaaaggttgttgtgaacaactgaaaacactggaaccaactgtttttccctatatcatggcaggcatttttcttttagttattcagggaaggggcattaagtattcctcatcttggggagtaggtcatgttaagaaggctatatggctttcttaaagaaaatagtttttaaaaagatgatgccaagaagtcagagttttgttttttcatctcaaaagtttcttaacattctgaaaataactgtttggggaaaatgatataaatcaagaaacacctctgtacaaagtctccataaactagttctaatagctccattaattgttcagctctggagaggggaaatctctcgatgagatttgtctaatatgatgctcttactaaatcccacctttaacagaatggaatttagtcagaagatcatattagacaaatttaaaattttacctaatgcaaagcactataatgcccagtatctctaaaatacaaatatttgaaccttattagagttccttgaggtaaataaggatggtatcattatcatttttttgtggctataaaacaaaaactcagtaatattgttatttgtttcatatcctacatgtagtaaaaaattaaagaaagtctttcagctctagatttggtgtctttttattgtgtcatgtttcctctatgcaaattgctattcttcaaataaatcttcatcatgtagtgatgaaactcttaatcacagtcaactcatgaatgggacaacaaaagagtttgaatacttggtcaycctttacttttattttttaaatggcatggactagatacgcaagttccatgagatgtaataatactttaaaaatagatctacattttaaaaatccaca

SEQ ID NO: 724659 - DNA, 1190 bp, Homo sapiens
aatactctgattgctgcatctgtgacgatggaaagactaatgtttcccaaggcctagccaaaactgcaaattcatgtaatctcttaatgcttacatccttcactttcatctacactcccaaagcatggtggtgtgcccaacatttgttttttcaaaaagaatgacaaactgtttagccacagtagaaaaaccatgacaaataatactgccactaccattttataattttacaattaaatacataaataagtaaagtcatccctatgatgctgggttacatcaggctctaggcagccttgttccaatctcttcttgcagcattgttaaaattttccccgaaagctgttcccagcagtgacataaacatagacgtactcatttggtccctcaggtacttggagtttcaggaggaattgtaggaagtgatttccatgacttttctgaacatttttgaaatcacttggttgcagactccttcctatattgttatgacctttcaagggtgtaatcacctttcrcacctcacctctcagcagcatgaccctgagctgcaatgacagtcacagaatatgttgggaacccctgagcaagccacgcttcttctcatctccatgcttttgcatgcacagatccctcagcctgggggcttgcatttctggcaaacttcagtgactctccaagtcatgggtactctgggaagactctcgtcaatattgtcccactcccaagattaacttaacaattattttttgttttgtttttttgttttttttctgtttctcctagaagactatggactcattcaggacagcttatttcttgattatttttggttctccagtaaatgttaaacagatgaaggcattcaagctactcctcttataaacaaagaaactgagatcaggagagttaaataatgtgtctaggggcattaaaactagcagagacatcaggacagtttccattcgtcagtgaaaatacctttttttgatattttaatgtggatataatttccagaaatgatattatgtacaaaatatgaaaagaactctgtagttcttcataattaccctccatccttgtcaccctttaccttcccctaattgctttcatagagctcctttttggaagaatgagaagagaatgttatagaagataaaaatcacttgagaaaaaaaagtcatgttaag

SEQ ID NO: 724660 - DNA, 1264 bp, Homo sapiens
cactcttccactttgcataaaagatgaaaacagatctctgtcgtccaccacttccttccttcaagaaartgggggaaccaccttcaagaaaaaatccagtgcattcgaagttggccaaaaaaaattgtgtgtgtgtgtatgtgtgtgtgtttggtttcttgtttttgtttgtatgattcttgaatacatgtcccccctcatgagcttacacataaattataaactaatagaaagcagatatgacagtagttttgcattataagtgctcagaggtttacaaaacctaataatgatgactgttttactaatgatggttctgcgcctgtgaatacactgtggcacatgtggtcaaatataccaagagtcttttccaagggaaaatagaaatgttttcttttgtggtcattgcttagatgacagacaatttttgtcccctctgcggagaaatacaatgtttactatcaggagtgaacaaattatctatggagaaaagcaatgcgtccttagcatgtcatagagaaccactgggttttcccaggaatagtcatgcaatggaaattggtaactatgacattttcacagaaattttaaatatcaatattttgatctagtttgatactaaggtttctgaactctatcatcagggcatagtaagaaataaagtgtgaaacatttaagtgtttatatcaggtaagttaaggtgcagtgaagaagaacaaaacaagatgaatttgtgacctggttttaccacacatagtaggtgtgtgaccttgggtaagtcacttctttctcagtcttatgctccttacctctatgatgggagagtgaaaccacatgatctctgtggtttagacagctctaaatattaaaaaacatgacctaagcaatgtttttaatgtctctatacgtctcaacactgtcttgatgtatttcattattcatcaaggaaatatatttttcctttatctgtcttactgagtgatgggaagattttaacttactctacaaaggtgtaatacatattgttataaaaacagaaggacagggctctgatatctgaaatatttcatataaaagggtcattatcatcatcacagacaggagatgtgagagtgctgccatgagaacaggaagaaactcagcacatgtgggtgctgaatggtgggagacatgtgagcactgagactggagacagtccacatccagagacggcagcaaatgtgttgggactgggctttgtgatgagaacaaaacagatcaaaga

SEQ ID NO: 724661 - DNA, 1264 bp, Homo sapiens
cactcttccactttgcataaaagatgaaaacagatctctgtcgtccaccacttccttccttcaagaaagtgggggaaccaccttcaagaaaaaatccagtgcattcgaagttggccaaaaaaaattgtgtgtgtgtgtatgtgtgtgtgtttggtttcttgtttttgtttgtatgattcttgaatacatgtcccccctcatgagcttacacataaattataaactaatagaaagcagatatgacagtagttttgcattataagtgctcagaggtttacaaaacctaataatgatgactgttttactartgatggttctgcgcctgtgaatacactgtggcacatgtggtcaaatataccaagagtcttttccaagggaaaatagaaatgttttcttttgtggtcattgcttagatgacagacaatttttgtcccctctgcggagaaatacaatgtttactatcaggagtgaacaaattatctatggagaaaagcaatgcgtccttagcatgtcatagagaaccactgggttttcccaggaatagtcatgcaatggaaattggtaactatgacattttcacagaaattttaaatatcaatattttgatctagtttgatactaaggtttctgaactctatcatcagggcatagtaagaaataaagtgtgaaacatttaagtgtttatatcaggtaagttaaggtgcagtgaagaagaacaaaacaagatgaatttgtgacctggttttaccacacatagtaggtgtgtgaccttgggtaagtcacttctttctcagtcttatgctccttacctctatgatgggagagtgaaaccacatgatctctgtggtttagacagctctaaatattaaaaaacatgacctaagcaatgtttttaatgtctctatacgtctcaacactgtcttgatgtatttcattattcatcaaggaaatatatttttcctttatctgtcttactgagtgatgggaagattttaacttactctacaaaggtgtaatacatattgttataaaaacagaaggacagggctctgatatctgaaatatttcatataaaagggtcattatcatcatcacagacaggagatgtgagagtgctgccatgagaacaggaagaaactcagcacatgtgggtgctgaatggtgggagacatgtgagcactgagactggagacagtccacatccagagacggcagcaaatgtgttgggactgggctttgtgatgagaacaaaacagatcaaaga

SEQ ID NO: 724662 - DNA, 1264 bp, Homo sapiens
cactcttccactttgcataaaagatgaaaacagatctctgtcgtccaccacttccttccttcaagaaagtgggggaaccaccttcaagaaaaaatccagtgcattcgaagttggccaaaaaaaattgtgtgtgtgtgtatgtgtgtgtgtttggtttcttgtttttgtttgtatgattcttgaatacatgtcccccctcatgagcttacacataaattataaactaatagaaagcagatatgacagtagttttgcattataagtgctcagaggtttacaaaacctaataatgatgactgttttactaatgatggttctgcgcctgtgaatacactgtggcacatgtggtcaaatataccaagagtcttttccaagggaaaatagaaatgttttcttttgtggtcattgcttagatgacagacaatttttgtcccctctgcggagaaatacaatgtttactatcaggagtgaacaaattatctatggagaaaagcaatgcgtccttagcatgtcatagagaaccactgggttttcccaggaatagtcatgcaatggaaattggtaactatgacattttcacagaaattttaaatatcaatattttgatctagtttgatactaaggtttctgaactctatcatcagggcatagtaagaaataaagtgtgaaacatttaagtgtttatatcaggtaagttaaggtgcagtgaagaagaacaaaacaagatgaatttgtgacctggttttaccacacatagtaggtgtgtgaccttgggtaagtcacttctttctcagtcttatgctccttacctctatgatgggagagtgaaaccacatgatctctgtggtttagacagctctaaatattaaaaaacatgacctaagcaatgtttttaatgtctctatacgtctcaacactgtcttgatgtatttcattattcatcaaggaaatatatttttcctttatctgtcttactgagtgatgggaagattttaacttactctacaaaggtgtaatacatattgttataaaaacagaaggacagggctctgatatctgaaatatttcatataaaaggstcattatcatcatcacagacaggagatgtgagagtgctgccatgagaacaggaagaaactcagcacatgtgggtgctgaatggtgggagacatgtgagcactgagactggagacagtccacatccagagacggcagcaaatgtgttgggactgggctttgtgatgagaacaaaacagatcaaaga

SEQ ID NO: 724663 - DNA, 1264 bp, Homo sapiens
cactcttccactttgcataaaagatgaaaacagatctctgtcgtccaccacttccttccttcaagaaagtgggggaaccaccttcaagaaaaaatccagtgcattcgaagttggccaaaaaaaattgtgtgtgtgtgtatgtgtgtgtgtttggtttcttgtttttgtttgtatgattcttgaatacatgtcccccctcatgagcttacacataaattataaactaatagaaagcagatatgacagtagttttgcattataagtgctcagaggtttacaaaacctaataatgatgactgttttactaatgatggttctgcgcctgtgaatacactgtggcacatgtggtcaaatataccaagagtcttttccaagggaaaatagaaatgttttcttttgtggtcattgcttagatgacagacaatttttgtcccctctgcggagaaatacaatgtttactatcaggagtgaacaaattatctatggagaaaagcaatgcgtccttagcatgtcatagagaaccactgggttttcccaggaatagtcatgcaatggaaattggtaactatgacattttcacagaaattttaaatatcaatattttgatctagtttgatactaaggtttctgaactctatcatcagggcatagtaagaaataaagtgtgaaacatttaagtgtttatatcaggtaagttaaggtgcagtgaagaagaacaaaacaagatgaatttgtgacctggttttaccacacatagtaggtgtgtgaccttgggtaagtcacttctttctcagtcttatgctccttacctctatgatgggagagtgaaaccacatgatctctgtggtttagacagctctaaatattaaaaaacatgacctaagcaatgtttttaatgtctctatacgtctcaacactgtcttgatgtatttcattattcatcaaggaaatatatttttcctttatctgtcttactgagtgatgggaagattttaacttactctacaaaggtgtaatacatattgttataaaaacagaaggacagggctctgatatctgaaatatttcatataaaagggtcrttatcatcatcacagacaggagatgtgagagtgctgccatgagaacaggaagaaactcagcacatgtgggtgctgaatggtgggagacatgtgagcactgagactggagacagtccacatccagagacggcagcaaatgtgttgggactgggctttgtgatgagaacaaaacagatcaaaga

SEQ ID NO: 724664 - DNA, 1264 bp, Homo sapiens
cactcttccactttgcataaaagatgaaaacagatctctgtcgtccaccacttccttccttcaagaaagtgggggaaccaccttcaagaaaaaatccagtgcattcgaagttggccaaaaaaaattgtgtgtgtgtgtatgtgtgtgtgtttggtttcttgtttttgtttgtatgattcttgaatacatgtcccccctcatgagcttacacataaattataaactaatagaaagcagatatgacagtagttttgcattataagtgctcagaggtttacaaaacctaataatgatgactgttttactaatgatggttctgcgcctgtgaatacactgtggcacatgtggtcaaatataccaagagtcttttccaagggaaaatagaaatgttttcttttgtggtcattgcttagatgacagacaatttttgtcccctctgcggagaaatacaatgtttactatcaggagtgaacaaattatctatggagaaaagcaatgcgtccttagcatgtcatagagaaccactgggttttcccaggaatagtcatgcaatggaaattggtaactatgacattttcacagaaattttaaatatcaatattttgatctagtttgatactaaggtttctgaactctatcatcagggcatagtaagaaataaagtgtgaaacatttaagtgtttatatcaggtaagttaaggtgcagtgaagaagaacaaaacaagatgaatttgtgacctggttttaccacacatagtaggtgtgtgaccttgggtaagtcacttctttctcagtcttatgctccttacctctatgatgggagagtgaaaccacatgatctctgtggtttagacagctctaaatattaaaaaacatgacctaagcaatgtttttaatgtctctatacgtctcaacactgtcttgatgtatttcattattcatcaaggaaatatatttttcctttatctgtcttactgagtgatgggaagattttaacttactctacaaaggtgtaatacatattgttataaaaacagaaggacagggctctgatatctgaaatatttcatataaaagggtcattatcatcatcacagacaggagatgtgagagtgctgccatgagaacaggaagaaactcagcacatgtgggtgctgaatggygggagacatgtgagcactgagactggagacagtccacatccagagacggcagcaaatgtgttgggactgggctttgtgatgagaacaaaacagatcaaaga

SEQ ID NO: 724665 - DNA, 653 bp, Homo sapiens
gcaaagaagtggaatgactggagctccagcagccatcttgtgcctatgaggtgagttctggagaacaaaatcccacagccgaaggtggtggagcagaatgatatagggtacctggttcctgctgacaatgtggagccctcctatgctccctggtcatctctcctcagaccatgccatgtgaaagaaagtcatcccataatgtgattaagccatgcttactttgggtctctgcttatagcagacaaaagccatttctagataattcaggagactaggcaatacagactagcctgcttgcaagacargctttcttagtcaagcctaggtcttcacataggactcttattcaaggaattagactgagaaaaaaggcaaagaggaatctacatgaaagagtgtattgtggtgaaagttaaacagtcaaaaataaacagtagtgtcgttaacaaaatgcccttctcagtgtgctcaaacacttcagagtcctgttttctcagaatcaggggattgaaaatgaccttaaatatcatttaatttgtttagccccactccccttttttcttttctcttttccccttttctcacccacagaaagtcagtgtccttctgtttgtgcctgctggccttttgctgccaatatctgagcaaagttg

SEQ ID NO: 724666 - DNA, 653 bp, Homo sapiens
gcaaagaagtggaatgactggagctccagcagccatcttgtgcctatgaggtgagttctggagaacaaaatcccacagccgaaggtggtggagcagaatgatatagggtacctggttcctgctgacaatgtggagccctcctatgctccctggtcatctctcctcagaccatgccatgtgaaagaaagtcatcccataatgtgattaagccatgcttactttgggtctctgcttatagcagacaaaagccatttctagataattcaggagactaggcaatacagactagcctgcttgcaagacaagctttcttagtcaagcctaggtcttcacataggactcttattcaaggaattagactgagaaaaaaggcaaagaggaatctacatgaaagagtgtattgtggtgaaagttaaacagtcaaaaataaacagtagkgtcgttaacaaaatgcccttctcagtgtgctcaaacacttcagagtcctgttttctcagaatcaggggattgaaaatgaccttaaatatcatttaatttgtttagccccactccccttttttcttttctcttttccccttttctcacccacagaaagtcagtgtccttctgtttgtgcctgctggccttttgctgccaatatctgagcaaagttg

SEQ ID NO: 724667 - DNA, 653 bp, Homo sapiens
gcaaagaagtggaatgactggagctccagcagccatcttgtgcctatgaggtgagttctggagaacaaaatcccacagccgaaggtggtggagcagaatgatatagggtacctggttcctgctgacaatgtggagccctcctatgctccctggtcatctctcctcagaccatgccatgtgaaagaaagtcatcccataatgtgattaagccatgcttactttgggtctctgcttatagcagacaaaagccatttctagataattcaggagactaggcaatacagactagcctgcttgcaagacaagctttcttagtcaagcctaggtcttcacataggactcttattcaaggaattagactgagaaaaaaggcaaagaggaatctacatgaaagagtgtattgtggtgaaagttaaacagtcaaaaataaacagtagtgtcgttaacaaaatgcccttctcagtgtgctcaaacacttcagagtcctgttttctcagaatcaggggattgaaaatgaccttaaatatmatttaatttgtttagccccactccccttttttcttttctcttttccccttttctcacccacagaaagtcagtgtccttctgtttgtgcctgctggccttttgctgccaatatctgagcaaagttg

SEQ ID NO: 724668 - DNA, 642 bp, Homo sapiens
ttcttaatgacttttttttgttgtttttctaaaaagttttatttttggagacagtctctcgctctgtcaccaggctggagtgcagtggtgtgaacccagctcactgcatcctcttgggctcaagtaatcctcctgtcttggcctactgaggagtttgaactacaggcatgcaccaccaagcccacttaattttgtagagatggggtttcactatgttgcctaggctagtctcaaacttctgggctcaggcaatcctcccacctcagcctcccgagtagccaggattataggcgcccgcaaccatgcccagctaatttttgtatttttagtagagacaaggtttcaccatgttggccaggctgayctcgaactcctgacctcaggtgatccacccgcctcggctttccaaagtgctgggattacaggcgtgagccaccatgcccagcccaaccttgctttatttttgacttcactttatggtggcccgtctcgcaggtgagccaggtcattctgcctttgctgatgtagcttaatgacttttgccagtgaggacataaatggaaatgtacagacctatcttttttaaagcacggatttagttagtttctcccttaaaccaaagaacacctaacaattaccctt

SEQ ID NO: 724669 - DNA, 666 bp, Homo sapiens
ttgagacaaagaatcttgttctgtcacccaggctggaagtgcagtggcacaaccgcarctcactgcagccttgaccccctggctcaatcgatcctcccacctcgccctccagagtagccgggactacgggtgcctgccaccaagcctggtgaaaaaaaaacccgtgtttcatattgtcatatagaagaggctatactataaacagtgggatgttggaatatatatttatatatataaatatatattatatatatatatatatatattttttttttttgtagggacgggtctcactatgttgcccaggcgggtcttgaactcctgggctcatgtgatccccctgcctcagcctcccaaagtgttgggtttacaggtatgatgagccacaacgcctggctgacacactttttttttttttaaatgcaatttctgtttagaccttgacacctgttgatattactagtcactatggaaagaagtaaaaacagttgcttaagatgctctaacacttttttcccctgtagaagccaacatggaatacaacatgaaaactgtctaaatgggaaccttctaatatagctcattgtatgccatgcatttccactccatttccactatgttggaactgacttctgctttcctacttagccattaggcgacttagtt

SEQ ID NO: 724670 - DNA, 1209 bp, Homo sapiens
tatatttcattttattccattgtaatgactatattataaattttttatccctttatatctttctgcgctgagttttcaggtattatatccagaaatattgttacttggccgggcgtggtggctcacacctgtaatcccagcatttgggaggctgaggtgggcagatcacttgaggccaagagttcgagaccagcaagatcaacatggcagaaccccatctctactaaaaatagaaaaattagcygggtgtggtgctgagcacctgtaatttagcaactcgggaggctgaggcaggagaatcacctgaactcgggaggcagaggttgcagtgagccgagatcgtgccattgcactccagcctgagtgacagagtgagtttctgtatcaaaaaaaaaagaaaaaagaaaaaagaaaagaaaagaaaaagaaaagaactattgttattttttggaagacattttggttttactaaataaacattttttgagcctctaccaagtacctgtggattctaaggtgaataagatgcatttttgttttgtggagcaggtggaagaatggagaatgagttttttgttgttgttgtttgtttttacaaaggccccagagagggtaagttttgttgggttgtgaaaactctttgaaacataagcacattaataattatggaatcatttcacacatctgttttttacttcttttcacacttcatcatgtgtgttcaactttattgattataatatttagatatataatttccaaattaaaattttaagatgggataatatagtaattaagaatataagctttagacccagaataacattgatttaattattgtgttcacttcttctttagaattgtagacaattgttttgtctttccagaacagcaatccctatttttcagtgaaatgcttcttcaaactgcgtgattctcatggaagctgccacagctagtatcaaactgaatggtgaaaaactgaaagcctcttttctaagatctggaacatggcaaggatgcccactttcatcactgttattcaacatagtactggaagtcctaactagagcaatcagacaacagaaagaaataaaggcatccaaattggaatagaagaaatcaaactgtccttgtttgccaatgatatgatcttatatttggaaaaactgaaagagtccaccaaaaaactactataaacaaatacac

SEQ ID NO: 724671 - DNA, 659 bp, Homo sapiens
atacaaagtgactcagatgtcactttctcagccctttcctgactatcacagctaatgtagtatcccatctccctgagtcacttttctcacaataccctattatagcttcataatgttgatcagcacctgaagttctaattcatttttttctgtatgtttattggctgtcatccctcattagaacgtcaactcctggggggcacaattgctgtctgtcttatttacagctcattctccagtaccttraacatcacagacaacaaaatcaacacacaatagatgtttatttaaattggctatttctttcttctggaaggaggttaaaggaaggtgggaaaggcagggcgtggtggctcacgcctgtaatcccagcactttgggaggccaaggcagaaggatcacttcaggtcaggagttccaaaccagcctggccaacatggtcaaactccatctctactaaaaatacaaaaattagccaggcgtggtggcatacacctgtaatcccagctactcaggaggctgaggcaggagaattgcttgaacccgggaggcggaggttgcagtgagctgagatcgcaccactgcactccaacctgggcgttagagcgagacatcgtctaaaaaaaaaaaaagggtgggaaaaagaaggaagaccccct

SEQ ID NO: 724672 - DNA, 659 bp, Homo sapiens
atacaaagtgactcagatgtcactttctcagccctttcctgactatcacagctaatgtagtatcccatctccctgagtcacttttctcacaataccctattatagcttcataatgttgatcagcacctgaagttctaattcatttttttctgtatgtttattggctgtcatccctcattagaacgtcaactcctggggggcacaattgctgtctgtcttatttacagctcattctccagtaccttgaacatcacagacaacaaaatcaacacacaatagatgtttatttaaattgkctatttctttcttctggaaggaggttaaaggaaggtgggaaaggcagggcgtggtggctcacgcctgtaatcccagcactttgggaggccaaggcagaaggatcacttcaggtcaggagttccaaaccagcctggccaacatggtcaaactccatctctactaaaaatacaaaaattagccaggcgtggtggcatacacctgtaatcccagctactcaggaggctgaggcaggagaattgcttgaacccgggaggcggaggttgcagtgagctgagatcgcaccactgcactccaacctgggcgttagagcgagacatcgtctaaaaaaaaaaaaagggtgggaaaaagaaggaagaccccct

SEQ ID NO: 724673 - DNA, 699 bp, Homo sapiens
tgggatggctgggtcaaatggtatttctagttctagatccctgaggaatcgcctagagcacataactcatggaaaagaattaagcactgttagactaaagatagtaaataagataggggagcatgggggaaaggatggttgtgtgtttgcagatttttaggtaactgcagagaaaattaagcatatgtgtttgatattcaacatgctacaggataagattagctgataaaatctaattggttacaaagtgttttacaatataaagtaacaaattaagtggtttccttaaaaaaagaaaatctgaacagtacattgtgrctgatcaattcctaaagcttagaagtgttggccaggcacagtggctcacacctgtggtcccgacactttgggaggctgaggccagaggatcagttgagccccagagagcaagaccagcctgggaaacacagcaaggtcctatgtctacaaaaaaaattaaaagtaaaaaaaattagccggctgtggtggcacataccagtggtcccagctactcaagaggctgaagcagaaggattactcgaacccaggaggttgaggctccagtgagccatgatcatgacactgcactccagcctgggcaacagagcaagactgtctcaaaatgaaacgtaggttaaaaaaagaaagagagagagagagattatttttaagtaaaactaa

SEQ ID NO: 724674 - DNA, 2249 bp, Homo sapiens
gtaagctccatgagagctgggtttcatcttgttctccgcagtgtctcccatgccggaagcacgccttggcacagtatttgctgagtgaatgaagacagtgagtaaactaatgagaaatctaaatgtcaaatatacaaacatcaacacaaaaacacaaaaaccagtaggaaagaaaatgagctatgagaatgataaaacaagtttgataatytaatattactgaaataaaaggtaaaatttcaaagggcaagacagataaaactctctataaattccaaagctctagcataacaataacaatagttttcacagttacgctatataaagagtcagaactcagagtgcagaagaagaatcttagacatactcgaagtgcaggcaggaggagatagttaggaaaatgcgcaaagacactgcgatgggatatcattcttaaggcgcagtcagggcagcctcaggggcgagtagcaaagccagagaaatgagagaaagatttaaagtcataggaagcaggaaatttaagttcaaacataaagttaatttatcaacattcaaagatacaaacagatacccaaagaattgtccacatttatttgtgagtggtaaatcatagcctttcttaaaggaaacagaaaattagaattagtcctttaaatgggctgaaagggaccagatatagatgctgaaagttcacgtgtcaattctgtagtctacaaaatggaatgtaaatcccatgtgcttttaaagctgcatcagggaaggcctgagttcactgtgctagacctcacagcaaataaaacaaatgacaacaatcattccaggatcactgaagcccttttacccctccaaactcattataactaaatgttaattttataactatgtgaaactgaacagagatgaaagagggcatgctaaccaagtaggataagataaatgccactattcacatataatatattgactagtcataataatgacaaactatcacttatattagatgattacaagagaaaatacagtgtgtctgattagtggagtggttgtcatgtgttggtaactacagtgctcacaattttacatatttaaaatgaccaccaaaactgaatccttgaggtcagaaatgtcacacattgtgactctttttccaagaagcacagcaagtaacattccagctcctgaagccaggatctttgatgatcctgagacactgctgatcaggcactattctggaactctctgcaaggcccactcccctcttgcggggtttacagtgttccaattcctcgccttggtcctgagtctctcataatggactagctctcttcctcaaatggtagtctgggaggggtaaatttcaggttcagggagagaggcggctatagtcatcaggagtctagtgtgagtggtctgccaacactgacccactgcatctccctcatatttcctccccacatactgtactcttacttcaaaatattaatacaattaaagagcacacatttttaaaattctgaaatctactgaacgcaaaagctggggtaaatgaaaaagatcacaaacagcccctaccccactagactgtaaactctacagcagcagggcccttgactctgttcaccattaaatccccaagaatcatacagaggtaaaaatatatctgtaattttaaaacagaaagccacgtgaagagaaagttcatttatttataagaaattggcctggtgcggtggctcacacctgtaatcccagcactttgggaggccgaggcgggcggatcacgaggtcaggagatcaagaccatcctggctaacacggtgaaaccccatctctactaaaaatacaaaaaaattagctgggcatggtggcaggtgcctgtagtcccagctgcttgggaggctgaggcaggagaatggtgtgaacccgggaggcggcgcttgcagtgagctgagattgtgccactgcactccagcctgggtgacagagtgaggctccatctcaaaaaaaaaaaaaaaaaaaaaaaaaaaaagagaaagaaagaaaaaaagaaattagatgaaatatatatttatatatttaattatcctgtaaatgttaatagaactattatcttctaaagtgtaaatgaattaagggaaggtatttgaataacaattttagtaaggaaaaacatttcaaacacagcagaagagaagtccataacacattaatgagtaaggctgaacacattacaggcttttcagctgaaa

SEQ ID NO: 724675 - DNA, 2271 bp, Homo sapiens
aaatgctcaaagtagactaagggctctcacagggaatcagaacactgattacacatgacaaggtaacaatccccaaacgcaccctgctcccagtgactctgatgagaggcaaggctgcacacactgcttctgtctgtccgtccactctccacactgtgggggccatggctttccatctctcacccctactgcttagcacacaggagggctggaaaatatttgttgaaataatggtattgatttttgtcatgtgtttacattttagccacagaggcgaattggagctctcacaagtcagagtagaaagcatatgcagggctctgttctcacagcaccctccagctcttgctttttttctaaggactcagccactgctctggaagactgaccgtgctttaacaacctcaccaagtctgccagctcttctgacttactccaaaacgaagaacagctgccccagcaacattccttgagtttgagaatcttcatttctaaaatgttgagttctgcaccccgcaccctgacttcagttataactccgtggtcacaattctttgccacttccacaacctctgagaacctctggtgccattcctgaaagcctttcattctttttcaattaaaaaatatataattttaaaataaattctaatttgttctaattagttaaaattatttaaaacaaatattaaactaagtctcctgggtttttgttttttttttttttttagaaaatcttaatttaaaaatactttgtgaccccaattatcagaaattagccatattagatgccttttctctgtcattttacagtttatcagctgctgataaatacagaaaaatctgtcatgatttctgtataagaaaatggcaccagaagtaactatccgggtcttttctagagaaaaactcactgagattctttacagataaacagaaataacaaatcaacttacttaatggaatttattatagcaggaatacttaaccaaggattcacagggtccatggataaaactcaggagagcacacagatttggattaaaaaattttaaaatgcatgtctttattttcactaaattctatctgaaatttagagttcccttctattttgaatgtaagccacaatcctcagtagtaatagtacttgtgacctttccatcaatagggacaacagccatttcaacacgactatacagtcgccgcagatgcctggaggcatcacttctgcccatcactgcttaagttccaatgtttaccaggcccactgccaggtcttgtgctataatcacaaacctggtttttaagtatattaacagattaagagtcagtttccttggcaattctacacatttggttttatacctctaaaaacattattctgagaatatccatacacttcaccagattgctgaaggagtccatggcgtaagaaaggttaaaacgtcccctgtaaatcaagtggtagtgacaaaatttcagtattttagaatgtgcttaaagaaaaaaagtcactaaatctctcttaccacctatatccagccagataaataagctctcatcagccattttgaaatctgcacgtgtgtgacctaaaagcatcattgctacataaccaattgctcaatggtttgggtcattcaataggttcctgacctcaatgacaaagctccaaaagtacataaatacactaaggcattaacatgacactagagatgtacacacaatcaaaaattaaacaattacattagcttttgaatgcattttgtaatgtttataactttaatctgagttattttgatcatatatctaccaagatgagttaacatccccaagctctgttggcagagagtgatagcacaggagtgaataaagggactgattatatgaggggtatttagccaatggcctgtacccctggggattaaaaatcaggggattaaaaatatttgttggaagataatcaagagataaatagaagatttaatgtttgctgccagttaccacccagattatagtaatttggggacaaataatgaaaagtcacttcagctgcawataaagagactgaaacacagtaaacaacatacagtcttcattattataatattattataaagttttactttccttttatgaatactataattacatttaaaatggtcactactataacattaaagtaggaagagagcaataaccttggcatctaaatagctaataattctttagttaatagataaaatgacagaacaacaacaaaaaaaagag

SEQ ID NO: 724676 - DNA, 583 bp, Homo sapiens
tccgggatgagcacggaggggcctggggatccgagagcgctggcgtccgccgtcctggagctgcagcggcccgtacgtgattcgggactgaacacgtaagggagtggggcgcgccgctacaccgcaaagccccaaagtggagggtccgggagggcgcgcacagcctcgcccggcgccgtgcagggtggctcctgaggcagccaggcccaagcgtgacctgccccgcacgcgtcctcagggccgccccagcctccagcccctgggggccggcgttcctgggctccgcccccgtccccgcccctcgaccgccgctgctccgcggggactcggggagctcgaaggaactctgggaaagtttcccgctccgccccggcccgagcggaagcgcggatggggcgtggcccggtagctgtggccgcgcccccaccgattgcgcatttcgattggcgttagtggccgtccgtcagcacgccccctccggtctcgcgtcccgattggtcgcgggggccgtcagtccggctccggcggcgggcgcttcccggggctgcggcggggcggagctcgcggaggaagtcggmgggcg

SEQ ID NO: 724677 - DNA, 526 bp, Homo sapiens
tggcaatgcccacgacatgtttttgagcgtgtgtatacgtgtctgtgcatgtcatrtatgttacgtgtctgtgtatgccatgtatgttacgtgtctgtgtatgtcatgtatgttatgtgtgcatgtgtgtgtctctcaccaaaagggactccttgcttgctgtcaattgtctctgtgttgtttgacagcagcaggagtggtctcactccacaacacactgatcctttgctccctaaggctgttcagaatgcttgaagttagagacgccatcttaacacaatgacaaggaaacttctagaacagccctctctattgtgaagagtttggcaaaggagttgagtctgagtgccccagtgaggggggtgatcagtattccagctcaggataaaagagggtgtctaggtcaggtgtggtggctcacacctataattccagcacattgggaggctgaggcaggaggactgcttgagcccaggagtttaagaccagcctggacaacatggggaaaccccatcactaacaaaaa

SEQ ID NO: 724678 - DNA, 2096 bp, Homo sapiens
cttcccacaaaccatcttctcacactctacttattttatctctttttctgcctaaacagctggagtataaaccatttagtcttttcaaccctgtcagaaactagaacagaaatttgagctaatagttactacttagtccatctttccctgaacccaagatatttaagcctgaaacctaaaacttaagtgtaaaagttaatataaatactctttcttgcttagctgtctccagaacaaagattgtgtgtagcaggatggtttattctcagtgccatattgcctactctcgtggggtgagccgcgccgtactgccctatgtgctctggggttgaaccacagggtgcaggcagggtgggcggtcaccacttttgagtaaatgatattcaactctcagaggtgttaagtgcagtagaaccctgatgctcataatggaatatttattgagggcctaacacttgccaagcacctttctgggtactggggcataacagtgggcagggaaattcctgccctcatagagcccatccaggcgaggagatggacaagaaagtgaacgaataggattttgaggaagataatatcaaaacttaaaagagagaagctttgcaaataaatactctacatgacacatcacagggcaaaggtttcctgcataaaactgattagcttgcatgtgtatcccatttttcatgcctcctttgtcatttttcctccaggcctctcttaggtaggctgacttggccataggaatgtttccagaatttgaaatctgatgcatttttcccagaacagcttttcacctgggcttcaccgagtgcaacagcttaagcgtcagagcttagaactgaagccctttttctttcgttgcatctttagccactaaagcacatggatcgtctgtagactttttctgtaaagggccaggcagtaaagatttcggactctgcaagtcacatgatctctgttgcagctacccagccccactgctgtagtgcgagagcccctgttgacagtacattagtgaacaagtatggctgtgttccagtaaaattaattcacaaaaacggccattgtctggatgtggcccacgtgtagtttgctgacctctggtttaaagaaaagtgtgactttaaaaaatctctaaaccagtacccccaggagttaagcagaataaatcattatgtacaaatagtctctacctatacaaacatttttgtataaactttggtttataagtacttttttagaccctccagtatggttttctcatggaagtcgtgttacagaagtggttaggcctgtcacaaaaccacattgtcaattggtagaactgtgcagggtattacagagcagtgatatcatctcacaacatgggctacacaggactttttgtttttgcttatgaaaattttgagacattaaaaagtaaagaaagcaatacactgaacattcatatacaaatcatacctatatgtacacatctccaaaaaatatgtacttttttccccataactaccatgccattttcgtattttataaatgttatmatatgtggcctctactacccgatccataattatacttttatgattgtctcagaaatgcctttttacagttgatttgttcaagtcagagtccaaaccaacatttggttgcttgtctcttaagttaaatagagagctgtacgggactccctccctgcttttcccatgctcttgtctcattgcataaactgggtcattcgtcctacagagcgtccccattcttggtttgcttcccggtgtggttgtgtaacttgttctgccatcattacctgtcctggctttccagtaactggaagttagccgtagaggcttgattcgattcaagcctgagtcttggcaggcgtgccccatgggaggccggagagggcttcgtgctttgcctcgtcacatgaggaggctcacagcctccttaggagtaggttagtttttccccgttagtgatgctgattgctcatcttttgaagaggcacagctaggaaatgtgtatttttgaaaagaaagaaaaaaaaacagtggttcatactgataatcccaatcccagtttttaaactt

SEQ ID NO: 724679 - DNA, 2096 bp, Homo sapiens
cttcccacaaaccatcttctcacactctacttattttatctctttttctgcctaaacagctggagtataaaccatttagtcttttcaaccctgtcagaaactagaacagaaatttgagctaatagttactacttagtccatctttccctgaacccaagatatttaagcctgaaacctaaaacttaagtgtaaaagttaatataaatactctttcttgcttagctgtctccagaacaaagattgtgtgtagcaggatggtttattctcagtgccatattgcctactctcgtggggtgagccgcgccgtactgccctatgtgctctggggttgaaccacagggtgcaggcagggtgggcggtcaccacttttgagtaaatgatattcaactctcagaggtgttaagtgcagtagaaccctgatgctcataatggaatatttattgagggcctaacacttgccaagcacctttctgggtactggggcataacagtgggcagggaaattcctgccctcatagagcccatccaggcgaggagatggacaagaaagtgaacgaataggattttgaggaagataatatcaaaacttaaaagagagaagctttgcaaataaatactctacatgacacatcacagggcaaaggtttcctgcataaaactgattagcttgcatgtgtatcccatttttcatgcctcctttgtcatttttcctccaggcctctcttaggtaggctgacttggccataggaatgtttccagaatttgaaatctgatgcatttttcccagaacagcttttcacctgggcttcaccgagtgcaacagcttaagcgtcagagcttagaactgaagccctttttctttcgttgcatctttagccactaaagcacatggatcgtctgtagactttttctgtaaagggccaggcagtaaagatttcggactctgcaagtcacatgatctctgttgcagctacccagccccactgctgtagtgcgagagcccctgttgacagtacattagtgaacaagtatggctgtgttccagtaaaattaattcacaaaaacggccattgtctggatgtggcccacgtgtagtttgctgacctctggtttaaagaaaagtgtgactttaaaaaatctctaaaccagtacccccaggagttaagcagaataaatcattatgtacaaatagtctctacctatacaaacatttttgtataaactttggtttataagtacttttttagaccctccagtatggttttctcatggaagtcgtgttacagaagtggttaggcctgtcacaaaaccacattgtcaattggtagaactgtgcagggtattacagagcagtgatatcatctcacaacatgggctacacaggactttttgtttttgcttatgaaaattttgagacattaaaaagtaaagaaagcaatacactgaacattcatatacaaatcatacctatatgtacacatctccaaaaaatatgtacttttttccccataactaccatgccattttcgtattttataaatgttatcatatgtggcctctactacccgatccataattatacttttatgattgtctcagaaatgcctttttacagttgatttgttcaagtcagagtccaaaccaacatttggttgcttgtctcttaagttaaatagagagctgtacgggactccctccctgcttttcccatgctcttgtctcattgcataaactgggtcattcgtcctacagagcgtccccattcttggtttgcttcccggtgtggttgtgtaacttgttctgccatcattacctgtcctggctttccagtaactggaagttagccgtagaggcttgattcgattcaagcctgagtcttggcaggcgtgccccatgggaggccggagagggcttcgtgctttgcctcgtcacatgaggaggctcacagcctccttaggagyaggttagtttttccccgttagtgatgctgattgctcatcttttgaagaggcacagctaggaaatgtgtatttttgaaaagaaagaaaaaaaaacagtggttcatactgataatcccaatcccagtttttaaactt

SEQ ID NO: 724680 - DNA, 2096 bp, Homo sapiens
cttcccacaaaccatcttctcacactctacttattttatctctttttctgcctaaacagctggagtataaaccatttagtcttttcaaccctgtcagaaactagaacagaaatttgagctaatagttactacttagtccatctttccctgaacccaagatatttaagcctgaaacctaaaacttaagtgtaaaagttaatataaatactctttcttgcttagctgtctccagaacaaagattgtgtgtagcaggatggtttattctcagtgccatattgcctactctcgtggggtgagccgcgccgtactgccctatgtgctctggggttgaaccacagggtgcaggcagggtgggcggtcaccacttttgagtaaatgatattcaactctcagaggtgttaagtgcagtagaaccctgatgctcataatggaatatttattgagggcctaacacttgccaagcacctttctgggtactggggcataacagtgggcagggaaattcctgccctcatagagcccatccaggcgaggagatggacaagaaagtgaacgaataggattttgaggaagataatatcaaaacttaaaagagagaagctttgcaaataaatactctacatgacacatcacagggcaaaggtttcctgcataaaactgattagcttgcatgtgtatcccatttttcatgcctcctttgtcatttttcctccaggcctctcttaggtaggctgacttggccataggaatgtttccagaatttgaaatctgatgcatttttcccagaacagcttttcacctgggcttcaccgagtgcaacagcttaagcgtcagagcttagaactgaagccctttttctttcgttgcatctttagccactaaagcacatggatcgtctgtagactttttctgtaaagggccaggcagtaaagatttcggactctgcaagtcacatgatctctgttgcagctacccagccccactgctgtagtgcgagagcccctgttgacagtacattagtgaacaagtatggctgtgttccagtaaaattaattcacaaaaacggccattgtctggatgtggcccacgtgtagtttgctgacctctggtttaaagaaaagtgtgactttaaaaaatctctaaaccagtacccccaggagttaagcagaataaatcattatgtacaaatagtctctacctatacaaacatttttgtataaactttggtttataagtacttttttagaccctccagtatggttttctcatggaagtcgtgttacagaagtggttaggcctgtcacaaaaccacattgtcaattggtagaactgtgcagggtattacagagcagtgatatcatctcacaacatgggctacacaggactttttgtttttgcttatgaaaattttgagacattaaaaagtaaagaaagcaatacactgaacattcatatacaaatcatacctatatgtacacatctccaaaaaatatgtacttttttccccataactaccatgccattttcgtattttataaatgttatcatatgtggcctctactacccgatccataattatacttttatgattgtctcagaaatgcctttttacagttgatttgttcaagtcagagtccaaaccaacatttggttgcttgtctcttaagttaaatagagagctgtacgggactccctccctgcttttcccatgctcttgtctcattgcataaactgggtcattcgtcctacagagcgtccccattcttggtttgcttcccggtgtggttgtgtaacttgttctgccatcattacctgtcctggctttccagtaactggaagttagccgtagaggcttgattcgattcaagcctgagtcttggcaggcgtgccccatgggaggccggagagggcttcgtgctttgcctcgtcacatgaggaggctcacagcctccttaggagtaggttagtttttccccgttagtgatgctgattgctcatcttttgaagaggcacagctaggaaatgtgtatttttgaaaagaaagaaaaaaaamcagtggttcatactgataatcccaatcccagtttttaaactt

SEQ ID NO: 724681 - DNA, 1176 bp, Homo sapiens
ctccaagggaaaatttttctcccccatcaatttctaacctttattgtttaaaaatatatgaatgaggccgggcatggtggcttgcgcctgtaatctcagcactttgggaggccgaggcggacagatcacgaggtcaggagattgagaccatcctggctaacagagtgaaacccagtctctactaaaaatacaaaaaattagacgggtgtagtggcgggcgcctgtagtcccagctactcgggaggctgaggcaggagaatggcgtgaaccggraggcggagcttgcagtgagctgagatcgtgccactgcactccggcctgggccacaaggcgagaccccatctcaaaaaaaaaaaaaaaaaaagtataaatgatagtttatttaagtgatagttggatacatctgagaaaagtggctttccttgaagattgacctcaaacacttccaaaattgagatggggtcgaggggctgggggttagctcagggctcccaaactgggagtgtgggataagagtgggcattaacttccaaagtcagaatgctaggggaatcaggaaagaaacaaacaaaatcttccaaataactaaattctggatctatcctagtaggaactcattgtgcttattaattattctgtataaagcaggcctggatttttcactagacaatacattgttttaggtatagtatcaacagtgaacagtacaattacaatgatgtcttttagaatagagtgttttaatatccaaatgttcttattgggagtctttctaaggtcatacaaatggatttacatgcttgattaggaacgattcttctggtactgcagctaagggatgtgggctgtgccgatccccctccccccaactgctgctgagataatgcaaacagcttggaggcatttctacccataaaaggaacaagaccgtgcgcatgagttacagtacatgaagcagagacctccagttctgagccctatttctggcactcatgtattcatattgcttatgcatgtgtgaaggaacaaataaagattaactacattcttagagatgcagtgttggggaaagaggatgtctttggttttatgattttgctgtgccttgtggctaattacaccttatgtcattctacactcctggcacatttaataaattaagtgatttattactca

SEQ ID NO: 724682 - DNA, 803 bp, Homo sapiens
gttttcagccaggcgcagtggcttacgcctgtaatcccagcactttgggcactttggaaggccgaggtaggtggataacctgaggtcaggagttcaaggccagcctggccaacatggtgaaactccgtctctactaaaaatacaaaaattagccaggcatggtggtgggcgcctgtagtcctggctactcgggaggctgaggcaggagaattgcttgaacctgggaggcggaggttgcaatgagccaagatcacaccactgcactccagcctgggtgacagagcaagacttcatttgaaaaaaagaaaagaaagggttttcttctttggtgtgtgtyagcagaacatgaagttcatcttctcctcattgaagttttatgaattattatcagccgtacctggtaacactggtttggcagaaagaaaactggcccggggtggggggcagaactagactcgactcttctagcctggttctgcctttaaccaagagtctcttatcggccggagcctggtttgttttcctgtaaaatggggtgggggtggaagaagcatcgacttaggggaatcaccaaggtgccttgagtttgttcattttataagggatattctgaaaggtatttttgcaccctttcctcagttacagagaacttctttccctggataccttttgaacttatgtgcacttattaattagtagcatcaagatgctttgtaactgtgcattggttctttcatctgagcatttacccgatgctttacccagtaggtataattaacttcattttataggtagagaaatgg

SEQ ID NO: 724683 - DNA, 1013 bp, Homo sapiens
ttttttagagatgagttttcactctgttgcccaggctggagtgcagtggtgcaatcatagctcattgcagcctttaactcccaggcttaagcgatcctcctgcctcggcctcctgagtagctgggactacaggcgtgcgccacggtgcctggctctcctcacattttacagatgaggaaggtgaggcataaatgatggggtgacttacttgaggtccacagcaagatgctgctcagggtagaagcccagttctttgatgtcccacttggaaagtcacttagtggcatgtcttcaatatttccgtgggctgtgttacggggaaggaagggaagggccatttgtccacatgtggaagaaagcattcaaagggagcagcaggtctctccccacgccttgcagagacggtcaggagagaccccaagcagagagcacgctgctcagggacagagctgggcttgtgaccatgtgtcgccctggcgctgtgctccttccaggtcctgccctggagggcagctgtattctcagagagccagcctttcctacagcccttttagtgaccaggggcatttcctaccctcacttgatctcaaagccacggtcggtaggaacaaaaaggtgggttttctagcaggctggaaatggccagcaggggagcaagccgcggctgcctgggagtgtygggtggtcaggtcaggctgtagatgtatcctgtagactcaaggccgcttctcaggagtccagagtcccataaaccaccatgagtgccctcctgggatcctggagatggagacaagagccctgaggatcattcataaccactgtcaggtaactgacacaacatgctgactcgagtatgaccatggtctggatgaggccctggtaaatatacatttattttctatctataggacactagtgaatatcccaacacatcttagtttcaccactgtgtatgtgctactatgaatggatggtcaatgtaactgatgtaaaaaaaacctacaacaaataaa

SEQ ID NO: 724684 - DNA, 1173 bp, Homo sapiens
tattctattacgatatgccataatatattttaaccaaatctccattgatgtcttagrccaatctcctacaaaggaaattgcttattggagtgtatgagaatttaaaatgttaatacatattgccatatgccctgtaacgtgatcgtacaaatacatacttttaataacagcataggagaatgcctttttccccataccttcaccttcactggctactgctattcatttttcaatcttttgtcagtctggtaggtgataaattaattcttttattttaaaccctttctttcataataatattttttatcatttgcattttttcttttacagactgagttttttaatatgttattttccacaaatacactgttgactttttttttttaatagtatgaagtattcagaacagaagaggaagaaaaaataaaatctcagggacaagatgttacatcatcagtatatttcatgaagcaaacaatcagcaatgcctgtggaacaattggactgattcatgctattgcaaacaataaagacaagatgcactttggtaaatgatttttcattactgcattttttcccccttaagatacaagttaattgcattgagcagtaggtggtgctctaattctttcttcaaactataaaataaagcattccctgcttccttgatgatgggaatgtatatactgttagaagaaatattaatccttctcattcttttatattgttgactaataggggttaaacaaatggacaaatattaataatgtaaggcttatcatttataacatgatccttacatttctaacctaccaatgaaagaatttaacctgaaaaatagtagcatacttctagtattttcatatattggtctctctgctgtatcaagcctttttaattttatcttctttcatattctcagaatctggatcaaccttgaaaaaattcctggaggaatctgtgtcaatgagccctgaagaacgagccagatacctggagaactatgatgtcggtaccttctttccgttttgatctcatgtgggcaaaagtttgtgggattgtagatgtgtttgggggttttgtcttgaaaccatagttttgagcaattatggattttattgtatccattaagaaaagccttttgtacttttcagataactttgaaatatccac

SEQ ID NO: 724685 - DNA, 1173 bp, Homo sapiens
tattctattacgatatgccataatatattttaaccaaatctccattgatgtcttagaccaatctcctacaaaggaaattgcttattggagtgtatgagaatttaaaatgttaatacatattgccatatgccctgtaacgtgatcgtacaaatacatacttttaataacagcataggagaatgcctttttccccrtaccttcaccttcactggctactgctattcatttttcaatcttttgtcagtctggtaggtgataaattaattcttttattttaaaccctttctttcataataatattttttatcatttgcattttttcttttacagactgagttttttaatatgttattttccacaaatacactgttgactttttttttttaatagtatgaagtattcagaacagaagaggaagaaaaaataaaatctcagggacaagatgttacatcatcagtatatttcatgaagcaaacaatcagcaatgcctgtggaacaattggactgattcatgctattgcaaacaataaagacaagatgcactttggtaaatgatttttcattactgcattttttcccccttaagatacaagttaattgcattgagcagtaggtggtgctctaattctttcttcaaactataaaataaagcattccctgcttccttgatgatgggaatgtatatactgttagaagaaatattaatccttctcattcttttatattgttgactaataggggttaaacaaatggacaaatattaataatgtaaggcttatcatttataacatgatccttacatttctaacctaccaatgaaagaatttaacctgaaaaatagtagcatacttctagtattttcatatattggtctctctgctgtatcaagcctttttaattttatcttctttcatattctcagaatctggatcaaccttgaaaaaattcctggaggaatctgtgtcaatgagccctgaagaacgagccagatacctggagaactatgatgtcggtaccttctttccgttttgatctcatgtgggcaaaagtttgtgggattgtagatgtgtttgggggttttgtcttgaaaccatagttttgagcaattatggattttattgtatccattaagaaaagccttttgtacttttcagataactttgaaatatccac

SEQ ID NO: 724686 - DNA, 1119 bp, Homo sapiens
ctataaaattgatttgacatagcgacagttttccttttaagacagtttactagaaaaatgttattttatgtttaagcaacttataattcaaaaatgtttgcataccatcttcgcattttagcaaagcaagaaagtaaaaaccattacagggaactgcttcaaatctctctggcaatcattacaaaattattgagtgggttatcatcaatatctggctgaacaacctttagttttaaaagatagtgtaatatttgggaggctgaggcaggcggataacctgagctcaggagttcaagatcagcctgaccaacatggagaaaccccatctctactaaaaatgcaaaattagcccggcgtggtggcacatgcctgtaatcccagctacttgggaggctgaggcaggagaatcgcttgaacacaggaggtggaggtttcagtgagccgagatcgtgccatggtactccagccggggcaacaggagtgatactccatctcaaaaaaaaaaaaaaaaaaaaaaaaaaaaaagagcgtaatagttrtaatgattgggctgagtgtcactagttttcagggttttgtaatgttcctgtgattttttaaagactttacaggagcctttgttttcttcaggcatatgtcagagtacccatgattagttacttggtattttggcttatacctgtactttttttttttttaagtttacctttcagtggactatttcatggcatgttggaggagatcacataatttactcagacagaataaacttcttgtaattttttcataattggtatacaatacttattatgacttcttcttattcttttccataagaccttctcgagttttaaaaaagccaaataaacaacaaaaaagagaagttcttttcagtaattctagataccgtgagttttggttctattacctctcatttgctgtctatatattaccttgtcacattaattttaagttgtataaagatagaagattttgaaagaacacagattgtgactgtaaatgtgatccataaaatttaggtggattttgtgtttggaatattagcaacagatcgcatactttattaaaaagaaatggccctatcaaaggggacaagga

SEQ ID NO: 724687 - DNA, 2908 bp, Homo sapiens
tcctgcctgggcctcccaaagcattgggattacaggcatgagccaccacatccagcagaaaacataaaattctgtgtgtggcccacgctgtacttctactggccagcactggtacagatcaacttgccttaacaactaaaagaagaggaacagagagataggggcctgggaatgggaaacgtggatcagttcaacacatacaagccacacactctgtgccctggagctgccctggggaaatcaagtcacgtatataaacaaacagttcataacaatttcaggcaattctggacagtgtggaaagtattggttttaaaagtaatactacaaaagcagagagcaaaatgcccaacaagacagtaacaatcctacccgtttctggttttgttctatttgttttattataaagctctttctaatgggaaataaatgcctctagaatgaggtatgtgatgctaagtttgagaaatcaaaaagtttgtgttcaggcaaaagatgggtgactttttaattctattttcctttattcctatattgtttttagtatcaaaggagggagggatcgtccttcaattgcctcaaaattgaaggcagccaagtagatcatttttattttctagcaacttaaaaagttgaaatgtcttactaagaaacccgagttcagaagcataaacgtgaagtatcagaactgtggttttctcctgctgtccccacgtagaggggctcttcacaggacagtaggcagccccttcaatcacttccaaatagcaaaagggacctcacgtgtgcaaaacttctttatgtactgtcaggtgggacgcagtctcaggaaagacccagaaatccccctcatgatcacagagtctcagccagctttgggaggtgtcagcctggacacctgaagatgaactgtcaaggcagcagcacgcctggtcctcctgggggtgtggaggacagcccagtgacaaatcaccctcaggtcacacagagcggcttcccagcacacatccactgcctccaaacgcctgcacttgtgccagatggcagtcaggaggggcttggttcccatggatactcctacaacaagttgggagggggcagggagggcaaaactgtcaccccactgagtcctcacccatagtgcattcaacaggtggggccactgggcagggacaaaagctccctacaggctggcacagatgaacccctaccaaggaggcttccagacatgacacacacagctaacacagggaacacacctgcgcccgctcccgctgagttgaccacaccaaagctgctgtcatttctcacacttgactttaaagccgaaaaccagatagatagttacacacatctggctaagaacgatcattctctggccaataattaagctgcataattaagaggaaacaggtatttcaccaccaccctgtatttatgtggcaaaagctacaaatgcactaagtcctgtgggctttccagtagtttccagattcagatccttcattcacattgatttctagaattcagaacaaagtctcctctaattcaactctgtctaccctgaggcctgcaagataayaggaacagacaggccaagaatcaagtaccaaactcatcaactaagtcccagcccaagtgcaggtctctccttccccagcccagaggggccctgggtagttacctctggagccgctgcacgagctgggccaccatggtgtcggagatgccagggcacgcctcctccgctaggtagatggcccctcgcagctcttcaatggaccccaagttccctccgcacgcctggctcttctccttcaactgaaaacacacgaacaggaagaatggcatgaagcacaccagctgcaaaactgggaagcatgctgttcaaggaacaacacggcgtgtggaccacgacactaccccagccccagggtgtccgggaaaagctttggctagggctccaggccacttcaaattgcttttttttttttttttttttgtgagacggagtctggctttgttgctcaggctggagtacagtggcgtgatctcagctcactgcaacctccgcctcctgggttccagcgattctcctgcctcagcctcccgagtagctgggattacaggcccctgcctccatgcccagctagtttttgtatttttaatagagacagggtttcaccatgttggccaggctggtcttgaactcctgacctcaagtgatccgcccgcctcggcctctcaaagtgttgggattacaggcgtgagccactgtgcccggcccgggttccttttgaagaaaggtgattcaaatgctctgagagcagttatgtatacacagggcaatcatcagaccataatcattactgttcgaggccagaacagagacgactagctctctgtgtgcctttcccaagtctcaccgtgatggactgtcctctctgtgctgttttcctatttcaaccataaccttgtaccagaaaagcaatttcaaagcctatcctaagttattctgatctcaacactgcttacttcctaatgttaatgggttggttcttaaactccagcaaactgcctttgtgatccagagtagagtcaaaatatttgatttcatgtaaataagtggcagccttaaattctgggaatctccagtgttcttcctggcacctctactcccaagagaaatcacaacagtgccttcagacacttccctcagttgaaggtcaactccaagtctctctctggaggcccaaaaacgtgaactgtgaaaataagagctgttcaagtcaagatacagcatggctcagaactcaacagaagaggctctttgtgatggacaccgcctcctcttcagggaagaaagaaacatctcaggcgacattcagcttggttttcaggttgttga

SEQ ID NO: 724688 - DNA, 2908 bp, Homo sapiens
tcctgcctgggcctcccaaagcattgggattacaggcatgagccaccacatccagcagaaaacataaaattctgtgtgtggcccacgctgtacttctactggccagcactggtacagatcaacttgccttaacaactaaaagaagaggaacagagagataggggcctgggaatgggaaacgtggatcagttcaacacatacaagccacacactctgtgccctggagctgccctggggaaatcaagtcacgtatataaacaaacagttcataacaatttcaggcaattctggacagtgtggaaagtattggttttaaaagtaatactacaaaagcagagagcaaaatgcccaacaagacagtaacaatcctacccgtttctggttttgttctatttgttttattataaagctctttctaatgggaaataaatgcctctagaatgaggtatgtgatgctaagtttgagaaatcaaaaagtttgtgttcaggcaaaagatgggtgactttttaattctattttcctttattcctatattgtttttagtatcaaaggagggagggatcgtccttcaattgcctcaaaattgaaggcagccaagtagatcatttttattttctagcaacttaaaaagttgaaatgtcttactaagaaacccgagttcagaagcataaacgtgaagtatcagaactgtggttttctcctgctgtccccacgtagaggggctcttcacaggacagtaggcagccccttcaatcacttccaaatagcaaaagggacctcacgtgtgcaaaacttctttatgtactgtcaggtgggacgcagtctcaggaaagacccagaaatccccctcatgatcacagagtctcagccagctttgggaggtgtcagcctggacacctgaagatgaactgtcaaggcagcagcacgcctggtcctcctgggggtgtggaggacagcccagtgacaaatcaccctcaggtcacacagagcggcttcccagcacacatccactgcctccaaacgcctgcacttgtgccagatggcagtcaggaggggcttggttcccatggatactcctacaacaagttgggagggggcagggagggcaaaactgtcaccccactgagtcctcacccatagtgcattcaacaggtggggccactgggcagggacaaaagctccctacaggctggcacagatgaacccctaccaaggaggcttccagacatgacacacacagctaacacagggaacacacctgcgcccgctcccgctgagttgaccacaccaaagctgctgtcatttctcacacttgactttaaagccgaaaaccagatagatagttacacacatctggctaagaacgatcattctctggccaataattaagctgcataattaagaggaaacaggtatttcaccaccaccctgtatttatgtggcaaaagctacaaatgcactaagtcctgtgggctttccagtagtttccagattcagatccttcattcacattgatttctagaattcagaacaaagtctcctctaattcaactctgtctaccctgaggcctgcaagataacaggaacagacaggccaagaatcaagtaccaaactcatcaactaagtcccagcccaagtgcaggtctctccttccccagcccagaggggccctgggtagttacctctggagccgctgcacgagctgggccaccatggtgtcggagatgccagggcacgcctcctccgctaggtagatggcccctcgcagctcttcaatggaccccaagttccctccgcacgcctggctcttctccttcaactgaaaacacacgaacaggaagaatggcatgaagcacaccagctgcaaaactgggaagcatgctgttcaaggaacaacacggcgtgtggaccacgacactaccccagccccagggtgtccgggaaaagctttggctagggctccaggccacttcaaattgcttttttttttttttttttttgtgagacggagtctggctttgttgctcaggctggagtacagtggcgtgatctcagctcactgcaacctccgcctcctgggttccagcgattctcctgcctcagcctcccgagtagctgggattacaggcccctgcctccatgcccagctagtttttgtatttttaatagagacagggtttcaccatgttggccaggctggtcttgaactcctgacctcaagtgatccgcccgcctcggcctctcaaagtgttgggattacaggcgtgagccactgtgcccggcccgggttccttttgaagaaaggtgattcaaatgctctgagagcagttatgtatacacagggcaatcatcagaccataatcattactgttcgaggccagaacagagacgactagctctctgtgtgcctttcccaagtctcaccgtgatggactgtcctctctgtgctgttttcctatttcaaccataaccttgtaccagaaaagcaatttcaaagcctatcctaagttattctgatctcaacactgcttacttcctaatgttaatgggttggttcttaaactccagcaaactgcctttgtgatccagagtagagtcaaaatatttgatttcatgtaaataagtggcagccttaaattctgggaatctccagtgtycttcctggcacctctactcccaagagaaatcacaacagtgccttcagacacttccctcagttgaaggtcaactccaagtctctctctggaggcccaaaaacgtgaactgtgaaaataagagctgttcaagtcaagatacagcatggctcagaactcaacagaagaggctctttgtgatggacaccgcctcctcttcagggaagaaagaaacatctcaggcgacattcagcttggttttcaggttgttga

SEQ ID NO: 724689 - DNA, 1128 bp, Homo sapiens
actttccctaactgcctgactgaccctattccagcggccaatggcagggccgcaggagcacagcctggaaatcccacggggccaactcccatgggacaaaatgaagcgcaggatggcgctcaacccggacatcctagttaggaagaacacaggtgcccagaaccatgagccagggctgaagccagacatcatccagcagggcctycgcgtgccctgtggcttccccgacaccagcgggctcggctacttcccacttgaagctgcaggtgaggcctcgggctctggccacagccctgctcccaccgggccctgaacttgccaggtcagaggccctcagacaaaccctccagggcacctgctgggcagggcaacaggtgaaggcttattggagggctgggaagaggcactggcaggaccgtggctggccaggcacggcccatggccgggggtcccccgctgcgtgacgcaggcacaggggaggagaatgagctcctatgacacttcctctcctgagcacctccccttcaaggaccaggacccctaaacacagccgcagtggaaaactgcccaaagagggaagatccccacgcaaacagatgcgtgtgtggcccacagtgagtacctcaaaggcagcctcagccaggaaggggcacaacaagaaaagaggggacttccaacttattttcaaatccgctactaaccagatgcagaacaatcttcattcttataaagcctacttttgaaaatctctcaaaacacggccacgggagcactttcctctgggagggagaggctgagcagggagtgggcgtggggaggcccagctgggagcacagcactgctgagcagaggagggacttcagtgaaacatgtggctcaggggaaaccggaggactccagggcatccaacgtctccttagaagaaagaatctacttttcacatggccagaaattggtctgaggcaaagagagcaggctgtacacaatgagatttgctaaaaagcagggcaacgggtgacacagggtctcgggctgggtcactgtcatccagtctacacattccaggctgcggcggagtgggcatcacccaggacaggggaggcgcaaggtggtgctgacagcctttgg

SEQ ID NO: 724690 - DNA, 443 bp, Homo sapiens
tgtgaagtgttttacttggatgatgacagaggcatgtttagctcatatgactgtgatgcaaccctaggaaagctagcaagaggctctgtgacagaatcaaaattaaacatctcaaatcaattgaatatgataaatacaatggaaaagatttaaatagtaaaataaaatagatggtttaaaacatttataactacaaattatccttgttygcagatgatatgatgttatatttggaaaaccctaaagactccaccaaaaatctataagaaccaaaaaacaaattcagtgaagttgcaggatacaaaatcaacatacagaaatctagcatttctatatgccaagagtgaaaaatctgaaaaagaaattgagaaaataatcccatttataatagccacaaatacagttaaatacttaggaattaaccaaagaagtaaaagatctct

SEQ ID NO: 724691 - DNA, 557 bp, Homo sapiens
tttgttcagaccaagaattctatgttccaaatacctgtaattagaagaaaaaatgtacatactctcacaaaatgggattgttggttggttggaaataatgatttttgtgcattctttcataagataatgaaattagtcaacttttaccattgaacttttgttaattagtactgtcagaaaccccacagttgtttttttcttgctaatgataggaattcttgcaactaactagtttactatattcttcttcttcttcttcttcttttttttaatctcaggccgttcatattctgtgtgttctccaagaatgcttaatcagtgtctggagtccttggtgcagaaagtacaaagtggggtggtaataaactttgaaaaagcaggaccagatccttcccctgtagaaggtattattgcacttttcttttagacattcaaaacttgctttattgtttattcaactagaactgaaaacttactgtgatttggccttaagataggcaaggccaaattrttaagacagaaaggctgttggtaaagagggaagattaaataggaaa

SEQ ID NO: 724692 - DNA, 863 bp, Homo sapiens
taatgattaaatgaagtcaggtatataaagtatatagtgcctgtatatagtaagtgctccataaatggtattgaattatcattctgatcattttcataatttggcttcccttgttttgactttaagaagatacatgtctcctgtaggaaaacacagaggaaaaaatctggcctctggctgcttaaattttgcttacaaactacaagctctttatttttgagaatttaggccatttaaaacttatcccttttctccattgggagcagatattaaaacaaatgtgtttttctgacatttatggttaatcaaattgttgataaaatcaacaatttatccattttattagaatagcaaagctggagaacagagaacagacagctaagttatttgctcttgcctctgtgtatgtggggccaacacaattgaattaactttttcaagaccaaacttctttctgtattttctaaaatctttgaaatttttaaatctgatttgaatgtttccttagaaagttttatttccctcactttttaaaatctaaactagtcagtgacaccaaatctaacscaaagcttcacattgtttgtgagtttatttttattgtcgttccatttttttcccttcatttctgtgaaaagtgtcattttggtcataaagaggttatcctttagataagaagctattatctgaaaggtttttgtagagcttaggaatatttttctttttggaataggtgttcaaaatcttgtctttactgaattcaaatgtacatcgcagtcacattttcctcttagagaaaacttagctgctccttttggacttctctcatttgctttattcattaaatgctattacactaacaa

SEQ ID NO: 724693 - DNA, 863 bp, Homo sapiens
taatgattaaatgaagtcaggtatataaagtatatagtgcctgtatatagtaagtgctccataaatggtattgaattatcattctgatcattttcataatttggcttcccttgttttgactttaagaagatacatgtctcctgtaggaaaacacagaggaaaaaatctggcctctggctgcttaaattttgcttacaaactacaagctctttatttttgagaatttaggccatttaaaacttatcccttttctccattgggagcagatattaaaacaaatgtgtttttctgacatttatggttaatcaaattgttgataaaatcaacaatttatccattttattagaatagcaaagctggagaacagagaacagacagctaagttatttgctcttgcctctgtgtatgtggggccaacacaattgaattaactttttcaagaccaaacttctttctgtattttctaaaatctttgaaatttttaaatctgatttgaatgtttccttagaaagttttatttccctcactttttaaaatctaaactagtcagtgacaccaaatctaacccaaagcttcacattgtttgtgagtttatttttattgtcgttccatttttttcccttcatttctgtgaaaagtgtcattttggtcataaagaggttatcctttagataagaagctattatctgaaaggtttttgtagagsttaggaatatttttctttttggaataggtgttcaaaatcttgtctttactgaattcaaatgtacatcgcagtcacattttcctcttagagaaaacttagctgctccttttggacttctctcatttgctttattcattaaatgctattacactaacaa

SEQ ID NO: 724694 - DNA, 628 bp, Homo sapiens
taaagatcaaatttcaaaatacacgttactataagtcagtgctgagctagtgctcacaaactgcaaataatttcttgatttatactttccagaattatgttcctattcagtaatgctacagttactagttcttctatgcattgcaagaatgccaccagtaacagaaatatagaaataccttgttaatagggaacaactagaagaattaatttgcaattgttatttcttataaacttactcaattcttttctgactcctcagctagtgattaagaaaaaaatcatgtggacatgaagggagaaagctttgctttctacttggctttctgtgtacaaatcagaaaytaggtatcatggaataattgttctaggaaattgcgttgagagaatggtattattaactatattaactaacttgtctaatgatctttgtgtgtagaaaccatgaaaacaggaaaacatctttgttcaccaaactagatcttcataagccactgttttataattttgaatcctgttgaacaacattctgtaggttattaaatcaagacttttgtctttttttatttccagcaaactcaagtgtgtatatataagtctttggaatgttgaaggagtgacattccaca

SEQ ID NO: 724695 - DNA, 1335 bp, Homo sapiens
agcaaactaatgcaagaaaagaaaaccaaataccatatgttctcacatataagtgggagctaaatgatgagaacacrtggacacagaggagaacaacaggcactgaggcctacatgagagtggaggatgggaggagggagaagatcaggaaaaataacaaatgagtgctaggcttagtacctgggtgatgaaataatctgtacaacaaacccccatgacatgaatttacctgtataacatacctgcatgtgcacaggttaaaaaaagaacaaaaaccccacgaaaacacactaaaaaaatgacatttttcaaggttgtatattaatttaagtaatttttttgtaatgtctattttactggaacttctatggatcaccacttgtaatttgacatagtttgaggttatccagtatgaataaactgaagattgtgcattgctgtcttcaagataacaaatacttgacagtaaatatctgaatgccttaacccgtcatgtaaatggcatataaataagttcattatggtagagttatttataatgtattcttaggaaatttccttgagtctccttgtctgcctctatctcttccattcccaattaaaggtcagtgtcacccagaaagaaaacttaacaatttggggtcaacattgtagttgtttccaataccctcatgacgtggcactgcaaatgaagaaactgctattttatttctagcataatctcttagtcataacattggcacaagtttaagaacacttcctagagttccaaaacctgcctgtttttaaatctaagatgaacatttacttgccaagtttcagccttagggcaactttttttttgaacgttaatgagttagaattactaaagcaacactgtaattaacttgtagaggtaaaaataattgtttcagtatttgagtaggattatatcatacatgacagtttcgttcagataaacttggaatgtctccccttaggtaccttttgttacgtagaaattgaaaagggaagagcaaatgaagttgacaggaaatagaatccaaggtgtaaaactggtgtgaaggcactggtcacccaatttatcttaggcccatgactgtgcttcccatcctgaaaatatttattgaacatctactatgtgtcgggcactgtttcaggaacttgggacacagctataaacaaggcagagtcatagctgtaaaagagacagagaacatttctcccttatggggctgacatgccatggagtggggggttgcagggagtacagccttgtcgaccagaaacacagtgctctaaagcaacagatccatgtgtcagttcccgtggaga

SEQ ID NO: 724696 - DNA, 595 bp, Homo sapiens
gcagcagttaatgaggttgacaccatccacatcatatttatgtcctaagctatgaaaatagatatgagattccttaaaattgtggccctcactacataaaagatagtgagacatatgtaaatgagctgacacaactccctacaaagcctgtgaccccacaggtacatatgtagtatgaattttaatatctaagtatttatataggacatattaataacaaaataccttttggaaacactgagcaagcctccaacttacatacatataggtaaaaatagcatatataagcatgctaattatacattttaaagttcataaaacattgtttcatttattcattcttgcttattcaayattgagtacctcttctatgtactatgcttggtgttagcaatgcaaaagaatgagcttaatgtgatccctgccttcaaagagttttaatctaagaaatacttaaaatccatttgatggtaatcaaattattaaaagattctctttatgtagagcagataatggtaaactcattccataaactatctcaatatatttttccattcttgatctttacaatacaggttaatatgaaggacataga

SEQ ID NO: 724697 - DNA, 1427 bp, Homo sapiens
ttcacatactgccaccaaaacaagtttgactgtggcacagttcataagtgcaaaatatttcatttgtggctggaataaatgagacatgtaatctcatcaaatgtatattcagtaggaattctactctgccatctgtgggttttcacatacttcagtgtaactgaatttctaacagaaaatccagctctcaatgacattatgtgaatttgtgacaccactgtaggacacttgctgggaaggtaaaataatgaacatgctacatttttttcatctatcgaggagattcatccatgacagatgtaacagtgataataatttaatcataattatgctattatgccatattattatgacagttaaggttataatttaatgtcactcccttttaattcaataaagttattaatatattagaaatattttactagtaaagatttactcgagccaagtcttttctttctcttgatggtgtaaaaattatctgctcagataaaaagtaacctcatggcttgagcgacaaaactaggtattaaatttagattctaaacagatatcaattctcaggggtcttggtaattctcttaaattttgacccgtgcatattctctctctctctccctctctcagtctatccttccacctctctctctcttcctttctgaaacacttgttcactgcttcaccaaggttgcttatttttaaaatttctctcgccagttattctatctttgtgcattcgctcttttgacatcatccaactgtgttcccttcatgcccagactggagctgaagggaaagcatatatgggcatgagacaaaggtctagacagaaaaagaaaaagaaagataaagaagctattgtgataatgttggcagcttgccaagtctctactattttgatgtgatttcccctgagtctggctagaagattgctggtkccttagccactctaaatcccatggcaacccctcctagcagtctccttcttcattagagcactgagccccaggtttatagacagcactgcaggtcaattcaagctctccaaagtaagtaaaaataccaactcagcttcgattcagtaaatcagtcacctagactagtgcttctcaaaattttatgtgcccattaatcacctggtgatctggtgaaaatgcaaattctaattgggtaggtctggaccggggatgagattatgcatttctaacatgctcccagttgaatctgatgctactgactcctggaccacacttgctattcaaacaaggactcagactatcatctatacccctaaacataaccccactaagacactatctgaccttcttctctacctttctttcccacttctcctggatttccacatttttattctcctgcttatattaatagtttatttttttaacttcaacccagaaagaaccaga

SEQ ID NO: 724698 - DNA, 1760 bp, Homo sapiens
ctccctgtccatgcaggatccatgcattttactcccattccttaagcaccagccatctgccaggccctgttgatggtctcagggaatcttgaaacaaaactgctggaaacctctgccctcttggagcttacaaaccagtatggggagagagacagtgaacagtccacacaaaygagagggtcttacatgggggtgcgggtagggggtgatacctgggaggcagagtgaggagggtgagtggctgggatgctggggccggggctgccttatctgttcctgagtggttgctctccactgaattgtgtcccccttgaattcaaatgctgaagctccaaaccccaaatgtgactgtatttggaaatagagtcttctgagagtcaattggggtcattagtgtggattctaatccaatccaactggtgaaatgaggacacagacacacacacaggaatgatcatgggaggatgcagggagaggaaagcatctacaagctaagaagggagggctcagaagaaactgactctgcctacaccttggtcttggacttccagcctgaagaaccacgagataatcaattccagctgttgaaggcacttagtctgtggtgctttattctagcaacccaagccaactaatgcaatgactggtctttgagaagagagcatccagtgaaagaccggacaaaggggagggagctgcctggtggccatctgtggggcgggacatgtgacctcttccgagtagggtggaggacaccagtgtggccagagtgggagtgctggaggaacagcagaagaggccaggttgggaactgttctgtgttttgagaacttctgggcagctatagaataacgaccatactggttttatgtgcattttctctcctgcaggagtccctgagtgtcttgaggatggaaacagggcctcattcatccttacatgcccagaaccattcatgggcccacagaaggccaagagaaggagtgagggggtggacagatagaattgcccctctgtaatgcacacctgcaggatgggctggaagtccctaggccatgctaaccacctgggctccaggaccagctcacctcagcttttccatgagctgggagctggtagggtccctggagagacagctctcaatggatgaattgaaacataggccctttcaggtattccccctcttcccaagaccccacaagcagagagcaaatggcaccactccccttacagggcattctctgtgtgtgttcctacagtgtgggcctgggacaaactgcagcccagagacctcaactcacaacccccacaaccccctggagagttccactctttggtttatatttcaatgccgtaaaaatctttctttgcagaattattgcaaacacacaaatagttaaacatatctggaaccataactcagatccacatttaactctgcctaatagatgttgagacacacagggggcaaggtgggagggggacataaaatatcatatttctcctctgcctgtgttataaaccatttgagaaatgataaaaaaaagtaatggattaaaaaatgatgttgagatcaagacagagttgatgttgtagaatgtcacttccacctgcagggagcagcttcacgtgctcagcctcatggagcaaccggggctgtgcagacccaggaaatctgtgacacaggggagcagatcagagcaaagtgcgtgctctcaagaggaagaagagggggagaagaagggtctgccctcttgtcc

SEQ ID NO: 724699 - DNA, 2983 bp, Homo sapiens
cttgctcccctactcctcttcctccccagacacatggtcagaaggaagtgtctgagtggcctcatttcttcagattccccctcctatccccatgtccccccaagagagcctgatgtctggacttgaggatggcttagcctagccccacccccgcagctgccttccttcctgctccccaccccagcagcccccaggcctcttgctgtgcctggctgagcggggatggggacgccaaggggctagggagggggctcatcagcggttgcgctgctgctaatagaccatcctcggccacatcctattactgcacataccctccccagcgcccccagcctggctggcctgcgcctctctgcggctccggggaccaggcatcagattggagtcaagattccgagagtgtcatttgccgccgttgatggtgttgataatagggatgggctggcgggtggggggcggcggcacagaggcggattctctattaaggcttcccctcagcgcagcagcaagcgagaagcagaccagagttggcactgggcgggcgcgaggcagggaggttctcagatggggtgggcagcttacctctgctgctgtctgctccattagtgcagatcaggccctggcatggagcgtgcagacttggtagttatggggtcagagaatgccaaattgcggggaaagggtggagagccagtggaaaaccctgcacatccctctacccctctacccctctaccctgagtctgcctgtttccattccacttcactgtctgggacctacaacccccagctgctgaacagaaagtgagctccttgctgtcctccctgctctcagagcacagcctcatagcagcagctgcaaagccctgctgggagctgggcagtgggtgttcttgtagccggccttcactgcccccgcagaccccatcaccttcacctcctccatcagcacttcactgccgcctcctcctgtcatcaccacagccactgctgcccaggccacctcgaccatggtctccacccccaaccctgcttccacaaggacaccataatcactactgctatcaccaactccatcctcatccccacttagcaatggttatgagcacaggctctggagcacctccatttactagctgtgtcgccttggatcacatattttaacccctcggtgtctaagtttcatagtctttaaatgagggtaatattagccacctcagagggctgtcatgattaaacaagttattacatataaagtacttagaatagtgcagggtacatagttagtactcaataaatcttatcctcattattattatccctattctcaccattatcaacttcattgccaccactcccaccttcatcatcaccacctccactgccctccttaacagaaatagcaggccaggcgcagtggctcatgcctgtaatcccagcactttgggaggctgaggtgggcagatcacctgagatcaggaggtgggtggataacctgaggtcaggagttcgagaccagcctggccaacatgatgaaaccctgtctctactaaaaatacaaaaattagctgggtgtggtggcatgcgcctgtaatcccagctactaagggaggctgaggcaagagaatcacttgaacttaggaggtgaggttgcagtgagccgagatctcgccactgcatgccagcctgggcgacaaactgagactccatctaaaaaaaacaaaaaaaacaaaaacaaacaaacaaacaaacaaaaaacaagtaatagcagctatcacttagatagtatttattatgggccaggcactagtctaagtattgtgtagattttattaactcatttaatcctcacaagaactctatgaggtaggcattattagcatccctattttatgggagaggaaactgaggcagagaaaagttaaataagttgcctggggtcacacrgctaatgtcagaaccagaagtcaacctatctcccattagggcctactttgcccacagtactttgactatatccatcacttccctgtcaccttcatcattgtcaacattccagctcttcccccacctccaccagcatgttagcaccaccaccacctccatggctatccaactatctccacctcgatgatgtcatcgtctccatcccactctcaacaaccatcagaccctcagcaccgttgctccttactcacagcccatctaaaacagattcttgttttaccctccctaggccctgtactctgagaggtatgcatgtgccctgtgatacagacctgttaatgtggccagatctggaaaggacaggcaaagaaatttaaattgctacaaagctattcaggtgccagctagaatttaaggtcggctggagcctgcaagacatgctttgcaaagctgacttctcagttcccctaggaggcccaatgtagtttaaacacccttttagcattctgagagcctctgatgtggaaagataccttctacctcacaaatagctacgctgagaacagatttgtcaacacagacacaatccttctatttggctacttagaagtctgtcttctcgaccaactgaaagccttgagagtgggaacatggccttgttcttctccttgtcctacttctcacttacatcctccaccccacaacacatacccaacatcagtgaataagtggacagaggcgatctagttaggcctggaagggaatgggatgtgtgtgtgtgttggcaggggggcaggcgggcggctgggggcggtggaggggagggggggcttgctgtccatggtactgagacagagctttattctttagggacccacaggagggatctcttgtcctttaagaatgattattcagttttttcagagcctatcgcggcttgccatcactatttgcaaagcccattacccttcacagagtctctccctatttataaggctcatcattgtttgcagagccttaaagtttgcagcctgcca

SEQ ID NO: 724700 - DNA, 1324 bp, Homo sapiens
tgccctgggcaactgttgttcacccattttttacagatgaaataaacaaagttcaaagggaagtcactttttctagacccacacagctggtgacagcactgaaaccagggaggcagaaaggaagacaatcatttacaatctaggaaggcagagtagtacagtggttacaagtgtgactgttggagtctgatggattggggttcaattccgcactccacctgcctctttctagccaggcaacctccctgagccccaagtttctcattcgtgagttaatcatgccaactcacaggacccctacagcgtgggccttgtaggagaatagaaacactgtgatccagtgrgatctctgggggaatggttgctgttgtcactacccaaggccactgagtggacaggcagagaagcagggcctggttcccagctctgtctgcttccaaagccctcagatgccccttcccagaggtggtggtaggcagctggggtccccagactccgtgaggggttgggcagtagggcagatgagtcagggtattgagcgggtggtgggatgctaagaggctgagaggttcatcatgacaggtccgttaggccatcccagcagagccctctcattgggcctcgctaatgagcctccactggattatccactcccacctttgctccgtttactctgtcaaatcgagtttgcattttaaatgcgaatttgacaagacgggcaatttgtctgctgacgaggttaatgggtgttagccctgcggactagggagggagaacccatgcccctgcacagtctggcctctgctcagatcaatgaccccggctgctgctcctctctactctgcagccactctgggcctctgtgtatccagaggttgtccctgtgtctagctcaccacctccaggcagccttcccaaaagcaccctgacctgggccacctcaattagtcaggctgggtgatgtcccctccacctgaatgcagataggattcctgaggggtgggccatgtcaccccctctcagaggaggggcctcctgtctcagcccaggcttctagggcagggccagattttccctgagttgggctcccaagggctggggtgtcttccctcctgcttccctctactcctcgctcccatatggaacttggaagggggccagcagagctggtgttgccacatcctgagtttcagtgctgggatgcggactggttggcaagaaaaggttttaaatccatcaactccaagccagcgcctttgtggagcaactcccaatgttggggcttacaggagagctggggaaccacctgagacttcctgatgag

SEQ ID NO: 724701 - DNA, 1324 bp, Homo sapiens
tgccctgggcaactgttgttcacccattttttacagatgaaataaacaaagttcaaagggaagtcactttttctagacccacacagctggtgacagcactgaaaccagggaggcagaaaggaagacaatcatttacaatctaggaaggcagagtagtacagtggttacaagtgtgactgttggagtctgatggattggggttcaattccgcactccacctgcctctttctagccaggcaacctccctgagccccaagtttctcattcgtgagttaatcatgccaactcacaggacccctacagcgtgggccttgtaggagaatagaaacactgtgatccagtgagatctctgggggaatggttgctgttgtcactacccaaggccactgagtggacaggcagagaagcagggcctggttcccagctctgtctgcttccaaagccctcagatgccccttcccagaggtggtggtaggcagctggggtccccagactccgtgaggggttgggcagtagggcagatgagtcagggtattgagcgggtggtgggatgctaagaggctgagaggttcatcatgacaggtccgttaggccatcccagcagagccctctcattgggcctcgctaatgagcctccactggattatccactcccacctttgctccgtttactctgtcaaatcgagtttgcattttaaatgcgaatttgacaagacgggcaatttgtctgctgacgaggttaatgggtgttagccctgcggactagrgagggagaacccatgcccctgcacagtctggcctctgctcagatcaatgaccccggctgctgctcctctctactctgcagccactctgggcctctgtgtatccagaggttgtccctgtgtctagctcaccacctccaggcagccttcccaaaagcaccctgacctgggccacctcaattagtcaggctgggtgatgtcccctccacctgaatgcagataggattcctgaggggtgggccatgtcaccccctctcagaggaggggcctcctgtctcagcccaggcttctagggcagggccagattttccctgagttgggctcccaagggctggggtgtcttccctcctgcttccctctactcctcgctcccatatggaacttggaagggggccagcagagctggtgttgccacatcctgagtttcagtgctgggatgcggactggttggcaagaaaaggttttaaatccatcaactccaagccagcgcctttgtggagcaactcccaatgttggggcttacaggagagctggggaaccacctgagacttcctgatgag

SEQ ID NO: 724702 - DNA, 562 bp, Homo sapiens
gatcctaaagttcagcaatggctgtgcgccaggcaccaggcctgtgctcagggctctgcaggcacttctcaggcactcygcacgaggtcaggatgacaactgttgcccccatttcatggatgggtttgggaacacaaagagacaagaagcaagactgtggcacagctcaaaggcacgggactcgagccaggtcctcctgcggggctgtgccccagcagctgtcaaagagtgttcctgagttcccagcagtgaggtctgtggggaagggcagtggtctgtgcagtgggagggagggagggaggcagagggacagaccgaccaagagcagaaggggtgtagacgtggcacatttggagtcagaagcaggctctgcatcagacacagcctcaaatcggggctctgcctctttctcacagagtgatcttagctctctgtgcctcagtttcctcatctgtaccagaagaacaatgctaacacctgtcctgtggggttgttacaaagaccagctgagagaacgtgtgtgttgtactcatcacagtgcttgagacagagtaatcattca

SEQ ID NO: 724703 - DNA, 2883 bp, Homo sapiens
agcatatttatttagtatcattttggtgaaaaagtggttatacagaatagaaaagagttgtccaaaactaagtggttgacctttccagagccattacctgcagaattgttatgtaagtctgttccatactcgtaaaggaatactcagctgacccaactgattttctcgtgttttttccttcaagggctagtagaagtctatatgttgtggtggaaaacaacctcagccctatagtccaacatttgcctatcaaaacttgtcctatgatttataaaactagaacctcactggtaagtcacattcctagagtctcccccatccctaaccccagtcacggaaaataaatcaaatcattgtcactctttcttaacaaagagyatacatttaaaacttgagtaaaattacaggtaccgtctggggccttcaagggggaacttgaagtctcaataccgcagttgtccaatcagaggatccaagatgaatatactcaaggactttatgcttggcatcctctggagacagtacataaccaccagcttggtttaactggagattcatttgggttaggagaaattatgtaggcaatgtacttagtcaatggaggcctcatgcctgaagacttacaagaatctgaattcgtatgttacttttcctttaatggagtggaattccaaatgaaaataatcaaacagcatgtgcataaacattagatataatacccacatttacaaagcctttatagatatgcaagtgttattgcgtctgtccctagcttctgtacagaatttaatgggtagctgttactattttattgctgtataaaaatgaggaaactgataagttgtctaaaggtgcacaatcaaaacacatcaaagccattgtgaaatacaggtccccggatttcaaaaacagatcttctgcttataaattcagtctttttcatactgccataaactccagaatgggaaaacaaagttactatcagaaaagcttcttttagctgggcgtggtggctcatgcctgtaatcgcagcacattgggaggccaagacaggcggatcacttgaggtcgggagttcgagaccagcctggccaacatggtgatctctactaaaaatacaaaaattagctgggcatggtggcggacacctgtaattccagctacttgggagtctgaggcagtagaatcacttgagctggggaggccgagatggcttagtgatccgagatggcgccactgcactccagcctgggtgacagagtgagccgacatcgcgccactgcactccagcctgggtgacagagtgagactccatctcaaaagaaaaaagaaagcttattttttcccctaatcaccataatattcactattaagtgagggaaatagaaataatttacttagcaaatcctttctagttcaaataatttctatacaggctgtgcaaacataataatgagagattctttttagtcatcttgctttatatcactaattacactcttatttaatgatattttaaagaaaaacgtgtttattttcaagtagaaaactcatatctgtccaccaaggaaagctgtaacaaatgtaaaatacataaaaaagataactgctaaatttctaaagcattccaaaaaaagacaaatagaagggtgtcagattaggaaagtatgtcttgtaaggtgtaacggacagactgatgagcttagagatgtggatctcaaagtggttctcagagcaacagcatcagggtcacctgggaacgtgttagaaatgcagattctcaggtaccatcccacatttaatgaatcagaagctcagagtagagaccagcaatttgttttaacaagtccttcagggattctgatacagctgatgtttgagaaacactagctttaggtaaacgtaagagggtcacgttagtatttttaaatcattggaagttggtttgttttgttttttcttaagtgggactcatttatacttcaatacacagaatggatatttagaggaagtcgtttttgacctaacacagatgagcacttccaattgaatagcgctttctgataatggggctgcccactacaaatgaataactgggtttctctaggctggagctgcagacaggtcactatgtgtatggaggattgtattaatatgatcgtggctctttatagctctgcattactaatattctgttttaaagtctctcctcaatatccaatgtctctgtgtgaatgatggtaaggagtgggtaacagtaacaatcatcctgttgttgacaacagatgataagagaaagcccaactttacactctgtataatcttacaccaatgccccattcctcgtctaatttttttacatgttaacacatgaccttggcattactaaataagaagccctctcacttagaacccgatgcagtatgataaaaattattttgagaacaatcaggagctctagttttcaattctgcttctcttctcaagtagttctgtgccttagtttcttctttgtaaatttaaatggttggaacagaggatctgttaagtgtgattcaagctgaaattgtatgtagcccacactgagtttctctgctatacccctaacccattcaacaatcacaccaccagttttcaggactcacagtaggatagccgtctatcatttgttaataggtgtgctctttcatccaaactagaaactcatgatttctgcagttttttattctagcaaggttctaggtgctggcctggaactataaaacgaacatttcacaaaaagttatgacaatatacaagggaaagacaatttctttgaatatccataatctcaatatggagtctggctgtggatggccaagagatagtttccttaactggaaa

SEQ ID NO: 724704 - DNA, 2883 bp, Homo sapiens
agcatatttatttagtatcattttggtgaaaaagtggttatacagaatagaaaagagttgtccaaaactaagtggttgacctttccagagccattacctgcagaattgttatgtaagtctgttccatactcgtaaaggaatactcagctgacccaactgattttctcgtgttttttccttcaagggctagtagaagtctatatgttgtggtggaaaacaacctcagccctatagtccaacatttgcctatcaaaacttgtcctatgatttataaaactagaacctcactggtaagtcacattcctagagtctcccccatccctaaccccagtcacggaaaataaatcaaatcattgtcactctttcttaacaaagagcatacatttaaaacttgagtaaaattacaggtaccgtctggggccttcaagggggaacttgaagtctcaataccgcagttgtccaatcagaggatccaagatgaatatactcaaggactttatgcttggcatcctctggagacagtacataaccaccagcttggtttaactggagattcatttgggttaggagaaattatgtaggcaatgtacttagtcaatggaggcctcatgcctgaagacttacaagaatctgaattcgtatgttacttttcctttaatggagtggaattccaaatgaaaataatcaaacagcatgtgcataaacattagatataatacccacatttacaaagcctttatagatatgcaagtsttattgcgtctgtccctagcttctgtacagaatttaatgggtagctgttactattttattgctgtataaaaatgaggaaactgataagttgtctaaaggtgcacaatcaaaacacatcaaagccattgtgaaatacaggtccccggatttcaaaaacagatcttctgcttataaattcagtctttttcatactgccataaactccagaatgggaaaacaaagttactatcagaaaagcttcttttagctgggcgtggtggctcatgcctgtaatcgcagcacattgggaggccaagacaggcggatcacttgaggtcgggagttcgagaccagcctggccaacatggtgatctctactaaaaatacaaaaattagctgggcatggtggcggacacctgtaattccagctacttgggagtctgaggcagtagaatcacttgagctggggaggccgagatggcttagtgatccgagatggcgccactgcactccagcctgggtgacagagtgagccgacatcgcgccactgcactccagcctgggtgacagagtgagactccatctcaaaagaaaaaagaaagcttattttttcccctaatcaccataatattcactattaagtgagggaaatagaaataatttacttagcaaatcctttctagttcaaataatttctatacaggctgtgcaaacataataatgagagattctttttagtcatcttgctttatatcactaattacactcttatttaatgatattttaaagaaaaacgtgtttattttcaagtagaaaactcatatctgtccaccaaggaaagctgtaacaaatgtaaaatacataaaaaagataactgctaaatttctaaagcattccaaaaaaagacaaatagaagggtgtcagattaggaaagtatgtcttgtaaggtgtaacggacagactgatgagcttagagatgtggatctcaaagtggttctcagagcaacagcatcagggtcacctgggaacgtgttagaaatgcagattctcaggtaccatcccacatttaatgaatcagaagctcagagtagagaccagcaatttgttttaacaagtccttcagggattctgatacagctgatgtttgagaaacactagctttaggtaaacgtaagagggtcacgttagtatttttaaatcattggaagttggtttgttttgttttttcttaagtgggactcatttatacttcaatacacagaatggatatttagaggaagtcgtttttgacctaacacagatgagcacttccaattgaatagcgctttctgataatggggctgcccactacaaatgaataactgggtttctctaggctggagctgcagacaggtcactatgtgtatggaggattgtattaatatgatcgtggctctttatagctctgcattactaatattctgttttaaagtctctcctcaatatccaatgtctctgtgtgaatgatggtaaggagtgggtaacagtaacaatcatcctgttgttgacaacagatgataagagaaagcccaactttacactctgtataatcttacaccaatgccccattcctcgtctaatttttttacatgttaacacatgaccttggcattactaaataagaagccctctcacttagaacccgatgcagtatgataaaaattattttgagaacaatcaggagctctagttttcaattctgcttctcttctcaagtagttctgtgccttagtttcttctttgtaaatttaaatggttggaacagaggatctgttaagtgtgattcaagctgaaattgtatgtagcccacactgagtttctctgctatacccctaacccattcaacaatcacaccaccagttttcaggactcacagtaggatagccgtctatcatttgttaataggtgtgctctttcatccaaactagaaactcatgatttctgcagttttttattctagcaaggttctaggtgctggcctggaactataaaacgaacatttcacaaaaagttatgacaatatacaagggaaagacaatttctttgaatatccataatctcaatatggagtctggctgtggatggccaagagatagtttccttaactggaaa

SEQ ID NO: 724705 - DNA, 2883 bp, Homo sapiens
agcatatttatttagtatcattttggtgaaaaagtggttatacagaatagaaaagagttgtccaaaactaagtggttgacctttccagagccattacctgcagaattgttatgtaagtctgttccatactcgtaaaggaatactcagctgacccaactgattttctcgtgttttttccttcaagggctagtagaagtctatatgttgtggtggaaaacaacctcagccctatagtccaacatttgcctatcaaaacttgtcctatgatttataaaactagaacctcactggtaagtcacattcctagagtctcccccatccctaaccccagtcacggaaaataaatcaaatcattgtcactctttcttaacaaagagcatacatttaaaacttgagtaaaattacaggtaccgtctggggccttcaagggggaacttgaagtctcaataccgcagttgtccaatcagaggatccaagatgaatatactcaaggactttatgcttggcatcctctggagacagtacataaccaccagcttggtttaactggagattcatttgggttaggagaaattatgtaggcaatgtacttagtcaatggaggcctcatgcctgaagacttacaagaatctgaattcgtatgttacttttcctttaatggagtggaattccaaatgaaaataatcaaacagcatgtgcataaacattagatataatacccacatttacaaagcctttatagatatgcaagtgwtattgcgtctgtccctagcttctgtacagaatttaatgggtagctgttactattttattgctgtataaaaatgaggaaactgataagttgtctaaaggtgcacaatcaaaacacatcaaagccattgtgaaatacaggtccccggatttcaaaaacagatcttctgcttataaattcagtctttttcatactgccataaactccagaatgggaaaacaaagttactatcagaaaagcttcttttagctgggcgtggtggctcatgcctgtaatcgcagcacattgggaggccaagacaggcggatcacttgaggtcgggagttcgagaccagcctggccaacatggtgatctctactaaaaatacaaaaattagctgggcatggtggcggacacctgtaattccagctacttgggagtctgaggcagtagaatcacttgagctggggaggccgagatggcttagtgatccgagatggcgccactgcactccagcctgggtgacagagtgagccgacatcgcgccactgcactccagcctgggtgacagagtgagactccatctcaaaagaaaaaagaaagcttattttttcccctaatcaccataatattcactattaagtgagggaaatagaaataatttacttagcaaatcctttctagttcaaataatttctatacaggctgtgcaaacataataatgagagattctttttagtcatcttgctttatatcactaattacactcttatttaatgatattttaaagaaaaacgtgtttattttcaagtagaaaactcatatctgtccaccaaggaaagctgtaacaaatgtaaaatacataaaaaagataactgctaaatttctaaagcattccaaaaaaagacaaatagaagggtgtcagattaggaaagtatgtcttgtaaggtgtaacggacagactgatgagcttagagatgtggatctcaaagtggttctcagagcaacagcatcagggtcacctgggaacgtgttagaaatgcagattctcaggtaccatcccacatttaatgaatcagaagctcagagtagagaccagcaatttgttttaacaagtccttcagggattctgatacagctgatgtttgagaaacactagctttaggtaaacgtaagagggtcacgttagtatttttaaatcattggaagttggtttgttttgttttttcttaagtgggactcatttatacttcaatacacagaatggatatttagaggaagtcgtttttgacctaacacagatgagcacttccaattgaatagcgctttctgataatggggctgcccactacaaatgaataactgggtttctctaggctggagctgcagacaggtcactatgtgtatggaggattgtattaatatgatcgtggctctttatagctctgcattactaatattctgttttaaagtctctcctcaatatccaatgtctctgtgtgaatgatggtaaggagtgggtaacagtaacaatcatcctgttgttgacaacagatgataagagaaagcccaactttacactctgtataatcttacaccaatgccccattcctcgtctaatttttttacatgttaacacatgaccttggcattactaaataagaagccctctcacttagaacccgatgcagtatgataaaaattattttgagaacaatcaggagctctagttttcaattctgcttctcttctcaagtagttctgtgccttagtttcttctttgtaaatttaaatggttggaacagaggatctgttaagtgtgattcaagctgaaattgtatgtagcccacactgagtttctctgctatacccctaacccattcaacaatcacaccaccagttttcaggactcacagtaggatagccgtctatcatttgttaataggtgtgctctttcatccaaactagaaactcatgatttctgcagttttttattctagcaaggttctaggtgctggcctggaactataaaacgaacatttcacaaaaagttatgacaatatacaagggaaagacaatttctttgaatatccataatctcaatatggagtctggctgtggatggccaagagatagtttccttaactggaaa

SEQ ID NO: 724706 - DNA, 2883 bp, Homo sapiens
agcatatttatttagtatcattttggtgaaaaagtggttatacagaatagaaaagagttgtccaaaactaagtggttgacctttccagagccattacctgcagaattgttatgtaagtctgttccatactcgtaaaggaatactcagctgacccaactgattttctcgtgttttttccttcaagggctagtagaagtctatatgttgtggtggaaaacaacctcagccctatagtccaacatttgcctatcaaaacttgtcctatgatttataaaactagaacctcactggtaagtcacattcctagagtctcccccatccctaaccccagtcacggaaaataaatcaaatcattgtcactctttcttaacaaagagcatacatttaaaacttgagtaaaattacaggtaccgtctggggccttcaagggggaacttgaagtctcaataccgcagttgtccaatcagaggatccaagatgaatatactcaaggactttatgcttggcatcctctggagacagtacataaccaccagcttggtttaactggagattcatttgggttaggagaaattatgtaggcaatgtacttagtcaatggaggcctcatgcctgaagacttacaagaatctgaattcgtatgttacttttcctttaatggagtggaattccaaatgaaaataatcaaacagcatgtgcataaacattagatataatacccacatttacaaagcctttatagatatgcaagtgttattgygtctgtccctagcttctgtacagaatttaatgggtagctgttactattttattgctgtataaaaatgaggaaactgataagttgtctaaaggtgcacaatcaaaacacatcaaagccattgtgaaatacaggtccccggatttcaaaaacagatcttctgcttataaattcagtctttttcatactgccataaactccagaatgggaaaacaaagttactatcagaaaagcttcttttagctgggcgtggtggctcatgcctgtaatcgcagcacattgggaggccaagacaggcggatcacttgaggtcgggagttcgagaccagcctggccaacatggtgatctctactaaaaatacaaaaattagctgggcatggtggcggacacctgtaattccagctacttgggagtctgaggcagtagaatcacttgagctggggaggccgagatggcttagtgatccgagatggcgccactgcactccagcctgggtgacagagtgagccgacatcgcgccactgcactccagcctgggtgacagagtgagactccatctcaaaagaaaaaagaaagcttattttttcccctaatcaccataatattcactattaagtgagggaaatagaaataatttacttagcaaatcctttctagttcaaataatttctatacaggctgtgcaaacataataatgagagattctttttagtcatcttgctttatatcactaattacactcttatttaatgatattttaaagaaaaacgtgtttattttcaagtagaaaactcatatctgtccaccaaggaaagctgtaacaaatgtaaaatacataaaaaagataactgctaaatttctaaagcattccaaaaaaagacaaatagaagggtgtcagattaggaaagtatgtcttgtaaggtgtaacggacagactgatgagcttagagatgtggatctcaaagtggttctcagagcaacagcatcagggtcacctgggaacgtgttagaaatgcagattctcaggtaccatcccacatttaatgaatcagaagctcagagtagagaccagcaatttgttttaacaagtccttcagggattctgatacagctgatgtttgagaaacactagctttaggtaaacgtaagagggtcacgttagtatttttaaatcattggaagttggtttgttttgttttttcttaagtgggactcatttatacttcaatacacagaatggatatttagaggaagtcgtttttgacctaacacagatgagcacttccaattgaatagcgctttctgataatggggctgcccactacaaatgaataactgggtttctctaggctggagctgcagacaggtcactatgtgtatggaggattgtattaatatgatcgtggctctttatagctctgcattactaatattctgttttaaagtctctcctcaatatccaatgtctctgtgtgaatgatggtaaggagtgggtaacagtaacaatcatcctgttgttgacaacagatgataagagaaagcccaactttacactctgtataatcttacaccaatgccccattcctcgtctaatttttttacatgttaacacatgaccttggcattactaaataagaagccctctcacttagaacccgatgcagtatgataaaaattattttgagaacaatcaggagctctagttttcaattctgcttctcttctcaagtagttctgtgccttagtttcttctttgtaaatttaaatggttggaacagaggatctgttaagtgtgattcaagctgaaattgtatgtagcccacactgagtttctctgctatacccctaacccattcaacaatcacaccaccagttttcaggactcacagtaggatagccgtctatcatttgttaataggtgtgctctttcatccaaactagaaactcatgatttctgcagttttttattctagcaaggttctaggtgctggcctggaactataaaacgaacatttcacaaaaagttatgacaatatacaagggaaagacaatttctttgaatatccataatctcaatatggagtctggctgtggatggccaagagatagtttccttaactggaaa

SEQ ID NO: 724707 - DNA, 1148 bp, Homo sapiens
gtaaatacttcactatcctgtgcttacacgtaaatgtaccatttctcttaggggtcttgaaatactgaatcaaagaatggtgtaggggaagggcagtttagaaatacctggaaatttggttgtttgaaggaagcccactctcagatggtaggagatcaagctaacagaatagctgagaatattttctgagagccccagaagtataaaaacggtctaggggggaaaatttgggacacagagtgaaaatagcctgcctctgaagaccagcttcatttcttcccctctgggtgttaatgaaagagcctttaactttgccaggcctcagttactaatttctaaaacaactgctgctactattactacggatcttactgctactatgaccaccaccaccaccacatcagttactgagaactgaactagatgccaagaaaaatggtaaacacttcatatacatyatctttttaaacacaaaatgtactattaatccagctttacatataagaaaactgaggctcaaagaggctaagtaatttgtatgtgaacatgctttacactatgtaaaacatcttattagtagatatcactattattaagaacctatcagccggagaggaagaattggccttttatctttctaagatgcacagttgtctttctgtttaatgtttttttaaaaatccccctgtgacaagctccagaggacaaataatttatttcttggggtgtatggctctctaaatgaattaattgataggcatccccttgtcagtctcagggatgtggaaataaaacagacatgagatgttttttaccaaactaatttgtgctttaaacacataaataataaatatatatatattaaagtaaatgtgtatttaccgtctctcctgctccactttgaattcaagaacccgtgtctttgttgggtcactgcactgtcaattgagaagtttggttttgtttctttgagtgttagtaagtggcattaaatagtaaatattgccgggggaaagaaaggagaaaaacagctcctccaatccatccctgtttccattcaattaaaggagggtagaaagaatacttaagataattgtaataagtctaatagaatagcaggagccactcttttcctttcagtaggccat

SEQ ID NO: 724708 - DNA, 1332 bp, Homo sapiens
cttttttgaatatatgagtaatatgtgattaaaacttctatatccgaatccgtctaaagagctctgtcaacaagtatgaaataaaaattcttcagtaataagaatacattgtgtcagggtttaattagcatttttttctgtcttggtacaataaagggtgttttagagttgaggaaataaaggactaactgaagaatacctttaaatgctttcaaaactccttaattcctatcaaaacaggtggaaaccctgtcaagaacagtggtccatcagctggtaaacagaataaataatgcagaaattgtacagtataattatccatcattatggcaaacatgttcctttagccccaaaatgagtaatcctataatgaatttactccaaagtatctaaggtgagtaagcaattcttttgtagtaaactacttgctgctatgaggtaaattaactcttccggacaccatttaaaaaatcacttcttacagagtactaaattgtacactgatgttctaggcagttaatttgccacacaggagaatttttgtcctgtggggtattttattcctcttacctcacatggatcatgtagagtctaagaaagtcatctagattactgcgactatttaaatttgtgccatttaaatgaaatacactgtgaggttcataacaaaaataaattgaattgaatattgttagggaacttggtagaatttctttcagacaacaatctgggtagtggtttttagtgttgttttgtttttttggttttttttgagatggagtctcactctgttacccaggctggagtgcagtggcatgatctgagctcactgcaacctccgcctcccggattcaagcaattctccagcctcagcctcctgagtagctggtattacaggaatgtgccaccaagcctggctaaatttttttgtatttttagtagagatggagtttcaccatattggccaggctggtctcgaactcctgaccttgtgatccacccacctcgacctcccaaagtgctgggattacaggcgtgagccaccgtgcccggcctagtgtttttttgkttttttttaagggaaaaaaatatgagtaggtttagggtttgatgcttctttgactctagtttcttacagagtttctgttttgatatataatattttattacctgtcctctttctgttgctaagcagatgggacatgttgctatgtgacattttacacgaccacttttatgcagcttcaacagtaatgaccaggggtcatgaaaacataatcacacacactaaaaactggagcacttgcctttttgtttctggaaaactacaaa

SEQ ID NO: 724709 - DNA, 1081 bp, Homo sapiens
tgtggataactcttggcagccactactggttggatggcattttgcttagactccccagtgaccctgaaggacrtgcatacttctattttctgaataagagtttctacaaatccccagagatagcttttcaatgtacaaatgtcccatcagtctgctcctaagaccacttaaagtcagtatctgctctagtccatatgacacttaaggaacaagggccattttttaatgcaacatgactcacaaaatctcttcctgggtagcttatgaaaaggagggaaaccaactaggggaatattgcttttataagtcagccttaaagaaaataagaaaaaacaagttgattttcaaagctattcttcttgaacaaactcaatatgtggctattgaaataacatattttgtagtgtgcccttaaaatgacgtgaataatacaggggaaacattaaaacagaaaggcttcctttacagatgctacttaagaaacttagaccccggaattaaaatttaaatattttaatgcctttttacattcccttttgccccatcccattcttcaaaagaagatgttagtatgaaacagaacaagataccacttaacatcaaaatgtctaaactttctagaggggatatattactctttattagttgatttgattgggtaaatattcctcatgtgtatttgatttttgtgctggcattcattactccattgagtaggaactatttaatagcttccaaatatttaaaataagttcaaaccagctacaagtataaagattgtatctataaccaaggccaggcactgtggctcacccctgtaatcccagcactttgggaggccgagctggatggatcacttgaggtcagaagttcgagaccagcctggccaacatggtgaaacactatctctactaaaaatacaaaaattagccaggtgtgatggcactcactgtggtcccagttacttgggaggctgaggcaggagaattgcttgaactcaggaggcaaaggctgcagcgagccaagattgtaccactgcactccagcctgggtgacagagcaagactccatctcaaaaaaa

SEQ ID NO: 724710 - DNA, 1081 bp, Homo sapiens
tgtggataactcttggcagccactactggttggatggcattttgcttagactccccagtgaccctgaaggacgtgcatacttctattttctgaataagagtttctacaaatccccagagatagcttttcaatgtacaaatgtcccatcagtctgctcctaagaccacttaaagtcagtatctgctctagtccatatgacacttaaggaacaagggccattttttaatgcaacatgactcacaaaatctcttcctgggtagcttatgaaaaggagggaaaccaactaggggaatattgcttttataagtcagccttaaagaaaataagaaaaaacaagttgattttcaaagctattcttcttgaacaaactcaatatgtrgctattgaaataacatattttgtagtgtgcccttaaaatgacgtgaataatacaggggaaacattaaaacagaaaggcttcctttacagatgctacttaagaaacttagaccccggaattaaaatttaaatattttaatgcctttttacattcccttttgccccatcccattcttcaaaagaagatgttagtatgaaacagaacaagataccacttaacatcaaaatgtctaaactttctagaggggatatattactctttattagttgatttgattgggtaaatattcctcatgtgtatttgatttttgtgctggcattcattactccattgagtaggaactatttaatagcttccaaatatttaaaataagttcaaaccagctacaagtataaagattgtatctataaccaaggccaggcactgtggctcacccctgtaatcccagcactttgggaggccgagctggatggatcacttgaggtcagaagttcgagaccagcctggccaacatggtgaaacactatctctactaaaaatacaaaaattagccaggtgtgatggcactcactgtggtcccagttacttgggaggctgaggcaggagaattgcttgaactcaggaggcaaaggctgcagcgagccaagattgtaccactgcactccagcctgggtgacagagcaagactccatctcaaaaaaa

SEQ ID NO: 724711 - DNA, 1081 bp, Homo sapiens
tgtggataactcttggcagccactactggttggatggcattttgcttagactccccagtgaccctgaaggacgtgcatacttctattttctgaataagagtttctacaaatccccagagatagcttttcaatgtacaaatgtcccatcagtctgctcctaagaccacttaaagtcagtatctgctctagtccatatgacacttaaggaacaagggccattttttaatgcaacatgactcacaaaatctcttcctgggtagcttatgaaaaggagggaaaccaactaggggaatattgcttttataagtcagccttaaagaaaataagaaaaaacaagttgattttcaaagctattcttcttgaacaaactcaatatgtggctattgaaataacatattttgtagtgtgcccttaaaatgacgtgaataatacaggggaaacattaaaacagaaaggcttcctttacagatgctacttaagaaacttasaccccggaattaaaatttaaatattttaatgcctttttacattcccttttgccccatcccattcttcaaaagaagatgttagtatgaaacagaacaagataccacttaacatcaaaatgtctaaactttctagaggggatatattactctttattagttgatttgattgggtaaatattcctcatgtgtatttgatttttgtgctggcattcattactccattgagtaggaactatttaatagcttccaaatatttaaaataagttcaaaccagctacaagtataaagattgtatctataaccaaggccaggcactgtggctcacccctgtaatcccagcactttgggaggccgagctggatggatcacttgaggtcagaagttcgagaccagcctggccaacatggtgaaacactatctctactaaaaatacaaaaattagccaggtgtgatggcactcactgtggtcccagttacttgggaggctgaggcaggagaattgcttgaactcaggaggcaaaggctgcagcgagccaagattgtaccactgcactccagcctgggtgacagagcaagactccatctcaaaaaaa

SEQ ID NO: 724712 - DNA, 656 bp, Homo sapiens
ttaattaaaaaaattttagaatttgacaagaacctaaatctactttgttgcaatttgatagctgtgacaagaaaaattgacatcttggtttacaaggtaacatgtaggaaacacttatgaagggaaaaaaactacgacaaaagaaagatctatatgtagaaaatatgggcctggcacagtggatcactctggtaatcccagcacttttggaggccaagatgggtgtatcacttaaggcctggggttcgagaccagcctggccaacatggtgaaaccaagtctactaaaaagacaaaaattagctgggtgtggcctgtgatcccagctactcgcgaggctgaggcaagagaatcgcytaaccggcaggtggaggctgcagtgagccgggatcgcaccactgcattccagcctgggcaacagagtgagcctctgcctcaacgaaaagaaagaaagaaaatgtgtaaacaataaattttaaagctgataaaaataatatatggtgttttcctccctaggaattggtgaaaaatgtctatacaaaatatcccagggcttcccttaatttctaaagcagacattcttgggactaaaacacaagccaatcaagaaaccatatgttgacagtataagaatgtgaagaaacttttctgttggta

SEQ ID NO: 724713 - DNA, 794 bp, Homo sapiens
ttgtgtcttcattttcttttttaacatagttcaggtactttatttgtaattatcaaatataatacataaggagaagtgcctaaaacaaatgtacaccttgatgagctactgacatgcacagcaacataactggcactcatggcaagacatactataagagagtcccagacttgccacttcttcgatataaatgcctcccttcctgcagctgtaaccagtatccctgaaatatctattggcttcctggctttctttaagattttatatataattcgctgggcgccgtggctcacgcctgtaatcccagcactttgggaggctgaggcgggcagatcacgaggtcaggagatggagaccattctggcwaacacggtgaaacctcgtctctactaaatatacaaaaaaattagccgggcgtggtggcgggcgcctgttgtgccagctactcaggaggctgaggcaggagaatggcgtgaacccggaaaggcggagctagcagtgagccgagatcgcgccactgcactccaacctgggcgacagagtgagattcagtctcaaaagaaaaaaaaaagattttatatataattatacatgcctaaaatatgattacattatgtctgttttattgatgtgattccatttgcataggatatatcatgtctggcctttttttgttcaatattatgcccttaaggtagatccacatttcttgtgtatttgtaatttattcatttttatagttgcatactactccaaagcatgagtatgtcataattaactcacgtatttgattg

SEQ ID NO: 724714 - DNA, 794 bp, Homo sapiens
ttgtgtcttcattttcttttttaacatagttcaggtactttatttgtaattatcaaatataatacataaggagaagtgcctaaaacaaatgtacaccttgatgagctactgacatgcacagcaacataactggcactcatggcaagacatactataagagagtcccagacttgccacttcttcgatataaatgcctcccttcctgcagctgtaaccagtatccctgaaatatctattggcttcctggctttctttaagattttatatataattcgctgggcgccgtggctcacgcctgtaatcccagcactttgggaggctgaggcgggcagatcacgaggtcaggagatggagaccattctggctaacacggtgaaacctcgtctctactaaatatacaaaaaaattagccgggcgtggtggcgggcgcctgttgtgccagctactcaggaggctgaggcaggagaatggcgtgaacccggraaggcggagctagcagtgagccgagatcgcgccactgcactccaacctgggcgacagagtgagattcagtctcaaaagaaaaaaaaaagattttatatataattatacatgcctaaaatatgattacattatgtctgttttattgatgtgattccatttgcataggatatatcatgtctggcctttttttgttcaatattatgcccttaaggtagatccacatttcttgtgtatttgtaatttattcatttttatagttgcatactactccaaagcatgagtatgtcataattaactcacgtatttgattg

SEQ ID NO: 724715 - DNA, 1961 bp, Homo sapiens
tctggtttctggacagctaattttgatatgggtactgagataacccatggagaaaaaatagtctcttcaataaattgtgcaaggaaagctggatttgcacatgaaaaagaataataaaattggacccttatactgtagatcaactcaaaatggctaaaagacctgaaatcattctttcctggaaaggattcttgtagtgtctgccatggaacacagacagacctatgggaacacaggggaacctcttttagaaaacttgacaagcgagtaagacttggatcttttccgaagagcacaagcccgggcttcagaggatttggagaagttaaggctgcaaggccaaatcacagagggaagcaacatgattaaaacaattgcttttggtcgctatgaccttgatacctggtaccattctccatatcctgaagaatatgcacggctgggacgtctctatatgtgtgaattctgtttaaaatatatgaagagccaaatgatactccgccagcacatggccaaatgtgtgtggaaacacccacttggtgatgagatatatcgcaaaggttcagtctctgtgtttgaagtggatggcaagaaaaacaagatctactgccaaaacctgtgcctgctggccaaactttttctggaccacaagacattatattatgatgtggagcccttcctgttctatgttatgacagaggcggacaacactggctgtcacctgattggatatttttccaaggaaaagaattcattcctcaactacaacgtatcctgtatccttactatgcctcagtacatgagacagggctatggcaagatgcttattgatttcagttatttgctttccaaagttgaagaaaaagttggctccccagaatgtccactctcagatctggggcttataagctgttgcagttactggaaagaagtacttctccgctaactgcgtaatttccaaggcaaagagatttctatcaaagaaatcagtcaggagacggctgtgaatcctgtggacattgtcagcactctgcaagcccttcaggtgctcaagtactggaagggaaaacacctagttttaaagagacaggacctgattgatgagtagatagccaaagaggccaaaaggtccaactccaataaaaccatggatcccagctgcttaaaatggacccctcccaagggcccttaaagcgacctgtcattccgagccagcgaaccccagcagtaggaatccgtaccttagggatctgtcggtcatttctgttgctcttgtgattggcaagtacagtatcctttgggaaggccatccccctcaggactgtcctggctccgatctttgtgtacactgcagacactggttctgaggaactgttgtttcggcctcagtgaggttgcctggatgggatctgtattagacttgagtgcaggtctctcagcactgacccaaggagttctgttatggtactgtacctgtccagtcactggttctctcctcatgtcctctcaccccatgaggttgtrttgtgtcttctaagcgtggtactagtgcttgccacctggtcaccagacctccaaatatggctgccaccaccaggacctttccagttactccttatatgtgtgttctatggaggggcagggaagaggtggcacttgtgattgtgtgtagattggcagggggtccattcactttgggttccatcttgctttaaatttctttccttcattttgattaagagacctctttttgatctgtattgggctaaccagagccaaatacttttgaagagtttcccagggactagtcatggtaatagcatataattgatctgaatgagatggagagaagaatgaagaggtggtggttctgggtttgatttgagttcacctgtgggcagtgggcagtgtcttggtgaaagggagcggatactactttttgcctcactgtaaagtaccca

SEQ ID NO: 724716 - DNA, 670 bp, Homo sapiens
atctgaagataaaatgttaagaagaaaatcctagaaaaacatgtcacatatattctacccaccgaaccaaacaaaaacaaaaaagaaacacttaatttttaataatgggcgcaagaagtactcaaagtaataaataataataataataaaagttacttcttagcctgactgtcctggacgagaattccgtccccacttgcaggtcgggcactgagtgcctggacagagagttaggtcccccgcttaccccgccctaaggctgcggaaggcggcgccatcggtcgccatggaaatcgcggcggatgggcggatcctgggcaggttggctgggtcgggctgcccgggcgacgccggagttgcagttggaggctgcgggaatacaaaggtaagagagcaactcctgggttcccttgactcgcaagggcttgacccctgcccgggktctgggaaagtgaagcagaaagtcgcctcccagcgcagaatattcaaatttgccagatgatcagaattacgctgatttaaaacccaaaccctccctagtttcccactcctgccctgctaaatcaaaatctcccagccaggatccggaatctggatttaaccaggggccgtttatagagttgggagattggtagatacgaggttcgcctattcttatttctcaacgcca

SEQ ID NO: 724717 - DNA, 670 bp, Homo sapiens
atctgaagataaaatgttaagaagaaaatcctagaaaaacatgtcacatatattctacccaccgaaccaaacaaaaacaaaaaagaaacacttaatttttaataatgggcgcaagaagtactcaaagtaataaataataataataataaaagttacttcttagcctgactgtcctggacgagaattccgtccccacttgcaggtcgggcactgagtgcctggacagagagttaggtcccccgcttaccccgccctaaggctgcggaaggcggcgccatcggtcgccatggaaatcgcggcggatgggcggatcctgggcaggttggctgggtcgggctgcccgggcgacgccggagttgcagttggaggctgcgggaatacaaaggtaagagagcaactcctgggttcccttgactcgcaagggcttgacccctgcccgggttctgggaaagtgaagcagaaagtcrcctcccagcgcagaatattcaaatttgccagatgatcagaattacgctgatttaaaacccaaaccctccctagtttcccactcctgccctgctaaatcaaaatctcccagccaggatccggaatctggatttaaccaggggccgtttatagagttgggagattggtagatacgaggttcgcctattcttatttctcaacgcca

SEQ ID NO: 724718 - DNA, 1066 bp, Homo sapiens
tttattttttcctttactcatatttgacagtgtttctctcaaggatgaaacacagactacttatatcagaatctcctggacctcaccccagagctactaaatcagaattctgggggtacaactggggaatctgcctttttaatcaagctcccaaggtgtgatacttatagatacattttccagaaatgtttcactgaagcaacgttcttctttccatatattagactatgcatcagccagacactagtcctaatcctaaactaagcattttatcagttaggctcttaagtataagttttggagttttagtggcaaatttctttacccagattggactgcctaatcttatttggcaaagcattagtcctataggtctcagcttgggctgctcattagaaacacctggagagcttcattagcacctgctgaccagaacacatcccacaccaattacgtcrggatctgctggggaggagggcggggcggggcgcagggcggcggagggggagtggtgggtgcggcgaccaggctacccaggtgtttccaatgtgcagccaaggcggagagccaggggtacttgtccatactagcatttacatcctcttgttctgcctacgcaaatgttggaatatttaccagcggctctttcctagaatggtactaatcagtttattcattttagtgaattttatgcagaaatttgaactgtattttatttatttcttggagactgacttgatctttgtgttgttattcctttgccttcacttatctacaagatgcttagttttcctggtctaggctggaagcacagtaagcttttctggagatatttttatactgaaatttccagaaatcctgtgagagattgaatcaaaattagatgctcagggctttggtttcatcacgttagagtgctaatggcaagcaagaacagttttctcacattacaaagcagacctagaacacaggcagccccggaagacactgggaagtagacatagtgatttgggactaattcatatttttccaggaggttcctagagggcagaaggtccgctcctca

SEQ ID NO: 724719 - DNA, 1066 bp, Homo sapiens
tttattttttcctttactcatatttgacagtgtttctctcaaggatgaaacacagactacttatatcagaatctcctggacctcaccccagagctactaaatcagaattctgggggtacaactggggaatctgcctttttaatcaagctcccaaggtgtgatacttatagatacattttccagaaatgtttcactgaagcaacgttcttctttccatatattagactatgcatcagccagacactagtcctaatcctaaactaagcattttatcagttaggctcttaagtataagttttggagttttagtggcaaatttctttacccagattggactgcctaatcttatttggcaaagcattagtcctataggtctcagcttgggctgctcattagaaacacctggagagcttcattagcacctgctgaccagaacacatcccacaccaattacgtcaggatctgctggggaggagggcggggcggggcgcagggcggcggagggggagtggtgggtgcggcgaccaggctacccaggtgtttccaatgtgcagccaaggcggagagccaggggtacttgtccatactagcatttacatcctcttgttctgcctacgcaaatgttggaatatttaccagcggctctttcctagaatggtactaatcagtttattcattttagtgaattttatgcagaaatttgaactgtattttatttatttcttggagactgacttgatctttgtgttgttattcctttgccttcacttatctacaagatgcttagttttcctggtctaggctggaagcacagtaagcttttctggagatatttttatactgaaatttccagaaatcctgtgagagattgaatcaaaattagatgctcagggctttggtttcatcacgttagagtgctaatggcaagcaagaacagttttctcacattacaaagcagacctagaacacaggcagccccggaagacactgggaagtagacatagtgattygggactaattcatatttttccaggaggttcctagagggcagaaggtccgctcctca

SEQ ID NO: 724720 - DNA, 596 bp, Homo sapiens
ctgtctcatgctcaagagcaggcattgtatccaaagatgaaagagtcttctttgtggaattctttttatgaaggcaaggtcttgctctgtcacccaagctggagtgcagtggcacgatcatgactctctgcagcctcaactttgtgggcccaaatgatcctcccacttcaaccttctgagtagctgggactacaggcatgcaccaccatgcctggctaattaaaaaaattaaaagaattgtagagacggggtcctcttatgttacccaggctggtctcgaacttttgacctaaagtgatccaccttggcctctgtggagttcttttaggtgaccctattgtattatctttggtgccttataggggttttatttcctcaaaagtgtaccatttgtctgttggcaaccaaaaaaatgtgttgaatggaatggaattttggaaacaagagcttccagggaaaaagtatttttggggagtggcttaattctgatagagaccatatgacctccaagtggattagctttcaatgaatkctacaaaccagaagagtctttcccccatcttcatcttcattctctaactttgtaggaaatagtt

SEQ ID NO: 724721 - DNA, 603 bp, Homo sapiens
tgttttgttatttcttcctagcatttgccaccacatgacatattatytctgtatctctttattgtctacctcttctgaaaaggatgcagagtaaatgagagaaggggctttgcttgttcactgctgtatcttcagtgttgaggctggtgtcctgaacttggaaagggaggggagaggctggatagctatttgttgaaagaatgaataaatgaagtagctgagaggtaacagtggagttcaggctagagattagtttttttccttactttgtgtgtggcaaatactctccaggaggagaaaacactgctggcaagacagcagcaacaaaaagcacgggactggaacaaataattgaagactctggttgccactcatgggtggtataaacatcacttggaatttacaaaacacacaggcccatgcttaaccactgaagaattagctttaggaaataaaggtagaggatgggcaactatatgttttaaagttcccccaagtgattctgatgtccaatccctgttaaaagcacatatttggagaaaaagtctcaaaaggcatgtggtaaagtatgcagtaaataaaataacacacatttgttttttt

SEQ ID NO: 724722 - DNA, 970 bp, Homo sapiens
ggtgctgtggctcacgcctgtaatcccagcactttgggaggctgaggtgggctaatcacctgaggtcagaagttcaagatcagcctggccaacatggtgaaacactctctctactaaaaatacaaaaattagccaggcttggtggtgtgtgcctgtagtcccagctactctggaggctgacaacgggtgaacccaggaagcggagggtgcagtgacctgaaatcgcaccattacactccagcctgggcgagacagtgagactctgtccccsgcaaaaacaaaaacaaacgactactatcaccactgaaatgcctcaattctaaaatagctggttatatgattatgaatgaagccttctttttagtttagcctattactaactgcttgtctgaaagtaatgtaagaattagaagcaaaagataataaaccttcaaaacttaaaaaagaatacattaataggccgggcacagtggctcacgcctgtaatcccagcactttgggaggctgaagtgggccggatcacctgagctgaggagttcgaaactagccttgccaacatggtgaaaccccgtctctactaaaaatacaaaaaaattagccaggcgtggtggcacggcacctgtaatcccagctactcaggaggctgaggtacaagaatcacttgaacccgggaggtggaggttgcagtgagccaagattgcgccattgcattccagcctggaagacaaagtgagactgtctcaagaaaaaaaaaaaaggaataccttaataagtgacagatgataagaactgcagtgataacgaaaaggcgtagtaagtcaaaaattctatgtgtttgacacatgagatctttaaaaagtcaaaactatatctgtaacccatggtgatctgaaattcattttacaaaagttcattgtattttaatactgccaataggcagaaataataataaaaccacaacttagaatag

SEQ ID NO: 724723 - DNA, 970 bp, Homo sapiens
ggtgctgtggctcacgcctgtaatcccagcactttgggaggctgaggtgggctaatcacctgaggtcagaagttcaagatcagcctggccaacatggtgaaacactctctctactaaaaatacaaaaattagccaggcttggtggtgtgtgcctgtagtcccagctactctggaggctgacaacgggtgaacccaggaagcggagggtgcagtgacctgaaatcgcaccattacactccagcctgggcgagacagtgagactctgtcccccgcaaaracaaaaacaaacgactactatcaccactgaaatgcctcaattctaaaatagctggttatatgattatgaatgaagccttctttttagtttagcctattactaactgcttgtctgaaagtaatgtaagaattagaagcaaaagataataaaccttcaaaacttaaaaaagaatacattaataggccgggcacagtggctcacgcctgtaatcccagcactttgggaggctgaagtgggccggatcacctgagctgaggagttcgaaactagccttgccaacatggtgaaaccccgtctctactaaaaatacaaaaaaattagccaggcgtggtggcacggcacctgtaatcccagctactcaggaggctgaggtacaagaatcacttgaacccgggaggtggaggttgcagtgagccaagattgcgccattgcattccagcctggaagacaaagtgagactgtctcaagaaaaaaaaaaaaggaataccttaataagtgacagatgataagaactgcagtgataacgaaaaggcgtagtaagtcaaaaattctatgtgtttgacacatgagatctttaaaaagtcaaaactatatctgtaacccatggtgatctgaaattcattttacaaaagttcattgtattttaatactgccaataggcagaaataataataaaaccacaacttagaatag

SEQ ID NO: 724724 - DNA, 970 bp, Homo sapiens
ggtgctgtggctcacgcctgtaatcccagcactttgggaggctgaggtgggctaatcacctgaggtcagaagttcaagatcagcctggccaacatggtgaaacactctctctactaaaaatacaaaaattagccaggcttggtggtgtgtgcctgtagtcccagctactctggaggctgacaacgggtgaacccaggaagcggagggtgcagtgacctgaaatcgcaccattacactccagcctgggcgagacagtgagactctgtcccccgcaaaaacaaaaacaaacgactactatcaccactgaaatgcctcaattctaaaatagctggttatatgattatgaatgaagccttctttttagtttagcctattactaactgcttgtctgaaagtaatgtaaraattagaagcaaaagataataaaccttcaaaacttaaaaaagaatacattaataggccgggcacagtggctcacgcctgtaatcccagcactttgggaggctgaagtgggccggatcacctgagctgaggagttcgaaactagccttgccaacatggtgaaaccccgtctctactaaaaatacaaaaaaattagccaggcgtggtggcacggcacctgtaatcccagctactcaggaggctgaggtacaagaatcacttgaacccgggaggtggaggttgcagtgagccaagattgcgccattgcattccagcctggaagacaaagtgagactgtctcaagaaaaaaaaaaaaggaataccttaataagtgacagatgataagaactgcagtgataacgaaaaggcgtagtaagtcaaaaattctatgtgtttgacacatgagatctttaaaaagtcaaaactatatctgtaacccatggtgatctgaaattcattttacaaaagttcattgtattttaatactgccaataggcagaaataataataaaaccacaacttagaatag

SEQ ID NO: 724725 - DNA, 1211 bp, Homo sapiens
acccaataggctaacagaaccaatacctgcaggatgtggagtataatctcccttcttctttcctctggtttttstgagtgtctccattagaacaatccacctgatcttctctttactcctctgattctaaagtttggcagaagaccctgagcacatccacttcagccccctcttgactcctgcctctctccatgcctgtgagtttcaaatctcagtcaatttctatgctgtcatgtgatgatcagggagggccaactctgccctgtttgggaggcatttggttgttcagctgcaccaattatcaggttggtaagttggcttaactcagtggtagggtattaagcctttttgcccatgcctttataaccacgttttccaatcatctctataataaaactatttgacctccatttgtctgtctcctgagtcttaattctgaattgattccaggctcaggaggggaagaacagggaattatttattgatcccctaaaccctaagagcagtgattataataaaacactggatgacattatcagatatttattattatcagatcaatcattgtttaacagtcttaattcctttcatgactccataacaagacaatattctatagagaatccacagaatgtacacaccaaagggtcagtaaaagaggaatgcctttttaataataaatcattttttgtgtgttccaatattttcaaggaaggaaggcctcaggaagagatttatattaagagtctgacagttcatttggaaacctcataaggcaaaagttaggagtatagttattagaacaactctcaggttagtcacgcttcctgtctctttcctcccctcatccattaaaaagaggaggaagaaagaaaataagtttcataagttgaagttggatttagctaaggtcacttgaaataaccagcagtattttttcactgcctatataaaataataaaagatgctcatatgttgactgatgtgtgtggaactacttgcacagccttcataacaaagagctctggggttttgaagatgggtattttaattgaaaacaactacgaaaaataaacttttatatgattaacgtaaaccagttttacttaacattacacaattactaatacaaattgtaaaagttttgccaatatgctaaatcctttattcctctctctagtgcatatcctaaatgcaatcaaaggtgatga

SEQ ID NO: 724726 - DNA, 1211 bp, Homo sapiens
acccaataggctaacagaaccaatacctgcaggatgtggagtataatctcccttcttctttcctctggtttttgtgagtgtctccattagaacaatccacctgatcttctctttactcctctgattctaaagtttggcagaagaccctgagcacatccacttcagccccctcttgactcctgcctctctccatgcctgtsagtttcaaatctcagtcaatttctatgctgtcatgtgatgatcagggagggccaactctgccctgtttgggaggcatttggttgttcagctgcaccaattatcaggttggtaagttggcttaactcagtggtagggtattaagcctttttgcccatgcctttataaccacgttttccaatcatctctataataaaactatttgacctccatttgtctgtctcctgagtcttaattctgaattgattccaggctcaggaggggaagaacagggaattatttattgatcccctaaaccctaagagcagtgattataataaaacactggatgacattatcagatatttattattatcagatcaatcattgtttaacagtcttaattcctttcatgactccataacaagacaatattctatagagaatccacagaatgtacacaccaaagggtcagtaaaagaggaatgcctttttaataataaatcattttttgtgtgttccaatattttcaaggaaggaaggcctcaggaagagatttatattaagagtctgacagttcatttggaaacctcataaggcaaaagttaggagtatagttattagaacaactctcaggttagtcacgcttcctgtctctttcctcccctcatccattaaaaagaggaggaagaaagaaaataagtttcataagttgaagttggatttagctaaggtcacttgaaataaccagcagtattttttcactgcctatataaaataataaaagatgctcatatgttgactgatgtgtgtggaactacttgcacagccttcataacaaagagctctggggttttgaagatgggtattttaattgaaaacaactacgaaaaataaacttttatatgattaacgtaaaccagttttacttaacattacacaattactaatacaaattgtaaaagttttgccaatatgctaaatcctttattcctctctctagtgcatatcctaaatgcaatcaaaggtgatga

SEQ ID NO: 724727 - DNA, 1211 bp, Homo sapiens
acccaataggctaacagaaccaatacctgcaggatgtggagtataatctcccttcttctttcctctggtttttgtgagtgtctccattagaacaatccacctgatcttctctttactcctctgattctaaagtttggcagaagaccctgagcacatccacttcagccccctcttgactcctgcctctctccatgcctgtgagtttcaaatctcagtcaatttctatgctgtcatgtgatgatcagggagggccaactctgccctgtttgggaggcatttggttgttcagctgcaccaattatcaggttggtaagttggcttaactcagtggtagggtattaagcctttttgcccatgcctttataaccacgttttccaatcatctctataataaaactatttgacctccatttgtctgtctcctgagtcttaattctgaattgattccaggctcaggaggggaagaacagggaattatttattgatcccctaaaccctaagagcagtgattataataaaacactggatgacattatcagatatttattattatcagatcaatcattgtttaacagtcttaattcctttcatgactccataacaagacaatattctatagagaatccacagaatgtacacaccaaagggtcagtaaaagaggaatgcctttttaataataaatcattttttgtgtgttccaatattttcaaggaaggaaggcctcaggaagagatttatattaagagtctgacagttcatttggaaacctcataaggcaaaagttaggagtatagttattagaacaactctcaggttagtcacgcttcctgtctctttcctcccctcatccattaaaaagaggaggaagaaagaaaataagtttcataagttgaagttggatttagctaaggtcacttgaaataaccagcagtattttttcactgcctatataaaataataaaagatgctcatatgttgactgatgtgtgtggaactacttgcacagccttcataacaaagagctctggggttttgaagatgggtattttaattgaaaacaactacgaaaaataaacttttatatgattaacgtaaaccagttttacttaacattacacaattactaatacaaattgtaaaagttttgccaatatgytaaatcctttattcctctctctagtgcatatcctaaatgcaatcaaaggtgatga

SEQ ID NO: 724728 - DNA, 577 bp, Homo sapiens
ccatacacacacaaacacactcattcacacagtcacacatgctccagaagcaacaacagctgggttctcattatctagggcagtgcttctcaactccatctccaccttagactcacccagggagctttataaattacctgtacctgggctacaccctagataagttaaatcagaatctctcagagtggtacccagtcatgatattttatcaaatcaccccaagtgatgtcatgtccatgcaaccagataggaccctctcccatcccccttctcacctgaaaggaacttgcattagcccagctctacctttctctctctctctctgccccagcaccatattgtagacaccaaaggagttgcagcmgcagaaactgtgcctggatggcaacatgcctacagcatcatcaggatccaatcaggaaagcagaacaaattctggactatttaacacagagaatttaacatagggaattggttacacaggtgatgaagtttgccaaaaaagcaaacaagaaattgtgatgcagcatcagcaacagacagaagccccagctacacttaggttggagggaaaaat

SEQ ID NO: 724729 - DNA, 1143 bp, Homo sapiens
ttttatgtttctctattaggtacctgtaagctacacacattggccatagattgactgaagtcctattcttaagacggaagattctagtatgatgtcggacttaaaaacttaaccagattagatattgtagaatacaatcttttacaaatgaattgatttttctctccaaaccttttgcaaaatttccgtaagagagactcatggacttggaaaattctctgtgaagctgcttttggcaaagtcctggcaaagaaacacttttgctatttcagatcctattctttaagcctcaacttactattcttatttcgtgctattcagttttttactcttctgaggtctctatgaatctccactgttttggatctctgagtacttacatcattcccactttaagacttgtttgggtattcttttttaatttattttttatttatttatttttgtttttttccccatccagaactcatgttgagtggttggatattctcgtggggtgcttttgtggtttcttgacttgttcctaactaaagtgtaagttctgttaaagtgattagtatccctgttctggaatctcccctcactctctacaagcccctaatacaataaatccataataagtgcccagttaagtaggttgcattgtttggaagtctatcaagggactaaagttaaaggatggtcatattttatgctttgcacattgagttgaaaagttagctgcagacagaaaactgatctaagtcaaaagtcttagactggagtctcatcagtgttgctcaattgacctggtgatctttggcctgagattcaacctctgtgtctttaccagtgatttatgaatacctaagttttcttttatcccaaatgttctaagatagcttgattgctctatagtagtggttttccaagtgtggtacctagatcaagaacagcatcatcttggaacttgttaaaaatgtaagttatttgacccagtcgcaggctactgaattagaaactctcaagctcgcrgacaagccctcctggtgattatgatgcacgataaaggctgagaactactgatctggagtatagtcaaatttgtggtatagagagaagctctataccacaatgttagcagacattgaagattgtgtagca

SEQ ID NO: 724730 - DNA, 1054 bp, Homo sapiens
tgctgctcacttcctctggtcagaactggttcaggaagtaggcaggactaaagccacaggtaaaagacacacacaacttgagcctgaaaggtgaggaaggccagcaattgacctttggtgggggtggatggggcaattcttttgttgtttaacatcttggaggagaaaagtttttgaaacctagtgcatcaagaaaacacctcaaacctcaaaagggaatgggctaagacttgagaagactttcacctcctctctcccaagcataggaagtaacaaagacctcttccaacccaatcccaagcctctgcaktctacagagctggtttcaggagactattacatcaattccaaagcaagcaatcactttcagaattatttttcatccgcagaaatgtccatgaagtaaaagtctccgtcaactcccacaatctttcccaactccacctgccaccctccaaacacttcagatctattaatgaaaataatttttctaattttgatgtgatataaattctaagtctgggaacaaaaatacaaatattatcatgttgtaaatattaatacttcaaaagaccatctggaggatgctcccttgaatgctctgaaaatcacaattactgataactgcattgtgcataattaccacattttatgaataatcttttatttatccatcacatcatgggggtcagtttaattattgtttcctcttaacagaaaagaaaaactgtctccagaggtaatgactgacttgcccaagttcatgcaaccaggaaggtcaaggctgggtgtataagtcccagttctctgactctacagcttatactgtgtcccttcccaccacactacactacctctacacttcaagaatctctcttccaaagaaatagaggtcaggttaccatgtccactgcaagcctactcttcaagatatggctctttgcttggcattaagccaccgccaccaccctccaactttggtacaactgaacaaacttgtttttgaaggtccttcaagaaaagactaataaagccctatggcttagttaagacc

SEQ ID NO: 724731 - DNA, 1223 bp, Homo sapiens
tctccttccggaaagtaaaggaaagaggcatgaattgctcttgagtgtctggctgtatgtcaacaagtggcctctctgttccttggtttccaggcgctggccatgtggtctgtccaggaaggagagtgtaaatgtgataatattgcctgctacacaagaagcatcagccctaggaaaaaacccttcattacaggaaggaagaaagatctagggaactcycccagtgtcaaggaacctggggagggaaattagccacaagagagtcacttgctgagcatggaatcagtgcatgttttggtggaggattctgttggctgcttgaggtttttttttctctactttatggtagcaccacctacctaatgaccatctggcacaaagttttcctttctgaaactgtgcagcttaatgctgacaaattctaagccgcaactctcctttttgtgatatcatttcttacaacttagagaaacctgcggtttcagggtcctttacttcctatgtgtcatagttatgatgacagctaaatttactttagttacatttcacattggctacttctggacaccccaagtcatcagtcaattttctctgcatcacactgtagaatggcttgtttctggggaggttcgtggacatggctaattcccctccttttttttttttttttcccaaaaacccgtttgcactcctaaaagatggctaattgtagccattatttgctgcttctagtaatctctctctccattctgaaagaacaatttagcttcccagctcgtagcatataacaatggcttgcagaatttcttattttgactggtgtgtggggtgtgtttatgtatgtgtttgtttaggagagaagaattatggccagttttttattcatgacatttatcatctttatttctccatactgattctaaagattgaaaatgcttttaattttaatgttaatttttttgtacatagtatttatgtctttaatataacatgtgcttatttattactgtatgcaagtgacttaaatattgaacctttcaaaataagaaatttcttcaatttttatcatttgagaaaaatatactctttctggggaatgatttctgtaatagatacggtttattttaattgtggtgataaaccatgccttcagtagagacctctgagagtaacaatagcagctaatttatttttagctgttatttgcagagaagtgtagttta

SEQ ID NO: 724732 - DNA, 1223 bp, Homo sapiens
tctccttccggaaagtaaaggaaagaggcatgaattgctcttgagtgtctggctgtatgtcaacaagtggcctctctgttccttggtttccaggcgctggccatgtggtctgtccaggaaggagagtgtaaatgtgataatattgcctgctacacaagaagcatcagccctaggaaaaaacccttcattacaggaaggaagaaagatctagggaactcccccagtgtcaaggaacctggggagggaaattagccacaagagagtcacttgctgagcatggaatcagtgcatgttttggtggaggattctgttggctgcttgaggtttttttttctctactttatggtagcaccacctacctaatgaccatctggcacaaagttttcctttctgaaactgtgcagcttaatgctgacaaattctaagccgcaactctcctttttgtgatatcatttcttacaacttagagaaacctgcggtttcagggtcctttacttcctatgtgtcatagttatgatgacagctaaatttactttagttacatttcacattggctacttctggacaccccaagtcatcagtcaattttctctgcatcacactgtagaatggcttgtttctggggaggttcgtggacatggctaattcccctccttttttttttttttttcccaaaaacccgtttgcactcctaaaagatggctaattgtagccattatttgctgcttctagtaatctctctctccattctgaaagaacaatttagcttcccagctcgtagcatataacaatggcttgcagaatttcttattttgactggtgtgtggggtgtgtttatgtatgtgtttgtttaggagagaagaattatggccagttttttattcatgacattyatcatctttatttctccatactgattctaaagattgaaaatgcttttaattttaatgttaatttttttgtacatagtatttatgtctttaatataacatgtgcttatttattactgtatgcaagtgacttaaatattgaacctttcaaaataagaaatttcttcaatttttatcatttgagaaaaatatactctttctggggaatgatttctgtaatagatacggtttattttaattgtggtgataaaccatgccttcagtagagacctctgagagtaacaatagcagctaatttatttttagctgttatttgcagagaagtgtagttta

SEQ ID NO: 724733 - DNA, 1223 bp, Homo sapiens
tctccttccggaaagtaaaggaaagaggcatgaattgctcttgagtgtctggctgtatgtcaacaagtggcctctctgttccttggtttccaggcgctggccatgtggtctgtccaggaaggagagtgtaaatgtgataatattgcctgctacacaagaagcatcagccctaggaaaaaacccttcattacaggaaggaagaaagatctagggaactcccccagtgtcaaggaacctggggagggaaattagccacaagagagtcacttgctgagcatggaatcagtgcatgttttggtggaggattctgttggctgcttgaggtttttttttctctactttatggtagcaccacctacctaatgaccatctggcacaaagttttcctttctgaaactgtgcagcttaatgctgacaaattctaagccgcaactctcctttttgtgatatcatttcttacaacttagagaaacctgcggtttcagggtcctttacttcctatgtgtcatagttatgatgacagctaaatttactttagttacatttcacattggctacttctggacaccccaagtcatcagtcaattttctctgcatcacactgtagaatggcttgtttctggggaggttcgtggacatggctaattcccctccttttttttttttttttcccaaaaacccgtttgcactcctaaaagatggctaattgtagccattatttgctgcttctagtaatctctctctccattctgaaagaacaatttagcttcccagctcgtagcatataacaatggcttgcagaatttcttattttgactggtgtgtggggtgtgtttatgtatgtgtttgtttaggagagaagaattatggccagttttttattcatgacatttatcatctttatttctccatactgattctaaagattgaaaatgcttttaattttaatgttaatttttttgtacatagtatttatgtctttaatataacatgtgcttatttattactgtatgcaagtgacttaaatattgaacctttcaaaataagaaatttcttcaatttttatcattwgagaaaaatatactctttctggggaatgatttctgtaatagatacggtttattttaattgtggtgataaaccatgccttcagtagagacctctgagagtaacaatagcagctaatttatttttagctgttatttgcagagaagtgtagttta

SEQ ID NO: 724734 - DNA, 632 bp, Homo sapiens
tgactcagtttccaaccttaactttccctttggcattgtgagtttgggatcctaaagactctattttctttcacacagtaaagacatcagaacaacttggaaggcaaccaaaatgacacacttaactatagtcattcatttttctttggtaagtgaaaacatgactgaagtcacccaaatattttaatgcagaatgctaagktttcttttaagtgtataaattccacctcatacaagagagagtgatttctgtatgtaaagaaatctcagtattctttaattggtatagcttgagttgtcacctatcttgcctactcagaaatctccctacagagactctatgtgatattgggaacccatggatcctaccagtaaatactactaggaactgtgaaggtaaatgtgttctttcttgcagaaaattgtttggggagaaaaagcagcctagaaaaggctagtgctaagaggctgtgaagattccctacagtgctggaacagcaggagtttggagttgagtcagctggcgcaggtggcaatggttccctaaaatgaatttttgttgttcatgagcatttcctatgcatgtgcagaagtaagtgggaaatatctgggaaaggggagtgatgtgggta

SEQ ID NO: 724735 - DNA, 1523 bp, Homo sapiens
taaattaagagtttctagctacttaaataatgaaaatcagatctctgttataatatttatggtgagaatgttaaagaaattgatgtacgactcactttagtattttagtttaagtaaatttaaggagatctagaagactgtgtgtttccttttagaagtgcagtttgtcttaggtttcagctgagctatgtctcaatatgagtcagacacctccatctggtggcccagccrtaaaattcccatgccatactttttcaagctgctctctacatttgtgttgtttcaaatttctgagtttttaaattaataacttaatcctattttaaatgtttttctcaaaatgtatttctcatgcaaaagtgaatgatagtcaaaataattagtgacctttaggaacctaagcattgtctcatctgtttctacaagtcactactaatcatgaaagacagatgcatccttatggccagtgaaaatagcattttcttctatttctctgaagagaagaaaagagtttcttttaaattgtttaatatttaaattatcatttcacagtgatgtaggcacagctcttttcaatattctgttttatcagcctatgattatttattaaggaacaagagcaaaagcctcattttaaaaccaaggtatatcatcccttttgctttctcacaatttaccaaattaattcttttattatagagatatttttattttatattattttgcccaatattcttcctgaagaatcagtgctgatgtttattcaacatacataaaattgggattatgtagggtttttttctaatatctttagaatacttgagaatctgcaaatatataactttaatgtcatttattatttcactcaactcataatgggattttttcaatcattaaacaatccatctctctattctacaatcccaaatcactgccctgtgcttaccccacctctgctctcaaaccattctgatgccttcaaaatatgagctgggactcacatttaattttttaaatgagttaataaatgctgtgtttcaacagaatcctttatttatttattccgttaaatccagccatctatttaaacaggaatctcctcttactgtatatatgattgatattatatatatatatatatgattggagagttcagtgactaatgaggcttctgattacctggtacataacataactaacttcttaatcttgccatgttaatatttatgaaaacttttaaatttttatttgatatgtcctatctctttctcttagcatcattccgtcaatgttgagtgcatattaactgtaattaactaattttccttcatcctgtgtcctgtatgagaacaacagttctgtcattgttaacttattctgtgtttcaaatgtcatatagattatacactcttgttcactcattcttttgattcatgtgcagcactctttagccattgtccattgactagtaaaactcccactttgaagaaataagaataaaaacattatcgattaaaaaaata

SEQ ID NO: 724736 - DNA, 1523 bp, Homo sapiens
taaattaagagtttctagctacttaaataatgaaaatcagatctctgttataatatttatggtgagaatgttaaagaaattgatgtacgactcactttagtattttagtttaagtaaatttaaggagatctagaagactgtgtgtttccttttagaagtgcagtttgtcttaggtttcagctgagctatgtctcaatatgagtcagacacctccatctggtggcccagccgtaaaattcccatgccatactttttcaagctgctctctacatttgtgttgtttcaaatttctgagtttttaaattaataacttaatcctattttaaatgtttttctcaaaatgtatttctcatgcaaaagtgaatgatagtcaaaataattagtgacctttaggaacctaagcattgtctcatctgttyctacaagtcactactaatcatgaaagacagatgcatccttatggccagtgaaaatagcattttcttctatttctctgaagagaagaaaagagtttcttttaaattgtttaatatttaaattatcatttcacagtgatgtaggcacagctcttttcaatattctgttttatcagcctatgattatttattaaggaacaagagcaaaagcctcattttaaaaccaaggtatatcatcccttttgctttctcacaatttaccaaattaattcttttattatagagatatttttattttatattattttgcccaatattcttcctgaagaatcagtgctgatgtttattcaacatacataaaattgggattatgtagggtttttttctaatatctttagaatacttgagaatctgcaaatatataactttaatgtcatttattatttcactcaactcataatgggattttttcaatcattaaacaatccatctctctattctacaatcccaaatcactgccctgtgcttaccccacctctgctctcaaaccattctgatgccttcaaaatatgagctgggactcacatttaattttttaaatgagttaataaatgctgtgtttcaacagaatcctttatttatttattccgttaaatccagccatctatttaaacaggaatctcctcttactgtatatatgattgatattatatatatatatatatgattggagagttcagtgactaatgaggcttctgattacctggtacataacataactaacttcttaatcttgccatgttaatatttatgaaaacttttaaatttttatttgatatgtcctatctctttctcttagcatcattccgtcaatgttgagtgcatattaactgtaattaactaattttccttcatcctgtgtcctgtatgagaacaacagttctgtcattgttaacttattctgtgtttcaaatgtcatatagattatacactcttgttcactcattcttttgattcatgtgcagcactctttagccattgtccattgactagtaaaactcccactttgaagaaataagaataaaaacattatcgattaaaaaaata

SEQ ID NO: 724737 - DNA, 852 bp, Homo sapiens
tgcagtggctcagacctgtaatcccagcactttgggaggctgaggcgggcagatcacgaggtcaggagttcaagaccagcctggctaacatggtgaaatcccctctctactaaaaatacaaaaattagccagatgtgtggcaagctcctgtaatcccagctactcaggaggctaaggcaggagaattgcttgaacccaggagacagaggttgcagtgagctgagattgtgccactagactccagcctgggcaacagagagagactctgtctcaaaagacaaacaaagaaacaaacaaaaccttgtgttttctccaataagtagctcttctatcatggttttaaaaatagcatgcgataatatttcactaggtaaaataactagtcaaggaatttatttaaatagattcaaatggctccactatatttaattattttagaaaaggtttccgtgatacactgttagataaaaacatttgctaagttataggtatagtgtgatgaaattcttgataaaaatgataacaaaaccataacctatatagctgcatgtatatttatatattaatacatttgcaaaggcaaaggaaaaacagggaaaaacagcaaattattaccagtgagtccattaggagattaggaatcaaggagagactgcaaactttaatagagctacacaaaacttttttgagyaattaaagatagaattttctacctttgcaattcagatgatggagatacatgagctgactgaaacaaatacaaatgttcctgagcagcactgtccaatagaaatgtattgcaaggcacaaatgcaagccacatacgtatttttcagtttctagtagccacat

SEQ ID NO: 724738 - DNA, 1376 bp, Homo sapiens
catctccaaaaaaagaaaaaaaaagtaatggttcagaaagctttacttttagtctcatcatctactgttgagtatctacttagtgaaatggaggtttgttttaatcagtttggatttgccaatatatgattctagcttataataaggaaatacaatagtaaccacaacacaggggtccctaacccatgggccatggaccagtaagggtccatggtctgttaggaaccggaccacacaacaggaggtgagtggtaggtgaaaagagcattaccacctgagctccacctcctgtcagatcagtagcattagattctgataggagcgcaaaacctactgtgaactgtactcctatgagaatctaactaatgcctgatgatctgaggtgcaacagttgcatcccaaaaccacccccacctccatcagtggagaaactgtcttccatgaaactagtccctggtgccaaaaaggttggggaccactgccttaacacttttattatttaaattcctgcaggaaagaagtacacttatacctttgcaactctaaaactctctagttcctaaacctcccttctccattgaaataactttttataatttcaaaaaatgtatcaaggcttaagaatgaagctatccttttatagcagaatggactggaacaacagaataagtctgtctcctcccttctatgatttctgattttacatgtctgaatcaaatataacattgtaatgggagtaatactaaaagcttagaaaagttttcaaatattgttttaaaagcagcagtttacatagaaataactgatgtgctaacatgatctaaaacaagttccactaagaatttctttgtaggaggcactattttgttggccaggtrtaacaacaccatacatagacttgcaattcagagtctttacgaatttatcttttaaatgtcttttgaattcatccactaatttagctatcatcaactctctcctgaattattgcaacagctccctaaatctagttttcaattcactccctttactaaagtcccaatactctttccaaaggtcagaaacaaatttgtgacatagtattacatggacttatttatgcattaaatagtatgatatggtggcaggtttaaaaagtgttttcattttgaagaagtgatactctgagatacttacaacaactctaatatagtacgaaaatatctgagatttctgttgatgacaaaggcagttactgtaataccactatagcttgttgcctacattcattaaatgaagaaaacattaaacaatttatgaaaacaatgaaacaaaatttttgtcgatgaaattttgtcaatgaaaacaaaaatgtaatcttttttctaagttcatgg

SEQ ID NO: 724739 - DNA, 607 bp, Homo sapiens
cactggcttgccacaaaacctaaaattcttctattctttcattggcaatttatttcccctgaaaatgtaaataatctctggcagagcaatctattaagtgatcatcagccactaacaccttagggtagaacagctcagatcasagtcttaaaataaattccatcagtatgaaattttctttattactgctccgctactggaatgttagatcactgtctgctttaataataattctggtgtaggtcattcaaattttgtttaagataataagacaaatagcaggtataaaaacattccgtcatctaataaagcaacccgagaacagtaagaagaacgtgatgaaattaacatttttgagtacctgctaggaatcaagtattctgctagatattttagaaatcatctcaattcaatcctaaaaattattctgtataatagtataggttgagtattcctaatccaaaaatctgaagctttttttttcctgagacggagttttgctcttgttgaccaggctggagtgcaatggcgcaatcctgactcactgcaacctccgcctcctgggttcaagtgattagggatactcaactggctaaatataatgcaa

SEQ ID NO: 724740 - DNA, 2207 bp, Homo sapiens
tggtttttgaagcattctttttcaagtgataaagcaaaaaatatataatcaagaattttaagtatatactttggaaatgttaaaaaggaacatgagtaatttattattatttttttaatttctagtcrgcaatgagagcccagtgtactttatgaagtagattggtttacaccaggagtgagcagacattttgtatgatgcacaaacaaggaatgatttttttgttttttaaatggttaggaaaatatcaaaataaaaaatgccagaaaaaatcaaaagaagggccaggtgcagtgtttcacacctgtaatcccagcactttgggaggccaaggtgggtggattctcttgaggtcaggagttcgagaccagcctggccaacatggtgaaaacctgtctctactaaaaatacaaaatagccgggtgtggtggcatatgcctgtaatcccagctacttgggaggctgaggcaggagagtcgcttgaagccagtggcagaagttgcagtgagccaagatttgagccactgcactccagcctgggcgacagaggagactctatctcaaaataaataaataaataaataaataaataaataaatcaaaagaagaataccctttcataatatgtgaaaattaaatgaaattcaaatttcagtgttcataaataaagttttaccggaacatagccatgctcaatcatttatgtattgttcatggcttcttttgcatacaacaacagagttgggtagttgtgacagactatgtagctcataaaatctaaatatttattatctagccctttatcagtaaactttgctgatccctgtataagtcctctgaatcaaattatttccaaagagttccgttataaaatttggagtttactctgctgtaaattgcaaagaaccatttggaaaacctcttttagtcaggtatttacattaaaatgttccttgatttgtaaacactaatattcaagactggtccaaaattataccaaattgaaactctcaagtgtttttaaacagtaggaagttttaactttttttttttcgtggagtagtctatcattcagcgtttactttggaacatttaattagtcttttttaaaaacccatgaaatttataataaaaattttaaatcattaatgttgagtaatcaaagaaaactttttttgttttctccatttgtaaaatgagtacattattattataatttgtctttggccataccttgttgataattacttatacaagtataagaagacatggtatgttttcctttttcctatttcacaagaataagtacaggaatttacttaagctgctccaaaactcagtgaaagagacaggattaggtttttttcagcattggattttaaatgatactagatggttgcgctgggctaaaatactaatgctttgtgtatatttttatgacttttttgaagacagcttaaaagctttattctagttataaaaatgatacatgttcactgtaaatagaaacaagtcaggtatacagagatacaaatatttagaacatgtggaaagaggcaacaaaattttataaaaagaaaaaagataaaaatctgaaatcattaatttataagggaaaaatcagggcaaggacaaattatattacagattggcctatggtgggagcacagattttatagagaaaagtcagtgaagacacttgcgaagagtgtgggtggaaatcactaagttttgcagtcccggggcctcttatgggttattactggtttgttctttttttttttttaatatgcattcctttggaaccaaaggtttattatgttttgaataaagtagaggtgtaagtaggatgcatataccatgatcttgactacttgagattcacaaagggttttcgtctcaggatttttttttctcttaaaaaaatttgtattaatttttaaattgtaaaaaaattcatcaacttaaccatttttatgtatagagttcaggagtattaggtatattcacttgtgcagcagatctctagaacttttttcatcttgcaaaactgaaactctgtacccattaaacaaccacttcccattttcctctcccccagcttctggcaaccattctagtttctgtttcttttctttttttttcttttgagatggagtctctgtcgcccaggctggagtgtagtggcatgatctcggctcgctgca

SEQ ID NO: 724741 - DNA, 2207 bp, Homo sapiens
tggtttttgaagcattctttttcaagtgataaagcaaaaaatatataatcaagaattttaagtatatactttggaaatgttaaaaaggaacatgagtaatttattattatttttttaatttctagtcagcaatgagagcccagtgtactttatgaagtagattggtttacaccaggagtgagcagacattttgtatgatgcacaaacaaggaatgatttttttgttttttaaatggttaggaaaatatcaaaataaaaaatgccagaaaaaatcaaaagaagggccaggtgcagtgtttcacacctgtaatcccagcactttgggaggccaaggtgggtggattctcttgaggtcaggagttcgagaccagcctggccaacatggtgaaaacctgtctctactaaaaatacaaaatagccgggtgtggtggcatatgcctgtaatcccagctacttgggaggctgaggcaggagagtcgcttgaagccagtggcagaagttgcagtgagccaagatttgagccactgcactccagcctgggcgacagaggagactctatctcaaaataaataaataaataaataaataaataaataaatcaaaagaagaataccctttcataatatgtgaaaattaaatgaaattcaaatttcagtgttcataaataaagttttaccggaacatagccatgctcaatcatttatgtattgttcatggcttcttttgcatacaacaacagagttgggtagttgtgacagactatgtagctcataaaatctaaatatttattatctagccctttatcagtaaactttgctgatccckgtataagtcctctgaatcaaattatttccaaagagttccgttataaaatttggagtttactctgctgtaaattgcaaagaaccatttggaaaacctcttttagtcaggtatttacattaaaatgttccttgatttgtaaacactaatattcaagactggtccaaaattataccaaattgaaactctcaagtgtttttaaacagtaggaagttttaactttttttttttcgtggagtagtctatcattcagcgtttactttggaacatttaattagtcttttttaaaaacccatgaaatttataataaaaattttaaatcattaatgttgagtaatcaaagaaaactttttttgttttctccatttgtaaaatgagtacattattattataatttgtctttggccataccttgttgataattacttatacaagtataagaagacatggtatgttttcctttttcctatttcacaagaataagtacaggaatttacttaagctgctccaaaactcagtgaaagagacaggattaggtttttttcagcattggattttaaatgatactagatggttgcgctgggctaaaatactaatgctttgtgtatatttttatgacttttttgaagacagcttaaaagctttattctagttataaaaatgatacatgttcactgtaaatagaaacaagtcaggtatacagagatacaaatatttagaacatgtggaaagaggcaacaaaattttataaaaagaaaaaagataaaaatctgaaatcattaatttataagggaaaaatcagggcaaggacaaattatattacagattggcctatggtgggagcacagattttatagagaaaagtcagtgaagacacttgcgaagagtgtgggtggaaatcactaagttttgcagtcccggggcctcttatgggttattactggtttgttctttttttttttttaatatgcattcctttggaaccaaaggtttattatgttttgaataaagtagaggtgtaagtaggatgcatataccatgatcttgactacttgagattcacaaagggttttcgtctcaggatttttttttctcttaaaaaaatttgtattaatttttaaattgtaaaaaaattcatcaacttaaccatttttatgtatagagttcaggagtattaggtatattcacttgtgcagcagatctctagaacttttttcatcttgcaaaactgaaactctgtacccattaaacaaccacttcccattttcctctcccccagcttctggcaaccattctagtttctgtttcttttctttttttttcttttgagatggagtctctgtcgcccaggctggagtgtagtggcatgatctcggctcgctgca

SEQ ID NO: 724742 - DNA, 2207 bp, Homo sapiens
tggtttttgaagcattctttttcaagtgataaagcaaaaaatatataatcaagaattttaagtatatactttggaaatgttaaaaaggaacatgagtaatttattattatttttttaatttctagtcagcaatgagagcccagtgtactttatgaagtagattggtttacaccaggagtgagcagacattttgtatgatgcacaaacaaggaatgatttttttgttttttaaatggttaggaaaatatcaaaataaaaaatgccagaaaaaatcaaaagaagggccaggtgcagtgtttcacacctgtaatcccagcactttgggaggccaaggtgggtggattctcttgaggtcaggagttcgagaccagcctggccaacatggtgaaaacctgtctctactaaaaatacaaaatagccgggtgtggtggcatatgcctgtaatcccagctacttgggaggctgaggcaggagagtcgcttgaagccagtggcagaagttgcagtgagccaagatttgagccactgcactccagcctgggcgacagaggagactctatctcaaaataaataaataaataaataaataaataaataaatcaaaagaagaataccctttcataatatgtgaaaattaaatgaaattcaaatttcagtgttcataaataaagttttaccggaacatagccatgctcaatcatttatgtattgttcatggcttcttttgcatacaacaacagagttgggtagttgtgacagactatgtagctcataaaatctaaatatttattatctagccctttatcagtaaactttgctgatccctgtataagtcctctgaatcaaattatttccaaagagttcygttataaaatttggagtttactctgctgtaaattgcaaagaaccatttggaaaacctcttttagtcaggtatttacattaaaatgttccttgatttgtaaacactaatattcaagactggtccaaaattataccaaattgaaactctcaagtgtttttaaacagtaggaagttttaactttttttttttcgtggagtagtctatcattcagcgtttactttggaacatttaattagtcttttttaaaaacccatgaaatttataataaaaattttaaatcattaatgttgagtaatcaaagaaaactttttttgttttctccatttgtaaaatgagtacattattattataatttgtctttggccataccttgttgataattacttatacaagtataagaagacatggtatgttttcctttttcctatttcacaagaataagtacaggaatttacttaagctgctccaaaactcagtgaaagagacaggattaggtttttttcagcattggattttaaatgatactagatggttgcgctgggctaaaatactaatgctttgtgtatatttttatgacttttttgaagacagcttaaaagctttattctagttataaaaatgatacatgttcactgtaaatagaaacaagtcaggtatacagagatacaaatatttagaacatgtggaaagaggcaacaaaattttataaaaagaaaaaagataaaaatctgaaatcattaatttataagggaaaaatcagggcaaggacaaattatattacagattggcctatggtgggagcacagattttatagagaaaagtcagtgaagacacttgcgaagagtgtgggtggaaatcactaagttttgcagtcccggggcctcttatgggttattactggtttgttctttttttttttttaatatgcattcctttggaaccaaaggtttattatgttttgaataaagtagaggtgtaagtaggatgcatataccatgatcttgactacttgagattcacaaagggttttcgtctcaggatttttttttctcttaaaaaaatttgtattaatttttaaattgtaaaaaaattcatcaacttaaccatttttatgtatagagttcaggagtattaggtatattcacttgtgcagcagatctctagaacttttttcatcttgcaaaactgaaactctgtacccattaaacaaccacttcccattttcctctcccccagcttctggcaaccattctagtttctgtttcttttctttttttttcttttgagatggagtctctgtcgcccaggctggagtgtagtggcatgatctcggctcgctgca

SEQ ID NO: 724743 - DNA, 2207 bp, Homo sapiens
tggtttttgaagcattctttttcaagtgataaagcaaaaaatatataatcaagaattttaagtatatactttggaaatgttaaaaaggaacatgagtaatttattattatttttttaatttctagtcagcaatgagagcccagtgtactttatgaagtagattggtttacaccaggagtgagcagacattttgtatgatgcacaaacaaggaatgatttttttgttttttaaatggttaggaaaatatcaaaataaaaaatgccagaaaaaatcaaaagaagggccaggtgcagtgtttcacacctgtaatcccagcactttgggaggccaaggtgggtggattctcttgaggtcaggagttcgagaccagcctggccaacatggtgaaaacctgtctctactaaaaatacaaaatagccgggtgtggtggcatatgcctgtaatcccagctacttgggaggctgaggcaggagagtcgcttgaagccagtggcagaagttgcagtgagccaagatttgagccactgcactccagcctgggcgacagaggagactctatctcaaaataaataaataaataaataaataaataaataaatcaaaagaagaataccctttcataatatgtgaaaattaaatgaaattcaaatttcagtgttcataaataaagttttaccggaacatagccatgctcaatcatttatgtattgttcatggcttcttttgcatacaacaacagagttgggtagttgtgacagactatgtagctcataaaatctaaatatttattatctagccctttatcagtaaactttgctgatccctgtataagtcctctgaatcaaattatttccaaagagttccgttataaaatttggagtttactctgctgtaaattgcaaagaaccatttggaaaacctcttttagtcaggtatttacattaaaatgttccttgatttgtaaacactaatattcaagactggtccaaaattataccaaattgaaactctcaagtgtttttaaacagtaggaagttttaactttttttttttcgtggagtagtctatcattcagcgtttactttggaacatttaattagtcttttttaaaaacccatgaaatttataataaaaattttaaatcattaatgttgagtaatcaaagaaaactttttttgttttctccatttgtaaaatgagtacattattattataatttgtctttggccataccttgttgataattacttatacaagtataagaagacatggtatgttttcctttttcctatttcacaagaataagtacaggaatttacttaagctgctccaaaactcagtgaaagagacaggattaggtttttttcagcattggattttaaatgatactagatggttgcgctgggctaaaatactaatgctttgtgtatatttttatgacttttttgaagacagcttaaaagctttattctagttataaaaatgatacatgttcactgtaaatagaaacaagtcaggtatacagagatacaaatatttagaacatgtggaaagaggcaacaaaattttataaaaagaaaaaagataaaaatctgaaatcattaatttataagggaaaaatcagggcaaggacaaattatattacagattggcctatggtgggagcacagattttatagagaaaagtcagtgaagacacttgcgaagagtgtgggtggaaatcactaagttttgcagtcccggggcctcttatgggttattactggtttgttctttttttttttttaatatgcattcctttggaaccaaaggtttattatgttttgaataaagtagaggtgtaagtaggatgcatataccatgatcttgactacttgagattcacaaagggttttcgtctcaggatttttttttctcttaaaaaaatttgtattaatttttaaattgtaaaaaaattcatcaacttaaccatttttatgtatagagttcaggagtattaggtatattcacttgtgcagcagatctctagaacttttttcatcttgcaaaactgaaactctgtacccattaaacaaccacttcccattttcctctcccccagcttctggcaaccattctagtttctgtttcttttctttttttttcttttgagatggagtctctgtcgcccaggctggagtgtagtggcrtgatctcggctcgctgca

SEQ ID NO: 724744 - DNA, 542 bp, Homo sapiens
tgctctccccacctggagggcaggaagagaagagggagagagcataggagccgagctctttctcttcttataaggccggtgtggtacagacgaggacctcacccttacgatctcactttaactttaattaccctatcctccagacacagtcactttgggaggtaaaacttcaatacagattttggggagatgcgagtcagtccatagcaaataggcatgtgttctgttgttcccacaatactgttttatacctggctgctttctctcacttaatatattgtggctatctgttcrtgtcagatcatacaggtctttatctcatgtcgtttaacagctgcatggatttccatggtaaggatatactatcatttattttcccatttccatattgatagacatcagggaaaatcaaaagtaggctttggtgtcacctttacagatcctaaagactaaatctatttcctttcatcatttttaaatattataagttgagtaaaagcccaatggaaattaattttaagcttaaaaaattttaagaagta

SEQ ID NO: 724745 - DNA, 2461 bp, Homo sapiens
  misc_feature 1439, 1479: n = A,T,C or G
tccttttaggtctgacattactttctctgtgttcagccattcagccactcaacaaacatattgagggctgtcaagcattgcctggcacttgtacgtatcttgttataattgtaatgatttattttcatgctcgtttccatctccaactcctactacattactggcacatagtggaacttcataattggctataaacaaatggactccagtaattaatttgtcctaattaattactgacagtgaatatgattattttgacccaaagtaaaatactgtcatgtccttcttccctaaactattgtacaaaagcctttccatttcttctaattctgttatggcctcttactctaaaataagaggaacatattcaagttattagagtggcaaatcataatttaaatttcccttggttttcatttgtgtcatctctctattattgtgacgatagccctctaatccttgtttgtgtgattcaatataaaatattcggagagtatcacagagaaggctgtctctactctcatttattaatataggcctaggcgtgcaatttaaaacttgcatgttcatgtttcagctgttctgtcaatagattttttaaaaattgtacattcctaggggaaagaataagtcacagttgcccatctctcatgacatgcatgtgttgctattttaaatcctaataaatttgtcacttctggacagtgctgtgctatcttgaccttgctcagtcaggcttgttggtgaaaagcaaatcatttgaaaaggctgtgccaattcattagttgttgcattttctattttttttttttgcaacatcaactctgaatatttgatcatttttgtaatgaaacaccttaacattttcttgactttctcattcttactactttcattagccctggagttcttaaacaaactatcatactccctcccagaagttacagtttcaacatgctccttgtactgaattttacagtaagcacaagttcaaagcacatttccaaagaatattcttttgttaattttttgaacacagggcttgagaaaatacctgaagtttgagatacatgttaaaaacaaattttacataagcctatatttagatggctggttatttctcatccaaagagttcctttacaggagaaagatttaaaatttacaattttttcatgcagtttcctctgagcatttggatgggcatccaaaggagcactgggcaatttcttttaaagactttaaaacaaaaatggcattgagagatcctctgtgttgaacagtgaaagtgtacacatgcgattttcagcctttacaaaactcactttcatggaaagagagagaaatcaagtactataatgaaatcaagtttatcataaaacaaaggctacttctattcttacagatgacagtatactttctacatttgcccccactgtgntgttcacttcttctgggagtcatccatttattatgtcaangtatggccccactagttatgcaacaatttcattgctattatctcaatccacacaagaacttggaaaagatgaaaagggatcacgatgaaaaagtattttcagtcttctgatgaaaggctacaaaccattatttcccacttacgtctttcttagycccctggcttttaatggaaacccagataataataataattattattgttattgttattttaacttttaggctcatgggtacatgtgcaggtttattatacaagtaaattatgtgtcatgggatgttggtgtacagattattttgtcacccaggtaataagcatagtaactgatatgtagttttttgatcctctctttcctcccagcctccaccctcaagtaggccctggtgtctatggttcccttcttcgtgttcttgtgtactcagtgtttagctcccacttataagtgaggacatgaaatatttggttttctgatcctacattagttttcttaggataatggcctccagctccatccatgttactgcaaaggacatgatctcacttttttgtggctgtgtagtattccgtggtgtatacgtaccacattttctttatccagtctaccactgttggacatttagcttgattccatgtctttgctattgtgaataatcatgtgatgaacatacatgtgcatgtgtctttttggtagaatggtttatattctttcaggtatatgcctagtaatgggatttctgggtcaaatggtaatcaagattatttttcctcatctgatgaaaaaggtgttttgcaggatgagccaggtagcttgtgacagaagtgtggagtccccaaatgggcaccaaggaagagtaaaatgcattcaattgattgcacccttagagctttgaaaattgctccatggctgcctgatctaccagtgaaacatctattttagaataccggataggttgcacataaaaacatcttcctttgttcttcaa

SEQ ID NO: 724746 - DNA, 2461 bp, Homo sapiens
  misc_feature 1439, 1479: n = A,T,C or G
tccttttaggtctgacattactttctctgtgttcagccattcagccactcaacaaacatattgagggctgtcaagcattgcctggcacttgtacgtatcttgttataattgtaatgatttattttcatgctcgtttccatctccaactcctactacattactggcacatagtggaacttcataattggctataaacaaatggactccagtaattaatttgtcctaattaattactgacagtgaatatgattattttgacccaaagtaaaatactgtcatgtccttcttccctaaactattgtacaaaagcctttccatttcttctaattctgttatggcctcttactctaaaataagaggaacatattcaagttattagagtggcaaatcataatttaaatttcccttggttttcatttgtgtcatctctctattattgtgacgatagccctctaatccttgtttgtgtgattcaatataaaatattcggagagtatcacagagaaggctgtctctactctcatttattaatataggcctaggcgtgcaatttaaaacttgcatgttcatgtttcagctgttctgtcaatagattttttaaaaattgtacattcctaggggaaagaataagtcacagttgcccatctctcatgacatgcatgtgttgctattttaaatcctaataaatttgtcacttctggacagtgctgtgctatcttgaccttgctcagtcaggcttgttggtgaaaagcaaatcatttgaaaaggctgtgccaattcattagttgttgcattttctattttttttttttgcaacatcaactctgaatatttgatcatttttgtaatgaaacaccttaacattttcttgactttctcattcttactactttcattagccctggagttcttaaacaaactatcatactccctcccagaagttacagtttcaacatgctccttgtactgaattttacagtaagcacaagttcaaagcacatttccaaagaatattcttttgttaattttttgaacacagggcttgagaaaatacctgaagtttgagatacatgttaaaaacaaattttacataagcctatatttagatggctggttatttctcatccaaagagttcctttacaggagaaagatttaaaatttacaattttttcatgcagtttcctctgagcatttggatgggcatccaaaggagcactgggcaatttcttttaaagactttaaaacaaaaatggcattgagagatcctctgtgttgaacagtgaaagtgtacacatgcgattttcagcctttacaaaactcactttcatggaaagagagagaaatcaagtactataatgaaatcaagtttatcataaaacaaaggctacttctattcttacagatgacagtatactttctacatttgcccccactgtgntgttcacttcttctgggagtcatccatttattatgtcaangtatggccccactagttatgcaacaatttcattgctattatctcaatccacacaagaacttggaaaagatgaaaagggatcacgatgaaaaagtattttcagtcttctgatgaaaggctacaaaccattatttcccacttacgtctttcttagccccctggcttttaatggaaacccagataataataataattattattgttattgttattttaacttttaggctcatgggtacatgtgcaggtttattatacaagtaaattatgtgtcatgggatgttggtgtacagattattttgtcacccaggtaataarcatagtaactgatatgtagttttttgatcctctctttcctcccagcctccaccctcaagtaggccctggtgtctatggttcccttcttcgtgttcttgtgtactcagtgtttagctcccacttataagtgaggacatgaaatatttggttttctgatcctacattagttttcttaggataatggcctccagctccatccatgttactgcaaaggacatgatctcacttttttgtggctgtgtagtattccgtggtgtatacgtaccacattttctttatccagtctaccactgttggacatttagcttgattccatgtctttgctattgtgaataatcatgtgatgaacatacatgtgcatgtgtctttttggtagaatggtttatattctttcaggtatatgcctagtaatgggatttctgggtcaaatggtaatcaagattatttttcctcatctgatgaaaaaggtgttttgcaggatgagccaggtagcttgtgacagaagtgtggagtccccaaatgggcaccaaggaagagtaaaatgcattcaattgattgcacccttagagctttgaaaattgctccatggctgcctgatctaccagtgaaacatctattttagaataccggataggttgcacataaaaacatcttcctttgttcttcaa

SEQ ID NO: 724747 - DNA, 338 bp, Homo sapiens
caaaggcataaataaaagagtaggaatgatccacactgaaataaccaagccaaaatagacttgagaaaaaaagaatgtagagcaattttttttccacctatcagggtatctggttctttaaatgattaccctgacttggtttttaaatttttttytgggaggtggttaggccattagtcccttaaaaagtgatgccatgattcttggtaggatatcagtggccaaatatatacagaaacatgatggcagctgctgtttctgtgatcaaaaattcatagtaggtttccttccttccttccttccttccttccttcctccctctctccctcccttccttc

SEQ ID NO: 724748 - DNA, 1215 bp, Homo sapiens
tgtctgtgcatttttgatttgtatcatttgtattttttataatttgtgtttgtattttatataatttgtatcaccattttgcatgttttctgagtaccaatctcaccacaccgtcatgaagtatgaaactctagttgacagctgaaggaagggaaacacagaacttttcaatgtcacgtccaagtccacacactgagtaagcggagagccaggatggagggggcccttaaacatgaggcrgctctgcccccaccttcgcaggtgttggggcatttggttcccgtgacaccccagcaggtgcggttattatccctgtgcattttatgaggaaaaaacaaaacctggagacgttagatcacgtccaagagctcgaattcaaatgtggggctttcaggtccgaagcccatgttcctggactctaccgcactgcatctcaactctgatgatgggagcagaagagttgacagaaagctaggaacaggagaagggaaggaagagggagagacagaggcagggagagaggacacaggagcagcaaggcctctacctgcacagcccctgggcccaccctggagaaaacactgttcttggaagacctgagcggctggtgaggggggacaatggaatgcacatctgtattctaaatcagcctagaaagcagatcagagcatgagaaagggcccaacatctgtattactaataatagtgcttcctacacctgccgtccagggatccagaacagagaggagggccaaacagcagctgagcaaagcgaagcagggagccagctttctgggaagagccggtgtagtttgggggctgtagaaattaaggcggcctcccttgcgcttttgtgggcctttgctttggttctttggatgctggggtaggcagaataatgtccccccaaaaatgtctacgacctaacccccagaacctgtggctatgttaggttacttggcaaactggggattaagttgcatatggaattaagttctctgaccagctgactttaagatggggagattctccgtgtgggcccaacgggatcacaagtgttcttaaaagtggacgagagaggcaggaatgcaggtcacatgatgccacaagcccagcgatactcattttggacatctaacctctagaactgtaggcgaattggctcgtgttgtttgacgccgctgcattggcagtgacttgttacaacagcacaga

SEQ ID NO: 724749 - DNA, 1215 bp, Homo sapiens
tgtctgtgcatttttgatttgtatcatttgtattttttataatttgtgtttgtattttatataatttgtatcaccattttgcatgttttctgagtaccaatctcaccacaccgtcatgaagtatgaaactctagttgacagctgaaggaagggaaacacagaacttttcaatgtcacgtccaagtccacacactgagtaagcggagagccaggatggagggggcccttaaacatgaggcggctctgcccccaccttcgcaggtgttggggcatttggttcccgtgacaccccagcaggtgcggttattatccctgtgcattttatgaggaaaaaacaaaacctggagacgttagatcacgtccaagagctcgaattcaaatgtggggctttcaggtccgaagcccatgttcctggactctaccgcactgcatctcaactctgatgatgggagcagaagagttgacagaaagctaggaacaggagaagggaaggaagagggagagacagaggcagggagagaggacacaggagcagcaaggcctctacctgcacagcccctgggcccaccctggagaaaacactgttcttggaagacctgagcggctggtgaggggggacaatggaatgcacatctgtattctaaatcagcctagaaagcagatcagagcatgagaaagggcccaacatctgtattactaataatagtgcttcctacacctgccgtccagggatccagaacagagaggagggccaaacagcagctgagcaaagcgaagcagggagccagctttctgggaagagccggtgtagtttgggggctgtagaaattaaggcggcctcccttgcgcttttgtgggcctttgctttggttctttggatgctggggtaggcagaayaatgtccccccaaaaatgtctacgacctaacccccagaacctgtggctatgttaggttacttggcaaactggggattaagttgcatatggaattaagttctctgaccagctgactttaagatggggagattctccgtgtgggcccaacgggatcacaagtgttcttaaaagtggacgagagaggcaggaatgcaggtcacatgatgccacaagcccagcgatactcattttggacatctaacctctagaactgtaggcgaattggctcgtgttgtttgacgccgctgcattggcagtgacttgttacaacagcacaga

SEQ ID NO: 724750 - DNA, 1215 bp, Homo sapiens
tgtctgtgcatttttgatttgtatcatttgtattttttataatttgtgtttgtattttatataatttgtatcaccattttgcatgttttctgagtaccaatctcaccacaccgtcatgaagtatgaaactctagttgacagctgaaggaagggaaacacagaacttttcaatgtcacgtccaagtccacacactgagtaagcggagagccaggatggagggggcccttaaacatgaggcggctctgcccccaccttcgcaggtgttggggcatttggttcccgtgacaccccagcaggtgcggttattatccctgtgcattttatgaggaaaaaacaaaacctggagacgttagatcacgtccaagagctcgaattcaaatgtggggctttcaggtccgaagcccatgttcctggactctaccgcactgcatctcaactctgatgatgggagcagaagagttgacagaaagctaggaacaggagaagggaaggaagagggagagacagaggcagggagagaggacacaggagcagcaaggcctctacctgcacagcccctgggcccaccctggagaaaacactgttcttggaagacctgagcggctggtgaggggggacaatggaatgcacatctgtattctaaatcagcctagaaagcagatcagagcatgagaaagggcccaacatctgtattactaataatagtgcttcctacacctgccgtccagggatccagaacagagaggagggccaaacagcagctgagcaaagcgaagcagggagccagctttctgggaagagccggtgtagtttgggggctgtagaaattaaggcggcctcccttgcgcttttgtgggcctttgctttggttctttggatgctggggtaggcagaataatgtccccccaaaaatgtctacracctaacccccagaacctgtggctatgttaggttacttggcaaactggggattaagttgcatatggaattaagttctctgaccagctgactttaagatggggagattctccgtgtgggcccaacgggatcacaagtgttcttaaaagtggacgagagaggcaggaatgcaggtcacatgatgccacaagcccagcgatactcattttggacatctaacctctagaactgtaggcgaattggctcgtgttgtttgacgccgctgcattggcagtgacttgttacaacagcacaga

SEQ ID NO: 724751 - DNA, 1215 bp, Homo sapiens
tgtctgtgcatttttgatttgtatcatttgtattttttataatttgtgtttgtattttatataatttgtatcaccattttgcatgttttctgagtaccaatctcaccacaccgtcatgaagtatgaaactctagttgacagctgaaggaagggaaacacagaacttttcaatgtcacgtccaagtccacacactgagtaagcggagagccaggatggagggggcccttaaacatgaggcggctctgcccccaccttcgcaggtgttggggcatttggttcccgtgacaccccagcaggtgcggttattatccctgtgcattttatgaggaaaaaacaaaacctggagacgttagatcacgtccaagagctcgaattcaaatgtggggctttcaggtccgaagcccatgttcctggactctaccgcactgcatctcaactctgatgatgggagcagaagagttgacagaaagctaggaacaggagaagggaaggaagagggagagacagaggcagggagagaggacacaggagcagcaaggcctctacctgcacagcccctgggcccaccctggagaaaacactgttcttggaagacctgagcggctggtgaggggggacaatggaatgcacatctgtattctaaatcagcctagaaagcagatcagagcatgagaaagggcccaacatctgtattactaataatagtgcttcctacacctgccgtccagggatccagaacagagaggagggccaaacagcagctgagcaaagcgaagcagggagccagctttctgggaagagccggtgtagtttgggggctgtagaaattaaggcggcctcccttgcgcttttgtgggcctttgctttggttctttggatgctggggtaggcagaataatgtccccccaaaaatgtctacgacctaacccccagaacctgtggctatgttaggttacttggcaaactggggattaagttgcatatggaattaagttctctgaccagctgactttaagatggggagattctccgtgtgggcccaacgggatcacaagtgttcttaaaagtggacgagagaggcaggaatgcagktcacatgatgccacaagcccagcgatactcattttggacatctaacctctagaactgtaggcgaattggctcgtgttgtttgacgccgctgcattggcagtgacttgttacaacagcacaga

SEQ ID NO: 724752 - DNA, 1215 bp, Homo sapiens
tgtctgtgcatttttgatttgtatcatttgtattttttataatttgtgtttgtattttatataatttgtatcaccattttgcatgttttctgagtaccaatctcaccacaccgtcatgaagtatgaaactctagttgacagctgaaggaagggaaacacagaacttttcaatgtcacgtccaagtccacacactgagtaagcggagagccaggatggagggggcccttaaacatgaggcggctctgcccccaccttcgcaggtgttggggcatttggttcccgtgacaccccagcaggtgcggttattatccctgtgcattttatgaggaaaaaacaaaacctggagacgttagatcacgtccaagagctcgaattcaaatgtggggctttcaggtccgaagcccatgttcctggactctaccgcactgcatctcaactctgatgatgggagcagaagagttgacagaaagctaggaacaggagaagggaaggaagagggagagacagaggcagggagagaggacacaggagcagcaaggcctctacctgcacagcccctgggcccaccctggagaaaacactgttcttggaagacctgagcggctggtgaggggggacaatggaatgcacatctgtattctaaatcagcctagaaagcagatcagagcatgagaaagggcccaacatctgtattactaataatagtgcttcctacacctgccgtccagggatccagaacagagaggagggccaaacagcagctgagcaaagcgaagcagggagccagctttctgggaagagccggtgtagtttgggggctgtagaaattaaggcggcctcccttgcgcttttgtgggcctttgctttggttctttggatgctggggtaggcagaataatgtccccccaaaaatgtctacgacctaacccccagaacctgtggctatgttaggttacttggcaaactggggattaagttgcatatggaattaagttctctgaccagctgactttaagatggggagattctccgtgtgggcccaacgggatcacaagtgttcttaaaagtggacgagagaggcaggaatgcaggtcrcatgatgccacaagcccagcgatactcattttggacatctaacctctagaactgtaggcgaattggctcgtgttgtttgacgccgctgcattggcagtgacttgttacaacagcacaga

SEQ ID NO: 724753 - DNA, 759 bp, Homo sapiens
acagacgaatgttaactctcccttagaacaaactcccaacattctgcttggacccctggagctcttagagaaagcggactactcacgcatcctcccagcctctcatctcctattgtggctggcatcttttcttgtgttctaaggaggtaggatgttttactttagaaacttaattactgcacttgaaaccacccagtcacccccaggagggatgtctgggaacaatttggggtcacttcctgcttctcctccaagtgtccctctgggctgggaccaggcccccaatggcatctatgcccctacctgcccaggcgtctgggcagacactgcacaggacaaaaccatgatagcatgcaagacccatcagcacctgggcccagccacgctgaagcctgaaactccacctttaggcctctgtacatgctgtttctccaacctaaagccccgctccgtccrgccactgcctgctgacctgccccttgcctacacagtcccctcaggggtggccatctcaggcctacaccggtgccctgggttctctctcccccttgccatgccctggtttaatggctgtcacctcttcccaacatccccctccccatcccgctccagcaggctccctccatcctcccacagccccacctgccaagctttcccgggcaagagcagcctctgggctctagagtacacctgctccctgtgcctttcccctaggcctggctctgaggacggggcaggcatgggcatcctttcctgttc

SEQ ID NO: 724754 - DNA, 759 bp, Homo sapiens
acagacgaatgttaactctcccttagaacaaactcccaacattctgcttggacccctggagctcttagagaaagcggactactcacgcatcctcccagcctctcatctcctattgtggctggcatcttttcttgtgttctaaggaggtaggatgttttactttagaaacttaattactgcacttgaaaccacccagtcacccccaggagggatgtctgggaacaatttggggtcacttcctgcttctcctccaagtgtccctctgggctgggaccaggcccccaatggcatctatgcccctacctgcccaggcgtctgggcagacactgcacaggacaaaaccatgatagcatgcaagacccatcagcacctgggcccagccacgctgaagcctgaaactccacctttaggcctctgtacatgctgtttctccaacctaaagccccgctccgtccggccactgcctgctgacctgccccttgcctacacagtcccctcaggggtggccatctcaggcctacaccggtgccctgggttctctctcccccttgccatgccctggtttaatggctgtcacctcttcccaacatccccctccccatcccgctccagcaggctccctccatcctcccacagccccacctgccaagctttcscgggcaagagcagcctctgggctctagagtacacctgctccctgtgcctttcccctaggcctggctctgaggacggggcaggcatgggcatcctttcctgttc

SEQ ID NO: 724755 - DNA, 759 bp, Homo sapiens
acagacgaatgttaactctcccttagaacaaactcccaacattctgcttggacccctggagctcttagagaaagcggactactcacgcatcctcccagcctctcatctcctattgtggctggcatcttttcttgtgttctaaggaggtaggatgttttactttagaaacttaattactgcacttgaaaccacccagtcacccccaggagggatgtctgggaacaatttggggtcacttcctgcttctcctccaagtgtccctctgggctgggaccaggcccccaatggcatctatgcccctacctgcccaggcgtctgggcagacactgcacaggacaaaaccatgatagcatgcaagacccatcagcacctgggcccagccacgctgaagcctgaaactccacctttaggcctctgtacatgctgtttctccaacctaaagccccgctccgtccggccactgcctgctgacctgccccttgcctacacagtcccctcaggggtggccatctcaggcctacaccggtgccctgggttctctctcccccttgccatgccctggtttaatggctgtcacctcttcccaacatccccctccccatcccgctccagcaggctccctccatcctcccacagccccacctgccaagctttcccgggcaagagcagcctctgggctctagagtacacctgctccctgtgcctttcccctaggcctggctctgaggacggggcwggcatgggcatcctttcctgttc

SEQ ID NO: 724756 - DNA, 656 bp, Homo sapiens
agaggctcacaggaacctaatcttgtatttcccattgcagcagtggttcagtagtcattgtttggggcaaccgtatagaacataactattccgaattatgtacctacattttctccgtatcaatagatgatgtggagagtaccttatttttactcccttacgctcatatcttccacttatttcagattttatttatgtggggttttgtcttgtttgcaatgcaaataatgctgcagtgaacttagtgtgaaatatctgagagactgcatctgtagaataggtttcagaaattgccattgctgggccgcaggaaatacacaacttaaagtttgaggatatctttggtaattgttttcatttttcttttcaaatttataatcatatttaaagccatttatccagcagagggagtgagagtatcagagagccataataactgttggatcttctttttctgaaataaatttaaaagtacccaagtattttcatagttcaggtttgcaaccttgattttgtacttaaaagttagattgtctttttatatttttctaaaatcattctgatggtatcctttgaaggtgatataaatctatagaatgaataattgctaccactttgctagtagttaggatagattcatattgatccttrtagat

SEQ ID NO: 724757 - DNA, 611 bp, Homo sapiens
tgccccatataggaagtttatgatcatttatgagttctttgttgacaaatgatatttatccttttgaaaaagagggaagactgacaatgttgaaatttttctgagcagtgtgttccataaagcagagaagattgggaaaattgagaaatctccccyatccctttgtatattgagaaaccaccaaccagcaaaggatccttttgctgtcctgcattctgaggtaagttctgcctccacctttcctcggtgacttagccgagacccatttccattcttcctcctgattctgataagacttgctgatgactcttttttctgcctctataaagctcaaggctccccttccttttcttcaacaagttcctcattgaggaagttctccctgttgcaatagcctgaataaaatcatcacctaattgtcatgtgcattttatctttcacattgaatacagaaggaccatttcaaaccaaataagagtatcatgatagagaacaacagcactgctcatgtgtgagtcagaaagcatcctatgcttatatatcctttcctaaatatgaacttttgttttccattgagttaatttttatttatttctgtacttggctttctt

SEQ ID NO: 724758 - DNA, 1034 bp, Homo sapiens
  misc_feature 833, 836, 993, 995: n = A,T,C or G
tattttcaatcttccagaaatcctctcccacattgcctggcttgctgatgctccagaggacaccaccttcttttctgcttctaatgactctattcccttgtatatgttttaacaagcaccaccatgaaatttagtaagagggtggaagaagataatgcttagtcctctagagccagaagccacaggtatctctgaggggccagtaccacttactaggaaaagaaaaaaacatttatctgatgyagaaaaaattcttaagtttcacttcagatttttttccaagtaaaattacgttttaatatggtttggctgtgtccccacccaaatgtcatcttgaattctagttctcataatctccatgtgttgtgggaggggcctggtgggtggtaattgaatcatgagggtggttacttgtatctgttttcatgatattgagtgcattctcacaagatctgatggttttataaggggcttttcccccttttactcacttctcttcctgctgccatgtgaagaaggaaatgtttgcttcccattcctccatgaatttaagtttcctgaggcctccccagccatactgaactgtgagttaattaaacctctttccttcataaattacccagtcttgggtatgtgtttattaggagtgtgagaacagactaatacacatttaatatattgaattttaatttaatattgtataacaacccaaaagaaacttgcagactggaaaatgtagtcactgtaatccctaagccattcttgcacaacagatcatggcatcatctattctatcttcaaaacaatggatggaaaagtgtgagatgtaatgnagncattagaatgattctatcattcgaccacaaaactatatccatagtcgcacattttatgtacatcatacaaattcacatatctggtttgctgcagaattctttataaagattacatcaattctttagtttaatatggtctttgtatttgcaatacccnanagacaatgacaaaattgatttttatagcaaactgtgtaa

SEQ ID NO: 724759 - DNA, 2500 bp, Homo sapiens
aagtgctgaattatgggaaatttctcatcaccgttacctgtgggattcatgggttgtattataaacttcaaggcagacagcattgctgtggcttccagaatagtcagtgcactaaaattctgcatagaagaaaattgcattattaggtactaaatacatgtttatcactaaatataaaaatttttatctctagccttgtttgacaaatgaaagcatataagaaggaaataagagttagtttttctagaatgagtagattaaatgcaagtgtaatactttctatatgtttgtttgatgtagactcaaaggtagaatcacaacagaagcaattagagtaattattaagtctgcatttactccaaaagccctaaggaatattacgtgttcatttgtctgagcctgatatgcttcccgttaaaatacatgctgcctccagaatcttctaccactctgttctttggtggtcgccagtttgggataatatctgtgcctcaggattgtgtctcactgtgatgctctctataaagctacttaaggatacaattccaggaagctaaagataatactcgaaagtatcaatgctcctaggattatcttccttagcattaatgataaccgtgtattcccttgaattttgtcccaaggttagaaggctggaggcaaagcattctcagtgaacaactcaactcttcactgtttctcctctcagatctcacagagccaaatgccttcaggatagagtaattaagttgagcccattgcaatggacctttattattatcttctagagcccaagctcacttctgggttatcctgtcttaaaaataaatgtagatgaaaatacccaatgccacagtgggctttgatttattcttagcttgttgagttttaatcattttatagatatctacaggcttccataataatggtaactgtttcctccatctcgaattgagaaggatgatgaatgatgttcactctcagtggtckgcagatactaagtgtgctaaggcaaagtcacacactctcacattcctactcgtgttcacactactactctgtgatgaaaccgaaactagatttataatctttaattttatttttatttacataggaaagaaaccgattcagtagcaggtcaaatagggtcatttggggattcaaccaacttattcattaattaaaacacctatctatatgatatgtatgtgaagactacatgtataggacttatgatcaaattaaagagaaaaataagtaagtatagaagcatctttgcaaaacagtttgtgccacagaagagtcaatgttatcttccatgatgcagcctggatttccagttcttgcgcttcccagtcttgtggcctcaggcaagttacttaaccaccctacatcctgtttttctcatgataagaggggataaaactgtacctgtgtcacagggctttgagaggaaccaatgagatgcacctgatgaacttagcacagggccttcacatagcaaatactcaagaaatgggagctgtgggcactattgaagcagcttatatcaatggccaactagtacccaagctaagtaaaagttaagcataagaatagtcagaagaaaaacaccttctttttctattaaaagaaggagagcctccacaggttgaattaaaaaaaagtttaaaggaatccaatcatttttttccagctgtggactgcatagtgtcactgctctgcaaggcagcaattcagccccagtgtcctgacccagtctccataacagttatttgcagaccagctggccaaatgcacctggagagaaactcaggtgccctggcacataccctggggcttccctatgctggtctcactatgaccaggagacatgactagaaagagtaaaaagaggatgacaacagcctgaccaacatggtgaaaccctgtttctactaaaagtacaaattagccagatgtggtggtgcgtgcctgtaatctcagctactcaggaggctgagtccggaggatcacttgaacccgggaggtggaggttgcagtgagcccaggttgtgccactgcactccagcctgggcgacagagcgagacaccatctcaaaaaaaaagaggttgatggatggtcactgagacttattgtcaaatagattttttcaaaaactagtcattgtaatcaaagcaagtttctaagaataagacttaggtttccctgctgttctccatacaaatattcaagaatgacgacagcatatacacttattctaggtattctcaatgtaaatttttcatggaaaagggaggctcagactgtgtgacctaataagcactacacttgtctcacaggcaaacaagcttgacaattcaggttcacatagcagctaccagtacagccaatattttattttcttcatatccaaactacaagaaaattaaatgcctgtctttatccagtaccctgaattgactgaacctacaaaagcatttgaaatcattaacaaac

SEQ ID NO: 724760 - DNA, 2500 bp, Homo sapiens
aagtgctgaattatgggaaatttctcatcaccgttacctgtgggattcatgggttgtattataaacttcaaggcagacagcattgctgtggcttccagaatagtcagtgcactaaaattctgcatagaagaaaattgcattattaggtactaaatacatgtttatcactaaatataaaaatttttatctctagccttgtttgacaaatgaaagcatataagaaggaaataagagttagtttttctagaatgagtagattaaatgcaagtgtaatactttctatatgtttgtttgatgtagactcaaaggtagaatcacaacagaagcaattagagtaattattaagtctgcatttactccaaaagccctaaggaatattacgtgttcatttgtctgagcctgatatgcttcccgttaaaatacatgctgcctccagaatcttctaccactctgttctttggtggtcgccagtttgggataatatctgtgcctcaggattgtgtctcactgtgatgctctctataaagctacttaaggatacaattccaggaagctaaagataatactcgaaagtatcaatgctcctaggattatcttccttagcattaatgataaccgtgtattcccttgaattttgtcccaaggttagaaggctggaggcaaagcattctcagtgaacaactcaactcttcactgtttctcctctcagatctcacagagccaaatgccttcaggatagagtaattaagttgagcccattgcaatggacctttattattatcttctagagcccaagctcacttctgggttatcctgtcttaaaaataaatgtagatgaaaatacccaatgccacagtgggctttgatttattcttagcttgttgagttttaatcattttatagatatctacaggcttccataataatggtaactgtttcctccatctcgaattgagaaggatgatgaatgatgttcactctcagtggtcggcagatactaagtrtgctaaggcaaagtcacacactctcacattcctactcgtgttcacactactactctgtgatgaaaccgaaactagatttataatctttaattttatttttatttacataggaaagaaaccgattcagtagcaggtcaaatagggtcatttggggattcaaccaacttattcattaattaaaacacctatctatatgatatgtatgtgaagactacatgtataggacttatgatcaaattaaagagaaaaataagtaagtatagaagcatctttgcaaaacagtttgtgccacagaagagtcaatgttatcttccatgatgcagcctggatttccagttcttgcgcttcccagtcttgtggcctcaggcaagttacttaaccaccctacatcctgtttttctcatgataagaggggataaaactgtacctgtgtcacagggctttgagaggaaccaatgagatgcacctgatgaacttagcacagggccttcacatagcaaatactcaagaaatgggagctgtgggcactattgaagcagcttatatcaatggccaactagtacccaagctaagtaaaagttaagcataagaatagtcagaagaaaaacaccttctttttctattaaaagaaggagagcctccacaggttgaattaaaaaaaagtttaaaggaatccaatcatttttttccagctgtggactgcatagtgtcactgctctgcaaggcagcaattcagccccagtgtcctgacccagtctccataacagttatttgcagaccagctggccaaatgcacctggagagaaactcaggtgccctggcacataccctggggcttccctatgctggtctcactatgaccaggagacatgactagaaagagtaaaaagaggatgacaacagcctgaccaacatggtgaaaccctgtttctactaaaagtacaaattagccagatgtggtggtgcgtgcctgtaatctcagctactcaggaggctgagtccggaggatcacttgaacccgggaggtggaggttgcagtgagcccaggttgtgccactgcactccagcctgggcgacagagcgagacaccatctcaaaaaaaaagaggttgatggatggtcactgagacttattgtcaaatagattttttcaaaaactagtcattgtaatcaaagcaagtttctaagaataagacttaggtttccctgctgttctccatacaaatattcaagaatgacgacagcatatacacttattctaggtattctcaatgtaaatttttcatggaaaagggaggctcagactgtgtgacctaataagcactacacttgtctcacaggcaaacaagcttgacaattcaggttcacatagcagctaccagtacagccaatattttattttcttcatatccaaactacaagaaaattaaatgcctgtctttatccagtaccctgaattgactgaacctacaaaagcatttgaaatcattaacaaac

SEQ ID NO: 724761 - DNA, 656 bp, Homo sapiens
cgagctgcccagtgagcaggacctgggctggagtgggggcgggggtggtgtccaggagagggccttgttgaagtcggggccaaccgggtgaagagagatgtcagggaaaccagcatggttrggaaggaaagcgggggctggcgtggtcagcgcgtcggaagccatgagggtcagctgtgtggggccagctcagagggcgacaaagtcctgtgcaccagagactagcaggcaccagcagacacttcccagttggagcacagctggccaaatatcccaggaaaatttaaccccaaagtcacacgctgcccccagtaaatcaaccatgacgagatgtttcatgaccagcgaaggccattcacagggtcttacctgtccctcgacacaggctgctgactgggggatgcctcacagagcaggtagttcagctccctcaaaaacatacaaagaaactgatgcttttaagaagtgatgttatcagatgaacaagaagagtctcctttcttttttgaaggctagaactgtctaggggggaaatatgtgtatgcaaatatgagacagcaaattacatatgaacctcccaataaaaacagcttctgcacccaaaccgagttattggcatggatcagagtggtggtgatggcgggggtgagggccaa

SEQ ID NO: 724762 - DNA, 656 bp, Homo sapiens
cgagctgcccagtgagcaggacctgggctggagtgggggcgggggtggtgtccaggagagggccttgttgaagtcggggccaaccgggtgaagagagatgtcagggaaaccagcatggttgggaaggaaagcgggggctggcgtggtcagcgcgtcggaagccatgagggtcagctgtgtggggccagctcagagggcgacaaagtcctgtgcaccagagactagcaggcaccagcagacacttcccagttggagcacagctggccaaatatcccaggaaaatttaaccccaaagtcacacrctgcccccagtaaatcaaccatgacgagatgtttcatgaccagcgaaggccattcacagggtcttacctgtccctcgacacaggctgctgactgggggatgcctcacagagcaggtagttcagctccctcaaaaacatacaaagaaactgatgcttttaagaagtgatgttatcagatgaacaagaagagtctcctttcttttttgaaggctagaactgtctaggggggaaatatgtgtatgcaaatatgagacagcaaattacatatgaacctcccaataaaaacagcttctgcacccaaaccgagttattggcatggatcagagtggtggtgatggcgggggtgagggccaa

SEQ ID NO: 724763 - DNA, 674 bp, Homo sapiens
tgcaaaacagtttacctgcacaatatgacatgctaggagaagaaaagaaaacaactgaagtttggagtgggggcacatctgcccctctaattgctcctgctgatgtcactgctcctcagaggagaggaagctaagccttcttattttgtctgaaatattggttctatggcaagacttaagtaaattatctctaagactaatagtacagcaaagtagagcattaaaaatacaaattaaattataattatttatttctggataatatcattgacaaaaactgcccttaaaataggacataaatgtttgtatgcaactttgctaaaatcatgtttttactctgaaacagaaatataggcaatgcaattaaataaatgaacaaacagtattattttctccatttgacagaacaggaaacattaaatgacctggtcatggtcacacagtaaatgagagtgtcaaaatatcacctaaygttctaatcctaacctgctagaaagtaaactctagaagggcaggcattgcctctcttgggttcactgccagcacctagcacagcaccatgcacaccactggggttaatgctagtatcagtacacatgctcagaataaatattatgagagttaactgcacttcacaaagaagccacgtaagtaataaatggacagtagctcca

SEQ ID NO: 724764 - DNA, 644 bp, Homo sapiens
ctcaatttcagctttgcctgccgtgcctatgtcaggttctgcatatagaggggactggggggagcctgcaagcctagagggaaagaaggacttgcttcctcctagccacttgctattcttctgggcattagtctagtaatccttctatattgtggtgatggcagttccttgctcttgcagcagctgaatccagtttgtagttcttcctaaacttgtgggtctggcttcatggcatccccatagagcactagctgagcagcaccacctccttagagctctgggtttcagccccatggggcctctcttccacgtttggagaccccagcaacaaacggtcacaggtctcctccaaaagtttcctttgttcacatagacctacctccttgatgcctaagagttctctttttaccctagctttacaaactcagctttgtgcctagttgacacatttttaatgtgaaaagatctctattcaaatagctggtaagatttctgccttttaagtaataaatttagatttcttttatcttttttgctttcactatgtagacactcatttctcatacccctattctactaatatagttggaccatttattcatttacctaaaatattgagcactaactttgaccartttaatcaa

SEQ ID NO: 724765 - DNA, 666 bp, Homo sapiens
tcacacagagaagctcaagacgataggatggcaaggccttcatctcagtgctcctgtaagtgtgaatgacatttataaatactaatcacagggtaactattaaatctgatttaatttttaaatatcttttttaagaattcaaacatagaaatttgtaaagtatatattttcacttcttcactgctttttctccaacgaattctattctccaatgctatctacgactaatggcattctgtccacattgtttgggatttgttaatacataaatcgatatgtaagtagtttttttttttaagtggggccatatttgctttttcckttcaatgatgtcttaagtcacttgttcattttggtttttcgttgttttgtttaagacagactctctgtcacccaggctgaagtgcagtgacatgatcatagttcactgcagccttcacctcctgggctcaggctatcctcccacctcagctacctgattagctaggaccacaggtgtacaacactacacctggttgattttttaattttttgtagagatggagtctccctatttgcccaggctggtcttgaacttctgagctcaagaaatcctcctgccttggcctcccaaagtgctcagattacaggcgtgagccaccaagctaggcctctactttggttatt

SEQ ID NO: 724766 - DNA, 1030 bp, Homo sapiens
gagagtgaaataaagatattttcagatattcaaggacttaggaagtttatttcccacttaatccctttgaaataattactcaaggatgtaactcctgaaagaaaaatacacccaaaatgagtacaatgtaatcagcaatggaaaacaatgaatggtaaaagagaggtaagtcaaagaatgctayggttgctgctagaaaagcatagttaagtattttttttaatttaaggataaccatttcaaatataaatgaaaatataaatatgtacaaaaatgcattttaaaacggtccagaaggatacacagcaaatggcaaagtgtaggtagaaggagaatttaggaggatcatgaaaaggaatttggttttaattttaaaaatgaaatatattcacatacatatataattaaaattggctttgaaaaggaaagaaaaacaatttttaatgtctagggagtcatgagggacactgaaatgggaaggtggccaggcctggtggtgcacacctgtaatctcagcactttgggaggttgaggtgggaggatcacttgagcccaagagtttgagaccagcctggtcaacataaagagacctcatctctacaaaaaaaatttaaaaattagccggacctggtggtaagcacctgtagtcacagctacttggaaggctgaggtgggaggatcccttgagctcaagagattgaggctgcagtgagccatgattgtgccactgcactccagcctgggcaacagagttaagaacctgtctcaaaaagaaagaaacaacaatttgttggacatgcctgtggtcccagctacttgggaggctgaggcagaaggactgcttgagcccaggggtttgagaacagcctgggtaatagcaagaccccaactctaaaacaaagaaagaagggaaaagaaataacaacttaaatcgatagaactataatctgtcaatgaaaataagtaaataagataaaacaaaatttacaaagtaaaaagagacaactgacatgctgttttatgtttaatt

SEQ ID NO: 724767 - DNA, 660 bp, Homo sapiens
tggacgttctactttttaaagatggtttagtttttcaagattgaatatgagaaccacacttcatctcagctttaactgctaaatcatttattgaaaccataaatgtaatattctacaaagaaaagactattgacttgtaaatatttgttgcactgttctaacaatattgttttggatttttttttaaatcmtggaattaagttgtttcttggaataatatgatacttcaaattggtatcttaaaatcatgaacgagactactagagcttatattttcactttcccaggactattgcaaaatactgatgatacaactgaaataagatcactgcctgaacttaactgtaatttatgataaaagtaggtcttttgaggacctctaggacaagtatgacacattttaaaatcacccagcctttcaaaattctgaatgatgtgaaagagttttgcatttaccatcagatttttctcacatattctactgttcctgatgacatgttaagagaatataaacattcttaggcgacactcttataaatagttccctggtacgaacagattgaaaagggtagaaaagtaaaataaacttttgtttgtttgtttgttgagatggagtctcgcactgtcgcctgggctggagtgcaatggtgcgatattggc

SEQ ID NO: 724768 - DNA, 462 bp, Homo sapiens
aaaaaaaaaaaaaaatagccaggtgtggtggcacatgcctgtagtcccagccactcaggaggctgaggtggaaggatcgcttgaacccaggaggcagaggttgtagtgagccaagatggtgccactgcactccagcctaggcgatcctgtctcaaacaaaaaaraaaaaaaagagagagagaaagaaatttactataagcaaaccctccaaacctacaatagctctctttatagttttatcaacttggcttaatccaagtctcaactctgatttgcaaccccttctacaattcatctcatgttatctcttactggtccttattcagggcataccctctgatccaaccaagatgctgttccctgggtcattcctctgacttttccaattaccaatgacaccctctcaacccattcaacctttctactcttccttcaagacctagctcatatccccaccttctg

SEQ ID NO: 724769 - DNA, 913 bp, Homo sapiens
tagagacggggtttcaccgtgttagccaggatggtctcgatttcctgacctcgtgatcctcctgcctcggcctcccaaagtgctgggattacaggcgtgagccaccgcgtccggcccacaactctctttttaacaagattataggtgatttgttgtacacgaaaccttgagaagcactgccctgtttcttgttgtactttcttaactgaatgcagactactgggtagaaagaagtggagactccttctggcaatacctaagtggggttaaagacatgctgtattcaggctttgtatgccaggatctgttagatgaagagtgagcatccagagttctagcctcttcttgggcgagtgtccttggagaggccattcctcattatgcatttcaatagcactctatattaacaaagcacttctccatcaatttattagtgattctctctcaaattctctgcatcatctttccaagcaataaatcgtggtgtattttctttgtaacccataagtggtcgataagtaaacaaatgggttgaaaaggtaacatagcagaaaagtgtttcaattttccttcatccgtcctccatgcatcacttagggagaaaccaagtgttcagagactccatctgtatttagaatatcattctaaacggagagaaggagggaataactttatgttacattatagaaaccattagtttaataactttagayaggtttgaagaggtggtctgtcaattcaatggcattagctaaactgaagcccgacgtcaaaaaaattaagctaatgctttccactttctgactgtatgtataccattactgagctacagtgttggcacagagattaagtctattctgtgttagtttataggctgcctcagtttgagttgggcataaaataaaacaatgaa

SEQ ID NO: 724770 - DNA, 2568 bp, Homo sapiens
ctctctttctcatcactgaagtctcaacacaaatgtcacctactgggcaaaatttgttctcacttgcacccagctctcactgttctatcccagcacctataaaagtgcttaaatgtatttctttactgtctgaatgaatatcagaaagcagggattcttaatctagggtctgtgaatttacatactctgggaaagagtattccaagcataaaaaataaccaaggaaagtaatctgggatgggagtgagctcagtattcctaagagggagaatgaagggcagggtggttcaatctcataagtaaagagagataaactgtgtaagtggttaaggttaagtgattaatgtagtgcttccaggtcatggcaaaagcttggtttgcatccaattctgtctataatcaaatccattggatactttcgagaagagtgactttcctgatcaatgatttataaagatcatttttgccaccttctagaggaaggactttaggaaaacaagagtagaggcagggagaccaggacagatgctgtttcagaggttcaagtgagagatgttggcagtgcagactaggatgtaggcaggggagagggtgagaagcagccagattcagatgagttctggaggtacagcaggccagacaaggcagggagattgtgaactatgcagaaagagaagaaacaaggataggacctagattttggctttagcaactaaagagtgtttattacgagattggaaagcttgacaaggaggaggatggggtaggattttgtccacattaaattgaaacgtttcagagatcaaaaggaaggctctggttttatagcaaaggttcctgctcaggtcctcattcagttcctttatgcaaatgaaggatgttgggtcagcatgatcctgatgggggtcttttgcagacagttgttaaaacaggctagaacaattttaaagggagtcaaatgtatagcccaaatatgtggaagacttgtagactggtctggaactcctaacctcaagtgattcgcctgccttggcctaccaaagtgctgggattacaggcgtgagccaccgtgtgaagccccacctaggtttttaatcaggttcatttatgtaaataaaaaatggaaacacgtttagttgtgattggtgagtgtagttgatttctcattggctggcaaaaatgagttctggttggtcaatacagctgaaccctgattgattgactgaggctgctgagctctgattggttggttcaggtgaatgctggaagtcccaaatataaaaggatgcagattttcagggaactgagagtatgtgtgtgactcctacctggtcagaaaattgcttcttggctctattttaaacttaggcccagttagccacctgggatccatcttgaagaaytggcttgaaggattcacatttgttcactatgtaaatagatttaggtgaatgtgtttgggtctgtaaagagaaatggactctacagctctattccttgaaggcagagacagagaatgaagccacgtaagtagtaggaaatgttcccgccacctttgcacctgcaaatggactcggtcacttcacaggcctatttctccttcagacatcgtcacagccacatgggcaatgggcaggaaagaatttcaggactgtgatagtattttaacctcctgtaggcctttaaaattttctgtgttaaccacttaaagcattcagcagctttggagtcatccagaaggtgtgagctcacgcagagccaaaaaggagagaaagaagagtgtttccttctagacaattcatagtcttttgttcatctgtagacgtttattgcatggcttaagtgaagatttgggttcattttcctagtgtttgaattttaccaccattgttttttaaaaaataatttgcgttttcctctctgacttaaaataccaacttttagtaaaaggaatctctgtatatttatgtctatttctgggcttaatatttagttttagtttaatatctattactagacctattttacaacatattcagtggtctaaattttaatatttgtaaatatcaggcaggtcaaaaaaaacatcattttcacttttgaaaatattattttctagtatcagctgtttattcttccaggaaagtttataatcagtggaccttatttaaaaagacctgtagcagtgtttttagagttgcactgaattgcaataaatccaatggggagaaattggtagttataacagtactcaatgtcaatattcaatatcaatagtactcaataatactgatataagaacatgataagacttccattgctgaacttggcttcaggttttcctcagtcaagtattagtttgcttcctgcatttcctatgcatttcttacaaaacttaaggttgttatcttatattttctgaatctgatttttattcattgtattttcaggaatattggaaagatatcatttgaatatatttaattttttaactgaaaaaactattgctaagctatcttgttggtttcgttttgaataatagattcttgtgttttcgggtagatgatc

SEQ ID NO: 724771 - DNA, 573 bp, Homo sapiens
tatgcagtgtccattctactcatagaacaagtaacttcttaaaaaattcatctggagattaaaaagtaattcaattcaacaaacatttatcaagcacctatcagatgtgatgcactgtgctactcatgggagtgataagagaatctttatccatactgctagcacatgttaatagatgatattaccatgagaaaacaagataggtcaatatcccctcacagtgaaaggctttgcaagsctccttcctccttggtagcccagagcgagccttaacttttgccaggagccagaccatgccatgaatgatggtgcttcagtcttcctaggcctggaacatgttgcttagtgggaggcaggcttcttgtcttcttttactcccatttggcaaggacacctcattatgtaagactaccactgtttatctgccccatatttatgatttttacaagggatattctaagctttggcagatatgagggaacattttataaggcaaggcttgtagtgggcaagacctcaaatgaaatttctgtagtatatctaaattacctttaaattattcattttaaggtg

SEQ ID NO: 724772 - DNA, 2044 bp, Homo sapiens
ttccaaggccacccagtgtattctgcactttaatgtacatctgatttaagttgtctccacctgactaacatcttttaaaaaacgagtagtttagaattgcttctcagttatgagctggaaagtaaatattttcacttaaaggaattatagcatgtgaaaataaataagttttagaagtacaatcaattttgatgctttctgcaagcctgccatacaataaaggtcagtctttcagaatttttagaaagcacaaagccctttcatttgtgatgaaataaagagagaaaaatgtcaaccttctatacatatatatgttcctgaaaactctgcaataaatcttcccttttgtaaataaaaatcacaatttaagtatttccaaagagctttctatttgaaggaataacgtggtcaaccctcttgtaaagaatcacctttcaagatacctgttacataagactgttttagcaaagcaggataaagttttagtataaggttttactaatttgcaatcacataaaacaaagcaataagcagtaaattctatacatttgcaataacacaacttatcagaacaaattaattgtttttcttgatgaaaggtatagaaaaagaaacacattcgagaggatttgcaattaactttttcaaggcatagttatcaataagccgggaaagctagagggatatgtaaagtggtacaggaaaagcaaaatcttggttcaacactgctttagcctactaaaagtttttgtgtgcgtagccttctctccatataaaattagaaatatatttgtctttttgtagcatctcatgaaacactttccaacctttgtggaattgtaaacttcattattaccatgatttccgtcttttctcattgcctctatctcaatttttcttcataatacatttgtgtttttcttttatgtaaggataaaaacaattctcaaactaatgaactaggctaataatggtagattgaataaaatctagttgtcagttgattattttttgtgcttacaaaatttacattatttacactatgtatatgtgtatataagtgtatatatatatacataactgttacttcaaaaaagtcagtttattggtgagtattttttagcaaaaatatttttaaatctgatgtaatttttgttaaattctaaagtcttagcccaagaagatgcagtttgccatttactcaattgatagacatctatgttacattttttcttgccaagttttatactgatgattggagatatcaaatcaatatgacataaactttacaattgtagagattgatctaatgggaggtggaagtaggggtgatgacaaaaactaaaaatataaataaataactaaactgcaacgttgaagatatatacgcacatacattgataaaagttgttggagatataaggcaaagttacaatcatagatgcacaactagttgatacataataatcagtattacattgtcaaggtcgaggaagaggatgtgtatattatgagaattcaaaatccatagtcacaaatcaaacatgagctaccaatacagtaccatggtaaaaaaaatttgtgattcaggaatataaatggaacaattagaaaccatgaggtaatccttccatgagataaacttggtaaggcttttattattattcgttataatgctttgtccagttttggttctcacaacttaagtgagatttagagaacgtgaatgggatacaaagagaaaagaaatatagatatttttaaatatgggaaaagtctgccattaaaaatatatgaaagcggccgggtgcagtggctcacgcctgtaatcccagcactttgagaggccgaggcaggttgatcacaaggtcaggagttcaagaccagcctgcccaagatggtgaaaccccgtctctactaaaaatacaaaaaaatttagccaggcgtggtggtgggtgcctgtaatcgcagcttctcgggaggcagtggcagagaattgcttgaacccaggaggtggasattgcagtgagccgagatctcacca

SEQ ID NO: 724773 - DNA, 666 bp, Homo sapiens
aaaggtagcaccatcattttgctcagttgctgataaaggcttgtgttttctcacactttacaaaagtattggcagctctcaattcacaaatgtgctaatacaaatatcttctgcatggtctgattgcacaccatctcctcaggccacccattgtcctagaaccaaacatctggagcatggtacctcctgacatcttggtggaaagtggtggtggtggtggttaggcgctgactcttttctatcaactctttttttcctcctaattttacgtcttgtattctcttttkaaaaatgctgttgatttttgttcaggcataattccactttgcaatttaactattgaccctctacttaagaattgcccctgtacatttgatagattgaggtgcaggtccagaaaggggtcacaatgtaaaaagaacaaaggagccttctggaaaagaaattattctaagggtgctagcatagccctggaaatgtcaggctctgtcaactccatgtttctgcatatgttgtccacactgtctacaacacatttcttcatgtaggtaatcctttctcatctttcaagactcaccttgatcacacaccttttctagatcattcctgtcatctacgctatgtttctacaatcatctgtaattctctctgccatagcatttatta

SEQ ID NO: 724774 - DNA, 666 bp, Homo sapiens
aaaggtagcaccatcattttgctcagttgctgataaaggcttgtgttttctcacactttacaaaagtattggcagctctcaattcacaaatgtgctaatacaaatatcttctgcatggtctgattgcacaccatctcctcaggccacccattgtcctagaaccaaacatctggagcatggtacctcctgacatcttggtggaaagtggtggtggtggtggttaggcgctgactcttttctatcaactctttttttcctcctaattttacgtcttgtattctctttttaamaatgctgttgatttttgttcaggcataattccactttgcaatttaactattgaccctctacttaagaattgcccctgtacatttgatagattgaggtgcaggtccagaaaggggtcacaatgtaaaaagaacaaaggagccttctggaaaagaaattattctaagggtgctagcatagccctggaaatgtcaggctctgtcaactccatgtttctgcatatgttgtccacactgtctacaacacatttcttcatgtaggtaatcctttctcatctttcaagactcaccttgatcacacaccttttctagatcattcctgtcatctacgctatgtttctacaatcatctgtaattctctctgccatagcatttatta

SEQ ID NO: 724775 - DNA, 635 bp, Homo sapiens
atataaaaccatattacaggycagtcacagtggcttgcacctgtaatcccagcactttgggaggcccaggtgggcagatcacctgaggtaaggagttcaagaccagtttgaccaacatggtgaaaccccatctctactaaaaatagaaaaattaaccgggcatggtgacgggcgcctataatcccagctactcagggggctcaggcatgagaattgcttgaacccaggaggcggaggttgcagtgagctgagattgccccattgcactccagcctgggcgacagagagagattacctctcaaaataaataagtaaatgaataaatagataaataaatccatatacatagatttgatgtataggttctacattttttacttttggaaaaaatatgtagggaaaaagtttacaaatctctcattctctgctataaaaagttataaatgaaaccaacaattatttgtgcagttatcagttctgaatacaatatgaattatacctagaaattagaatttatctagatgcctctgcctgcttgtgaagaacacaaaattatatcacagaacactctggcttctataatttggggcaattttgaaaagcagacttcttcctaatgtaaggaaagaataatt

SEQ ID NO: 724776 - DNA, 635 bp, Homo sapiens
atataaaaccatattacaggccagtcacagtggcttgcacctgtaatcccagcactttgggaggcccaggtgggcagatcacctgaggtaaggagttcaagaccagtttgaccaacatggtgaaaccccatctctactaaaaatagaaaaattaaccrggcatggtgacgggcgcctataatcccagctactcagggggctcaggcatgagaattgcttgaacccaggaggcggaggttgcagtgagctgagattgccccattgcactccagcctgggcgacagagagagattacctctcaaaataaataagtaaatgaataaatagataaataaatccatatacatagatttgatgtataggttctacattttttacttttggaaaaaatatgtagggaaaaagtttacaaatctctcattctctgctataaaaagttataaatgaaaccaacaattatttgtgcagttatcagttctgaatacaatatgaattatacctagaaattagaatttatctagatgcctctgcctgcttgtgaagaacacaaaattatatcacagaacactctggcttctataatttggggcaattttgaaaagcagacttcttcctaatgtaaggaaagaataatt

SEQ ID NO: 724777 - DNA, 3243 bp, Homo sapiens
tgcctacttgagttttctcttccattcagctcatgttattccactcattctagactttctttctttgctttttctctcctctgccataacactcgaataacattcctcccagcatcaactccccttctcctgccaatagcacctcacttttccttttggaaaaccacccttttggaactcttaattcttgcagtttggatggggctgaggctacattcttctgcccctatccactccaggggtgggaacatgacccaggtctgcagaatcagaggcacagggagtcaggtaggttgagggtttctctgcagccctaaggaagaaggtattttccacctgggttgctgagctgataggatgtacatccacagctgccagacaccactccttgccttatgaaaatgcaatgaactcaggaaagcagagctgagaccgcatcctaatgacatcatttggtctccatccagccttccctgagcttacttcttgcctttttaattacatgattcaaccaccaacctcctccccacccactttttttttgtttttccaaacagggttgattttccataacttgtagttaggagtcatgacttgcataccaaatcggattcatttcttaacaccccactcatacttcatctccctcatcaaacctttaatcatttactgcagcacacaaattttatcagctctgaatctacaaagaacttaatgtctgtgctacatggttttatttaattaaataaataaataaacaaayaaataaataaataaatttttgagacagggtctcaccctgtcatccaggctggagtgcagtggcatgatcacggctcactgcagcctcgacctcctgggctcaggtgatcctcccagctcagcctccctgggactaaggctacacagttttagaaattattctgcacatgctgaccgtgaagcacttcaggaaattgtgaattgatgagtcctgggtattagttttcttcctttgtttcccccagtcacactgcatcacacaggccaactcaaaaccccgcgagctttttcctggtctctcatgggttgatctcactgggttctcacagccaccctggggaaggttaagtcacttgctgaatgaaggtcacctggtaggatttgggggaggtggcgagtgcttatagaactgtacctttttaatagttaggattaaacttgcttacaatgacaaaaacccaaaataacaatggcttaagttagattgaagtttacttctctttcacataaaagaatggaggtgggcagtccagggtaggagctgcacccctcagagtcagatccccgggattctcccatgggtagttctgccacgagcgacttccacttccaaactcacctcctgattcaagatggctgccaaggctctaacaggcagggaagaggaatggattgtccttttcctttaagactccctgtcagaaactgcacttgtcctttctgcttgcatcccactagacagaatttacttacatgaaactgccataaaggattccataagtacagtctctgttccacatggctacagtcttatctagtggaaggaggcaggagggttgtcttactgaagaagggaaatgggcattggggcatcactagaagcttctggtcctggttgctcagcccaattccacccataggttgtttattgtttcatatttgtgttctctctcccaatagtctgtgaattcctggcaagcaaaggtggtaggcagttctctcttgcgttttcagctccttggattgtgctttttacattgtatgtttttccttttctttgggactgagtcttgctctgtcgcccaggctggagtgcaatggcatgatcttggctcactgcaatctccacctccctggttcaagtgattctcatgcctcagcctaccgagtagctgggattacaggcgcctgccaccatgcctgactaatttttgtattttcaggtagagacagggtttcaccatgttggccaggctggtctcgaactcttgacctcaggtgatccacctgcctcggcctcccagagtgctgggattataggcgtgagccgctgtgcccagactacattgtattttgatgataataaatctataggtgttaaggagagaagttgtaaaaggaaatcaaaagctacatgttacacagcttaattatcccccaaaaataccaccagtatgaagctgggctcatggtcttgcattgctaatttttttcttgagattggttcttgctatgttgcccaggctggactcaaactcctaggattaagggatcctcccacctcagcctctttagtagctgggactacaggcgtgcaccacttcccccttgctcaggctttgaaatcagatgattcagttctagaatcctggctttacatcttaagagctgactggtcctggaaaagtgagtaaaagctctctgagatttgctttctttatctgctaagatagggataatggtatcttccttgcattgtgagaattccaaagatgatttatgtaaaatgctcagcacattacaggtttcatttattcctttctttggtcttcagtctgtgataatggactggggttggtctatgccaggctgtgtgtctaatttagcagatcagaattactcaaaggcatcagaaatgtgtcttctccttctctgacttgtacacttaagacttaatctttgtccatctaaagcaaaacaaaaaatgatgccaaatataattacaatgttaatgtaagaaatatctagttttgcacacatggctgaataagtagcatctactggaagatttcctttgcagtgacttgcaaatagcaactgtaacttaattactcagaaaaattccgggaacaatccctttgcctttgtatctccctcttctggaacatcaacaaataattccctgggtgactttcagcaagctgtttagaaagttattgcagcttgaatgtaggagactctgatatataatatcagaattataatagaaccagccccagtcataaaattgttgtctgctgctccttaacatttctccaaaagagccaacagatttattattattattattattattatttgcaaaagtgtctcgctctgtcacccaggctggagtgcagtggcatgatcttggttcacttcagcctctgcctcctgggttccagtgataattctgcatcagtctcctgggtagcagggatt

SEQ ID NO: 724778 - DNA, 3243 bp, Homo sapiens
tgcctacttgagttttctcttccattcagctcatgttattccactcattctagactttctttctttgctttttctctcctctgccataacactcgaataacattcctcccagcatcaactccccttctcctgccaatagcacctcacttttccttttggaaaaccacccttttggaactcttaattcttgcagtttggatggggctgaggctacattcttctgcccctatccactccaggggtgggaacatgacccaggtctgcagaatcagaggcacagggagtcaggtaggttgagggtttctctgcagccctaaggaagaaggtattttccacctgggttgctgagctgataggatgtacatccacagctgccagacaccactccttgccttatgaaaatgcaatgaactcaggaaagcagagctgagaccgcatcctaatgacatcatttggtctccatccagccttccctgagcttacttcttgcctttttaattacatgattcaaccaccaacctcctccccacccactttttttttgtttttccaaacagggttgattttccataacttgtagttaggagtcatgacttgcataccaaatcggattcatttcttaacaccccactcatacttcatctccctcatcaaacctttaatcatttactgcagcacacaaattttatcagctctgaatctacaaagaacttaatgtctgtgctacatggttttatttaattaaataaataaataaacaaacaaataaataaataaatttttgagacagggtctcrccctgtcatccaggctggagtgcagtggcatgatcacggctcactgcagcctcgacctcctgggctcaggtgatcctcccagctcagcctccctgggactaaggctacacagttttagaaattattctgcacatgctgaccgtgaagcacttcaggaaattgtgaattgatgagtcctgggtattagttttcttcctttgtttcccccagtcacactgcatcacacaggccaactcaaaaccccgcgagctttttcctggtctctcatgggttgatctcactgggttctcacagccaccctggggaaggttaagtcacttgctgaatgaaggtcacctggtaggatttgggggaggtggcgagtgcttatagaactgtacctttttaatagttaggattaaacttgcttacaatgacaaaaacccaaaataacaatggcttaagttagattgaagtttacttctctttcacataaaagaatggaggtgggcagtccagggtaggagctgcacccctcagagtcagatccccgggattctcccatgggtagttctgccacgagcgacttccacttccaaactcacctcctgattcaagatggctgccaaggctctaacaggcagggaagaggaatggattgtccttttcctttaagactccctgtcagaaactgcacttgtcctttctgcttgcatcccactagacagaatttacttacatgaaactgccataaaggattccataagtacagtctctgttccacatggctacagtcttatctagtggaaggaggcaggagggttgtcttactgaagaagggaaatgggcattggggcatcactagaagcttctggtcctggttgctcagcccaattccacccataggttgtttattgtttcatatttgtgttctctctcccaatagtctgtgaattcctggcaagcaaaggtggtaggcagttctctcttgcgttttcagctccttggattgtgctttttacattgtatgtttttccttttctttgggactgagtcttgctctgtcgcccaggctggagtgcaatggcatgatcttggctcactgcaatctccacctccctggttcaagtgattctcatgcctcagcctaccgagtagctgggattacaggcgcctgccaccatgcctgactaatttttgtattttcaggtagagacagggtttcaccatgttggccaggctggtctcgaactcttgacctcaggtgatccacctgcctcggcctcccagagtgctgggattataggcgtgagccgctgtgcccagactacattgtattttgatgataataaatctataggtgttaaggagagaagttgtaaaaggaaatcaaaagctacatgttacacagcttaattatcccccaaaaataccaccagtatgaagctgggctcatggtcttgcattgctaatttttttcttgagattggttcttgctatgttgcccaggctggactcaaactcctaggattaagggatcctcccacctcagcctctttagtagctgggactacaggcgtgcaccacttcccccttgctcaggctttgaaatcagatgattcagttctagaatcctggctttacatcttaagagctgactggtcctggaaaagtgagtaaaagctctctgagatttgctttctttatctgctaagatagggataatggtatcttccttgcattgtgagaattccaaagatgatttatgtaaaatgctcagcacattacaggtttcatttattcctttctttggtcttcagtctgtgataatggactggggttggtctatgccaggctgtgtgtctaatttagcagatcagaattactcaaaggcatcagaaatgtgtcttctccttctctgacttgtacacttaagacttaatctttgtccatctaaagcaaaacaaaaaatgatgccaaatataattacaatgttaatgtaagaaatatctagttttgcacacatggctgaataagtagcatctactggaagatttcctttgcagtgacttgcaaatagcaactgtaacttaattactcagaaaaattccgggaacaatccctttgcctttgtatctccctcttctggaacatcaacaaataattccctgggtgactttcagcaagctgtttagaaagttattgcagcttgaatgtaggagactctgatatataatatcagaattataatagaaccagccccagtcataaaattgttgtctgctgctccttaacatttctccaaaagagccaacagatttattattattattattattattatttgcaaaagtgtctcgctctgtcacccaggctggagtgcagtggcatgatcttggttcacttcagcctctgcctcctgggttccagtgataattctgcatcagtctcctgggtagcagggatt

SEQ ID NO: 724779 - DNA, 3243 bp, Homo sapiens
tgcctacttgagttttctcttccattcagctcatgttattccactcattctagactttctttctttgctttttctctcctctgccataacactcgaataacattcctcccagcatcaactccccttctcctgccaatagcacctcacttttccttttggaaaaccacccttttggaactcttaattcttgcagtttggatggggctgaggctacattcttctgcccctatccactccaggggtgggaacatgacccaggtctgcagaatcagaggcacagggagtcaggtaggttgagggtttctctgcagccctaaggaagaaggtattttccacctgggttgctgagctgataggatgtacatccacagctgccagacaccactccttgccttatgaaaatgcaatgaactcaggaaagcagagctgagaccgcatcctaatgacatcatttggtctccatccagccttccctgagcttacttcttgcctttttaattacatgattcaaccaccaacctcctccccacccactttttttttgtttttccaaacagggttgattttccataacttgtagttaggagtcatgacttgcataccaaatcggattcatttcttaacaccccactcatacttcatctccctcatcaaacctttaatcatttactgcagcacacaaattttatcagctctgaatctacaaagaacttaatgtctgtgctacatggttttatttaattaaataaataaataaacaaacaaataaataaataaatttttgagacagggtctcaccctgtcatccaggctggagtgcagtggcatgatcacggctcactgcagcctcgacctcctgggctcaggtgatcctcccagctcagcctccctgggactaaggctacacagttttagaaattattctgcacatgctgaccgtgaagcacttcaggaaattgtgaattgatgagtcctgggtattagttttcttcctttgtttccyccagtcacactgcatcacacaggccaactcaaaaccccgcgagctttttcctggtctctcatgggttgatctcactgggttctcacagccaccctggggaaggttaagtcacttgctgaatgaaggtcacctggtaggatttgggggaggtggcgagtgcttatagaactgtacctttttaatagttaggattaaacttgcttacaatgacaaaaacccaaaataacaatggcttaagttagattgaagtttacttctctttcacataaaagaatggaggtgggcagtccagggtaggagctgcacccctcagagtcagatccccgggattctcccatgggtagttctgccacgagcgacttccacttccaaactcacctcctgattcaagatggctgccaaggctctaacaggcagggaagaggaatggattgtccttttcctttaagactccctgtcagaaactgcacttgtcctttctgcttgcatcccactagacagaatttacttacatgaaactgccataaaggattccataagtacagtctctgttccacatggctacagtcttatctagtggaaggaggcaggagggttgtcttactgaagaagggaaatgggcattggggcatcactagaagcttctggtcctggttgctcagcccaattccacccataggttgtttattgtttcatatttgtgttctctctcccaatagtctgtgaattcctggcaagcaaaggtggtaggcagttctctcttgcgttttcagctccttggattgtgctttttacattgtatgtttttccttttctttgggactgagtcttgctctgtcgcccaggctggagtgcaatggcatgatcttggctcactgcaatctccacctccctggttcaagtgattctcatgcctcagcctaccgagtagctgggattacaggcgcctgccaccatgcctgactaatttttgtattttcaggtagagacagggtttcaccatgttggccaggctggtctcgaactcttgacctcaggtgatccacctgcctcggcctcccagagtgctgggattataggcgtgagccgctgtgcccagactacattgtattttgatgataataaatctataggtgttaaggagagaagttgtaaaaggaaatcaaaagctacatgttacacagcttaattatcccccaaaaataccaccagtatgaagctgggctcatggtcttgcattgctaatttttttcttgagattggttcttgctatgttgcccaggctggactcaaactcctaggattaagggatcctcccacctcagcctctttagtagctgggactacaggcgtgcaccacttcccccttgctcaggctttgaaatcagatgattcagttctagaatcctggctttacatcttaagagctgactggtcctggaaaagtgagtaaaagctctctgagatttgctttctttatctgctaagatagggataatggtatcttccttgcattgtgagaattccaaagatgatttatgtaaaatgctcagcacattacaggtttcatttattcctttctttggtcttcagtctgtgataatggactggggttggtctatgccaggctgtgtgtctaatttagcagatcagaattactcaaaggcatcagaaatgtgtcttctccttctctgacttgtacacttaagacttaatctttgtccatctaaagcaaaacaaaaaatgatgccaaatataattacaatgttaatgtaagaaatatctagttttgcacacatggctgaataagtagcatctactggaagatttcctttgcagtgacttgcaaatagcaactgtaacttaattactcagaaaaattccgggaacaatccctttgcctttgtatctccctcttctggaacatcaacaaataattccctgggtgactttcagcaagctgtttagaaagttattgcagcttgaatgtaggagactctgatatataatatcagaattataatagaaccagccccagtcataaaattgttgtctgctgctccttaacatttctccaaaagagccaacagatttattattattattattattattatttgcaaaagtgtctcgctctgtcacccaggctggagtgcagtggcatgatcttggttcacttcagcctctgcctcctgggttccagtgataattctgcatcagtctcctgggtagcagggatt

SEQ ID NO: 724780 - DNA, 3243 bp, Homo sapiens
tgcctacttgagttttctcttccattcagctcatgttattccactcattctagactttctttctttgctttttctctcctctgccataacactcgaataacattcctcccagcatcaactccccttctcctgccaatagcacctcacttttccttttggaaaaccacccttttggaactcttaattcttgcagtttggatggggctgaggctacattcttctgcccctatccactccaggggtgggaacatgacccaggtctgcagaatcagaggcacagggagtcaggtaggttgagggtttctctgcagccctaaggaagaaggtattttccacctgggttgctgagctgataggatgtacatccacagctgccagacaccactccttgccttatgaaaatgcaatgaactcaggaaagcagagctgagaccgcatcctaatgacatcatttggtctccatccagccttccctgagcttacttcttgcctttttaattacatgattcaaccaccaacctcctccccacccactttttttttgtttttccaaacagggttgattttccataacttgtagttaggagtcatgacttgcataccaaatcggattcatttcttaacaccccactcatacttcatctccctcatcaaacctttaatcatttactgcagcacacaaattttatcagctctgaatctacaaagaacttaatgtctgtgctacatggttttatttaattaaataaataaataaacaaacaaataaataaataaatttttgagacagggtctcaccctgtcatccaggctggagtgcagtggcatgatcacggctcactgcagcctcgacctcctgggctcaggtgatcctcccagctcagcctccctgggactaaggctacacagttttagaaattattctgcacatgctgaccgtgaagcacttcaggaaattgtgaattgatgagtcctgggtattagttttcttcctttgtttcccccagtcacactgcatcacacaggccaactcaaaaccccgcgagctttttcctggtctctcatgggttgatctcactgggttctcacagccaccctggggaaggttaagtcacttgctgaatgaaggtcacctggtaggatttgggggaggtggcgagtgcttatagaactgtacctttttaatagttaggattaaacttgcttacaatgacaaaaacccaaaataacaatggcttaagttagattgaagtttacttctctttcacataaaagaatggaggtgggcagtccagggtaggagctrcacccctcagagtcagatccccgggattctcccatgggtagttctgccacgagcgacttccacttccaaactcacctcctgattcaagatggctgccaaggctctaacaggcagggaagaggaatggattgtccttttcctttaagactccctgtcagaaactgcacttgtcctttctgcttgcatcccactagacagaatttacttacatgaaactgccataaaggattccataagtacagtctctgttccacatggctacagtcttatctagtggaaggaggcaggagggttgtcttactgaagaagggaaatgggcattggggcatcactagaagcttctggtcctggttgctcagcccaattccacccataggttgtttattgtttcatatttgtgttctctctcccaatagtctgtgaattcctggcaagcaaaggtggtaggcagttctctcttgcgttttcagctccttggattgtgctttttacattgtatgtttttccttttctttgggactgagtcttgctctgtcgcccaggctggagtgcaatggcatgatcttggctcactgcaatctccacctccctggttcaagtgattctcatgcctcagcctaccgagtagctgggattacaggcgcctgccaccatgcctgactaatttttgtattttcaggtagagacagggtttcaccatgttggccaggctggtctcgaactcttgacctcaggtgatccacctgcctcggcctcccagagtgctgggattataggcgtgagccgctgtgcccagactacattgtattttgatgataataaatctataggtgttaaggagagaagttgtaaaaggaaatcaaaagctacatgttacacagcttaattatcccccaaaaataccaccagtatgaagctgggctcatggtcttgcattgctaatttttttcttgagattggttcttgctatgttgcccaggctggactcaaactcctaggattaagggatcctcccacctcagcctctttagtagctgggactacaggcgtgcaccacttcccccttgctcaggctttgaaatcagatgattcagttctagaatcctggctttacatcttaagagctgactggtcctggaaaagtgagtaaaagctctctgagatttgctttctttatctgctaagatagggataatggtatcttccttgcattgtgagaattccaaagatgatttatgtaaaatgctcagcacattacaggtttcatttattcctttctttggtcttcagtctgtgataatggactggggttggtctatgccaggctgtgtgtctaatttagcagatcagaattactcaaaggcatcagaaatgtgtcttctccttctctgacttgtacacttaagacttaatctttgtccatctaaagcaaaacaaaaaatgatgccaaatataattacaatgttaatgtaagaaatatctagttttgcacacatggctgaataagtagcatctactggaagatttcctttgcagtgacttgcaaatagcaactgtaacttaattactcagaaaaattccgggaacaatccctttgcctttgtatctccctcttctggaacatcaacaaataattccctgggtgactttcagcaagctgtttagaaagttattgcagcttgaatgtaggagactctgatatataatatcagaattataatagaaccagccccagtcataaaattgttgtctgctgctccttaacatttctccaaaagagccaacagatttattattattattattattattatttgcaaaagtgtctcgctctgtcacccaggctggagtgcagtggcatgatcttggttcacttcagcctctgcctcctgggttccagtgataattctgcatcagtctcctgggtagcagggatt

SEQ ID NO: 724781 - DNA, 3243 bp, Homo sapiens
tgcctacttgagttttctcttccattcagctcatgttattccactcattctagactttctttctttgctttttctctcctctgccataacactcgaataacattcctcccagcatcaactccccttctcctgccaatagcacctcacttttccttttggaaaaccacccttttggaactcttaattcttgcagtttggatggggctgaggctacattcttctgcccctatccactccaggggtgggaacatgacccaggtctgcagaatcagaggcacagggagtcaggtaggttgagggtttctctgcagccctaaggaagaaggtattttccacctgggttgctgagctgataggatgtacatccacagctgccagacaccactccttgccttatgaaaatgcaatgaactcaggaaagcagagctgagaccgcatcctaatgacatcatttggtctccatccagccttccctgagcttacttcttgcctttttaattacatgattcaaccaccaacctcctccccacccactttttttttgtttttccaaacagggttgattttccataacttgtagttaggagtcatgacttgcataccaaatcggattcatttcttaacaccccactcatacttcatctccctcatcaaacctttaatcatttactgcagcacacaaattttatcagctctgaatctacaaagaacttaatgtctgtgctacatggttttatttaattaaataaataaataaacaaacaaataaataaataaatttttgagacagggtctcaccctgtcatccaggctggagtgcagtggcatgatcacggctcactgcagcctcgacctcctgggctcaggtgatcctcccagctcagcctccctgggactaaggctacacagttttagaaattattctgcacatgctgaccgtgaagcacttcaggaaattgtgaattgatgagtcctgggtattagttttcttcctttgtttcccccagtcacactgcatcacacaggccaactcaaaaccccgcgagctttttcctggtctctcatgggttgatctcactgggttctcacagccaccctggggaaggttaagtcacttgctgaatgaaggtcacctggtaggatttgggggaggtggcgagtgcttatagaactgtacctttttaatagttaggattaaacttgcttacaatgacaaaaacccaaaataacaatggcttaagttagattgaagtttacttctctttcacataaaagaatggaggtgggcagtccagggtaggagctgcacccctcagagtcagatccccgggattctcccatgggtagttctgccrcgagcgacttccacttccaaactcacctcctgattcaagatggctgccaaggctctaacaggcagggaagaggaatggattgtccttttcctttaagactccctgtcagaaactgcacttgtcctttctgcttgcatcccactagacagaatttacttacatgaaactgccataaaggattccataagtacagtctctgttccacatggctacagtcttatctagtggaaggaggcaggagggttgtcttactgaagaagggaaatgggcattggggcatcactagaagcttctggtcctggttgctcagcccaattccacccataggttgtttattgtttcatatttgtgttctctctcccaatagtctgtgaattcctggcaagcaaaggtggtaggcagttctctcttgcgttttcagctccttggattgtgctttttacattgtatgtttttccttttctttgggactgagtcttgctctgtcgcccaggctggagtgcaatggcatgatcttggctcactgcaatctccacctccctggttcaagtgattctcatgcctcagcctaccgagtagctgggattacaggcgcctgccaccatgcctgactaatttttgtattttcaggtagagacagggtttcaccatgttggccaggctggtctcgaactcttgacctcaggtgatccacctgcctcggcctcccagagtgctgggattataggcgtgagccgctgtgcccagactacattgtattttgatgataataaatctataggtgttaaggagagaagttgtaaaaggaaatcaaaagctacatgttacacagcttaattatcccccaaaaataccaccagtatgaagctgggctcatggtcttgcattgctaatttttttcttgagattggttcttgctatgttgcccaggctggactcaaactcctaggattaagggatcctcccacctcagcctctttagtagctgggactacaggcgtgcaccacttcccccttgctcaggctttgaaatcagatgattcagttctagaatcctggctttacatcttaagagctgactggtcctggaaaagtgagtaaaagctctctgagatttgctttctttatctgctaagatagggataatggtatcttccttgcattgtgagaattccaaagatgatttatgtaaaatgctcagcacattacaggtttcatttattcctttctttggtcttcagtctgtgataatggactggggttggtctatgccaggctgtgtgtctaatttagcagatcagaattactcaaaggcatcagaaatgtgtcttctccttctctgacttgtacacttaagacttaatctttgtccatctaaagcaaaacaaaaaatgatgccaaatataattacaatgttaatgtaagaaatatctagttttgcacacatggctgaataagtagcatctactggaagatttcctttgcagtgacttgcaaatagcaactgtaacttaattactcagaaaaattccgggaacaatccctttgcctttgtatctccctcttctggaacatcaacaaataattccctgggtgactttcagcaagctgtttagaaagttattgcagcttgaatgtaggagactctgatatataatatcagaattataatagaaccagccccagtcataaaattgttgtctgctgctccttaacatttctccaaaagagccaacagatttattattattattattattattatttgcaaaagtgtctcgctctgtcacccaggctggagtgcagtggcatgatcttggttcacttcagcctctgcctcctgggttccagtgataattctgcatcagtctcctgggtagcagggatt

SEQ ID NO: 724782 - DNA, 3243 bp, Homo sapiens
tgcctacttgagttttctcttccattcagctcatgttattccactcattctagactttctttctttgctttttctctcctctgccataacactcgaataacattcctcccagcatcaactccccttctcctgccaatagcacctcacttttccttttggaaaaccacccttttggaactcttaattcttgcagtttggatggggctgaggctacattcttctgcccctatccactccaggggtgggaacatgacccaggtctgcagaatcagaggcacagggagtcaggtaggttgagggtttctctgcagccctaaggaagaaggtattttccacctgggttgctgagctgataggatgtacatccacagctgccagacaccactccttgccttatgaaaatgcaatgaactcaggaaagcagagctgagaccgcatcctaatgacatcatttggtctccatccagccttccctgagcttacttcttgcctttttaattacatgattcaaccaccaacctcctccccacccactttttttttgtttttccaaacagggttgattttccataacttgtagttaggagtcatgacttgcataccaaatcggattcatttcttaacaccccactcatacttcatctccctcatcaaacctttaatcatttactgcagcacacaaattttatcagctctgaatctacaaagaacttaatgtctgtgctacatggttttatttaattaaataaataaataaacaaacaaataaataaataaatttttgagacagggtctcaccctgtcatccaggctggagtgcagtggcatgatcacggctcactgcagcctcgacctcctgggctcaggtgatcctcccagctcagcctccctgggactaaggctacacagttttagaaattattctgcacatgctgaccgtgaagcacttcaggaaattgtgaattgatgagtcctgggtattagttttcttcctttgtttcccccagtcacactgcatcacacaggccaactcaaaaccccgcgagctttttcctggtctctcatgggttgatctcactgggttctcacagccaccctggggaaggttaagtcacttgctgaatgaaggtcacctggtaggatttgggggaggtggcgagtgcttatagaactgtacctttttaatagttaggattaaacttgcttacaatgacaaaaacccaaaataacaatggcttaagttagattgaagtttacttctctttcacataaaagaatggaggtgggcagtccagggtaggagctgcacccctcagagtcagatccccgggattctcccatgggtagttctgccacgagcgacttccacttccaaactcacctcctgattcaagatggctgccaaggctctaacaggcagggaagaggaatggattgtccttttcctttaagactccctgtcagaaactgcacttgtcctttctgcttkcatcccactagacagaatttacttacatgaaactgccataaaggattccataagtacagtctctgttccacatggctacagtcttatctagtggaaggaggcaggagggttgtcttactgaagaagggaaatgggcattggggcatcactagaagcttctggtcctggttgctcagcccaattccacccataggttgtttattgtttcatatttgtgttctctctcccaatagtctgtgaattcctggcaagcaaaggtggtaggcagttctctcttgcgttttcagctccttggattgtgctttttacattgtatgtttttccttttctttgggactgagtcttgctctgtcgcccaggctggagtgcaatggcatgatcttggctcactgcaatctccacctccctggttcaagtgattctcatgcctcagcctaccgagtagctgggattacaggcgcctgccaccatgcctgactaatttttgtattttcaggtagagacagggtttcaccatgttggccaggctggtctcgaactcttgacctcaggtgatccacctgcctcggcctcccagagtgctgggattataggcgtgagccgctgtgcccagactacattgtattttgatgataataaatctataggtgttaaggagagaagttgtaaaaggaaatcaaaagctacatgttacacagcttaattatcccccaaaaataccaccagtatgaagctgggctcatggtcttgcattgctaatttttttcttgagattggttcttgctatgttgcccaggctggactcaaactcctaggattaagggatcctcccacctcagcctctttagtagctgggactacaggcgtgcaccacttcccccttgctcaggctttgaaatcagatgattcagttctagaatcctggctttacatcttaagagctgactggtcctggaaaagtgagtaaaagctctctgagatttgctttctttatctgctaagatagggataatggtatcttccttgcattgtgagaattccaaagatgatttatgtaaaatgctcagcacattacaggtttcatttattcctttctttggtcttcagtctgtgataatggactggggttggtctatgccaggctgtgtgtctaatttagcagatcagaattactcaaaggcatcagaaatgtgtcttctccttctctgacttgtacacttaagacttaatctttgtccatctaaagcaaaacaaaaaatgatgccaaatataattacaatgttaatgtaagaaatatctagttttgcacacatggctgaataagtagcatctactggaagatttcctttgcagtgacttgcaaatagcaactgtaacttaattactcagaaaaattccgggaacaatccctttgcctttgtatctccctcttctggaacatcaacaaataattccctgggtgactttcagcaagctgtttagaaagttattgcagcttgaatgtaggagactctgatatataatatcagaattataatagaaccagccccagtcataaaattgttgtctgctgctccttaacatttctccaaaagagccaacagatttattattattattattattattatttgcaaaagtgtctcgctctgtcacccaggctggagtgcagtggcatgatcttggttcacttcagcctctgcctcctgggttccagtgataattctgcatcagtctcctgggtagcagggatt

SEQ ID NO: 724783 - DNA, 1465 bp, Homo sapiens
tgagctatgcagccagcagtcaacaagccactctcaagagccagggttgtcccaacagagacaggcaaatcagaaatcaacagcccttgaaaagtgtgcggtgcaacaatgagcaatggggcctgcgacatccccaaatcttgcaccccaagaaagctgtatccccagtcagtccccytcagcactggccgaagacatccggtgcctctagccaccatcaccactgtccaaggcactgtcttctttgggaaggtatctgatttggtcagtcacaaattcttttttagccttccctggagaaaaacaagtccccaagaaaaaattcactctatgtagagaaaaaatattttctctcatgttagtacatgcagaacatttaatattccacaatatatatggttttttattcataagagggtgatggcttttatttgtgccatgcttggtgtgggcttggtttccagaagcgacaggacatggagggatgttgacagtggtgctgtaagcccaccttcatcctgagttccttcactgaaccttatgtttccataataccgtctttacacaaacaacaaaaaattctaaaaacaagatgagaaaaacctatgaaggtcccactctgaaataaggttcaacccatctttccactacttactctacctcaaacttcatgcagctgtagggagaaggtttgcagagatgtcacgggactgaacatctccatgcaggctccaggaagtgccacagccgagtaccttcatgtgtcacaaaatagtggaagtttgggtgggagagtgctgggccctgagtttagaagtgggagaagtcttgaccctgggtatcctggtggagaatagataacgtctgcccctgggaagccccttctctccctgacaaaggctgggatggagatgggctctcttagctcagccaacatgcaaagcagagagtcctcatcccactgcctctccctttctcgcactctggagtggcagtggggacagaccttccagctctgtgcatgtgtaggtgggggctagggggtcaggggggcagcctttatggaggttgctgagggccgtgaactcccctgccccagatgagtgaatgaccctgctcctgggtcaccggcctttgtctatctcacctacatgtctctcagcttcagtgaagtagttctgggtgaatggagtagggtatgcctgtgtgtgcagaggcttctgatggtgggactctgtagagctacaggggatgcagacagagaattgaaaaggaggcaaagtggcgtgtgtgagggagccatcagtggtgccgtgagccaggagactctgacattccaaccccttagacaggcctagaggggcctagtgtctcatcctggccacaccccagggtctgtctctgctccagctcccagatcacagacccctagaaaaaccacatttacccccaacacagagggcca

SEQ ID NO: 724784 - DNA, 1465 bp, Homo sapiens
tgagctatgcagccagcagtcaacaagccactctcaagagccagggttgtcccaacagagacaggcaaatcagaaatcaacagcccttgaaaagtgtgcggtgcaacaatgagcaatggggcctgcgacatccccaaatcttgcaccccaagaaagctgtatccccagtcagtccccctcagcactggccgaagacatccggtgcctctagccaccatcaccactgtccaaggcactgtcttctttgggaaggtatctgatttggtcagtcacaaattcttttttagccttccctggagaaaaacaagtccccaagaaaaaattcactctatgtagagaaaaaatattttctctcatgttagtacatgcagaacatttaatatwccacaatatatatggttttttattcataagagggtgatggcttttatttgtgccatgcttggtgtgggcttggtttccagaagcgacaggacatggagggatgttgacagtggtgctgtaagcccaccttcatcctgagttccttcactgaaccttatgtttccataataccgtctttacacaaacaacaaaaaattctaaaaacaagatgagaaaaacctatgaaggtcccactctgaaataaggttcaacccatctttccactacttactctacctcaaacttcatgcagctgtagggagaaggtttgcagagatgtcacgggactgaacatctccatgcaggctccaggaagtgccacagccgagtaccttcatgtgtcacaaaatagtggaagtttgggtgggagagtgctgggccctgagtttagaagtgggagaagtcttgaccctgggtatcctggtggagaatagataacgtctgcccctgggaagccccttctctccctgacaaaggctgggatggagatgggctctcttagctcagccaacatgcaaagcagagagtcctcatcccactgcctctccctttctcgcactctggagtggcagtggggacagaccttccagctctgtgcatgtgtaggtgggggctagggggtcaggggggcagcctttatggaggttgctgagggccgtgaactcccctgccccagatgagtgaatgaccctgctcctgggtcaccggcctttgtctatctcacctacatgtctctcagcttcagtgaagtagttctgggtgaatggagtagggtatgcctgtgtgtgcagaggcttctgatggtgggactctgtagagctacaggggatgcagacagagaattgaaaaggaggcaaagtggcgtgtgtgagggagccatcagtggtgccgtgagccaggagactctgacattccaaccccttagacaggcctagaggggcctagtgtctcatcctggccacaccccagggtctgtctctgctccagctcccagatcacagacccctagaaaaaccacatttacccccaacacagagggcca

SEQ ID NO: 724785 - DNA, 1465 bp, Homo sapiens
tgagctatgcagccagcagtcaacaagccactctcaagagccagggttgtcccaacagagacaggcaaatcagaaatcaacagcccttgaaaagtgtgcggtgcaacaatgagcaatggggcctgcgacatccccaaatcttgcaccccaagaaagctgtatccccagtcagtccccctcagcactggccgaagacatccggtgcctctagccaccatcaccactgtccaaggcactgtcttctttgggaaggtatctgatttggtcagtcacaaattcttttttagccttccctggagaaaaacaagtccccaagaaaaaattcactctatgtagagaaaaaatattttctctcatgttagtacatgcagaacatttaatattccacaatatatatggttttttattcataagagggtgatggcttttatttgtgccatgcttggtgtgggcttggtttccagaagcgacaggacatggagggatgttgacagtggtgctgtaagcccaccttcatcctgagttccttcactgaaccttatgtttccataataccgtctttacacaaacaacaaaaaattctaaaaacaagatgagaaaaacctatgaaggtcccactctgaaataaggttcaacccatctttccactacttactctacctcaaacttcatgcagctgtagggagaaggtttgcagagatgtcacgggactgaacatctccatgcaggctccaggaagtgccacagccgagtaccttcatgtgtcacaaaatagtggaagtttgggtgggagagtgctgggccctgagtttagaagtgggagaagtcttgaccctgggtatcctggtggagaatagataacgtctgcccctgggaagccccttctctccctgacaaaggctgggatggagatgggctctcttagctcagccaacatgcaaagcagagagtcckcatcccactgcctctccctttctcgcactctggagtggcagtggggacagaccttccagctctgtgcatgtgtaggtgggggctagggggtcaggggggcagcctttatggaggttgctgagggccgtgaactcccctgccccagatgagtgaatgaccctgctcctgggtcaccggcctttgtctatctcacctacatgtctctcagcttcagtgaagtagttctgggtgaatggagtagggtatgcctgtgtgtgcagaggcttctgatggtgggactctgtagagctacaggggatgcagacagagaattgaaaaggaggcaaagtggcgtgtgtgagggagccatcagtggtgccgtgagccaggagactctgacattccaaccccttagacaggcctagaggggcctagtgtctcatcctggccacaccccagggtctgtctctgctccagctcccagatcacagacccctagaaaaaccacatttacccccaacacagagggcca

SEQ ID NO: 724786 - DNA, 1465 bp, Homo sapiens
tgagctatgcagccagcagtcaacaagccactctcaagagccagggttgtcccaacagagacaggcaaatcagaaatcaacagcccttgaaaagtgtgcggtgcaacaatgagcaatggggcctgcgacatccccaaatcttgcaccccaagaaagctgtatccccagtcagtccccctcagcactggccgaagacatccggtgcctctagccaccatcaccactgtccaaggcactgtcttctttgggaaggtatctgatttggtcagtcacaaattcttttttagccttccctggagaaaaacaagtccccaagaaaaaattcactctatgtagagaaaaaatattttctctcatgttagtacatgcagaacatttaatattccacaatatatatggttttttattcataagagggtgatggcttttatttgtgccatgcttggtgtgggcttggtttccagaagcgacaggacatggagggatgttgacagtggtgctgtaagcccaccttcatcctgagttccttcactgaaccttatgtttccataataccgtctttacacaaacaacaaaaaattctaaaaacaagatgagaaaaacctatgaaggtcccactctgaaataaggttcaacccatctttccactacttactctacctcaaacttcatgcagctgtagggagaaggtttgcagagatgtcacgggactgaacatctccatgcaggctccaggaagtgccacagccgagtaccttcatgtgtcacaaaatagtggaagtttgggtgggagagtgctgggccctgagtttagaagtgggagaagtcttgaccctgggtatcctggtggagaatagataacgtctgcccctgggaagccccttctctccctgacaaaggctgggatggagatgggctctcttagctcagccaacatgcaaagcagagagtcctcatcccactgcctctccctttctcgcactctggagtggcagtggggacagaccttccagctctgtgcatgtgtaggtgggggctagggggtcaggggggcagcctttatggaggttgctgagggccgtgaactcccctgccccagatgagtgaatgaccctgctcctgggtcaccggcctttgtctatctcacctacatgtctctcagcttcagygaagtagttctgggtgaatggagtagggtatgcctgtgtgtgcagaggcttctgatggtgggactctgtagagctacaggggatgcagacagagaattgaaaaggaggcaaagtggcgtgtgtgagggagccatcagtggtgccgtgagccaggagactctgacattccaaccccttagacaggcctagaggggcctagtgtctcatcctggccacaccccagggtctgtctctgctccagctcccagatcacagacccctagaaaaaccacatttacccccaacacagagggcca

SEQ ID NO: 724787 - DNA, 1465 bp, Homo sapiens
tgagctatgcagccagcagtcaacaagccactctcaagagccagggttgtcccaacagagacaggcaaatcagaaatcaacagcccttgaaaagtgtgcggtgcaacaatgagcaatggggcctgcgacatccccaaatcttgcaccccaagaaagctgtatccccagtcagtccccctcagcactggccgaagacatccggtgcctctagccaccatcaccactgtccaaggcactgtcttctttgggaaggtatctgatttggtcagtcacaaattcttttttagccttccctggagaaaaacaagtccccaagaaaaaattcactctatgtagagaaaaaatattttctctcatgttagtacatgcagaacatttaatattccacaatatatatggttttttattcataagagggtgatggcttttatttgtgccatgcttggtgtgggcttggtttccagaagcgacaggacatggagggatgttgacagtggtgctgtaagcccaccttcatcctgagttccttcactgaaccttatgtttccataataccgtctttacacaaacaacaaaaaattctaaaaacaagatgagaaaaacctatgaaggtcccactctgaaataaggttcaacccatctttccactacttactctacctcaaacttcatgcagctgtagggagaaggtttgcagagatgtcacgggactgaacatctccatgcaggctccaggaagtgccacagccgagtaccttcatgtgtcacaaaatagtggaagtttgggtgggagagtgctgggccctgagtttagaagtgggagaagtcttgaccctgggtatcctggtggagaatagataacgtctgcccctgggaagccccttctctccctgacaaaggctgggatggagatgggctctcttagctcagccaacatgcaaagcagagagtcctcatcccactgcctctccctttctcgcactctggagtggcagtggggacagaccttccagctctgtgcatgtgtaggtgggggctagggggtcaggggggcagcctttatggaggttgctgagggccgtgaactcccctgccccagatgagtgaatgaccctgctcctgggtcaccggcctttgtctatctcacctacatgtctctcagcttcagtgaagtagttctgggtgaatggagtagggtatgcctgtgtgtgcagaggcttctgatggtgggactctgtagagctacaggggatgcagacagagaattgaaaaggaggcaaagtggcgtgtgtgagggagccatcagtggtgccgtgagccaggagactctgacattccaaccccttagacaggcctagaggggcctagtgtctcatcctggccacaccccagggtctgtctctgctccagctcccagatcacagacccctagaaaaaccacatttacccccaacacrgagggcca

SEQ ID NO: 724788 - DNA, 1212 bp, Homo sapiens
gcctcaccccaccttctggggcatctgaagccctgagcacttgagttctcgggtttattagtaaaattttattatttttattattatttgagatagagtctcactctgtcacccaggctagagtgcagtggcgcaatctcggctcactgcaacctccgcctcctgggttcaagcagttctcttgcctcagcctcctgagtagctgggattacaggcgtgcaccaccacgtcggctaatttttgtatttttagtaaagacggggtttcaccacgttggtcaggctggtctcaaactcctgactcgtgatccgcccgcctcggcctccsacagtgctgggattacaggcatgagccaccgcacccggcaaacttttattatttattgcttgcctcctgtatgccaggtactgggctttccaaggattatcctgtatgttctttacaataaccttatgaaatgttttctgtttctagctccactttacatacaagaagagggagatttagaacagatttagtaaatgggagcagcagtacttgaacacaagtctacctggtctcagaaactacacttttccctcctctgttatactcacaacagctagcaaattcatgcttctgcctgtatctacgttctaggttttgtagaaatgtcagtatattgcattgatttgagcatattaaaaaagagttgctatactatataaacacaaaagtaaactgaaattcagtacacctgtgggaatgtaagtgtgtttttatttttatgagtatagttaatcagaatatctcctttaaacagccctgggggtagaacagtagaacagttcctagtatcaatttagggttcagcagaggtagtcatggagctacgtggtgacattagtttctctctgcccttgtgctgaaagtttttagaacccagggcttagcattctgttattcttatgtctttcttgcaatactaaccagagtgtccttagtaacttaatgttcagtagatgttggctgattggctaaatgacccctaaaaaattcaaaactctgtgtttaagaatactttttatattttggtactgactgtctagcattcttatattttcagccaatgcttgtctcagttggtactaatccttttttctttctcttttaacagattacttctctaacaggatcaccagtttgctccacaaagcacaatgtctcgatcac

SEQ ID NO: 724789 - DNA, 1729 bp, Homo sapiens
atgcatactcactcttcaaatcagaaacttacccacaagacacaattcagccactcaaaattgtacagcctggttctagcctttaagatgaaataggagaaggtggatatggggaattttgtgtctaatcgatagaaaatgctttggccaagttgaaaatatatatatatagcagtttttgctatatgttctttccaacagagagaagcatttccaaaaagccagaggtagttgcttttatccataatgaaagcaattcagttaaatggtcgttcacaaagcagaacttggcgtggaacccagggttccttgctgcctgcattcccatttttttctctctagcactgaattaagaatcagacagcarctggctctgattcttgatccctttgttactagctgtgtaaggcaagttattcaaggatttctgagcctcgggatcttccctttatatccataaaatgggtataataatacctaccttatatgtttgttgtaaagaacttatgccaggcacgtattaaccattcaagaggcagtagctgtcatcattaccgtaattattcttatagttattcaagaccttatggttgatctcaaggaagaaaataacaaaaagccagtcaaagctcattgtttgcattggagaacaatatttagttacttagaagacattgtgagtaacaactgacaaatgatatccttcccctgccctctttttctgtctctctgtggcaggtggaattctcaaatggaccctaaaattccaggcccctggtatatgaccctgaataatcccttttctttggatgtgggtagagcctgtgattatgatggaatgtcacactcatgaacaggttacactgtatggtaaaggggaaggcattctgcagatataattagggtttcacatcagttgatttttgagttcattgaaggagatattatcctgggtgggcctgaccaaatcaggtgagcccttaatttttattttatttatttatttatttatttatttatttatttatttatttatttatttattttgagacagagtctagctctgttgcccaagctagagtgcagtggtgtgatctcggctcactgcagcctccactctccgggttcaaacaattatcttgcctcagcctccccagcctcctgtagtagctgggactacaggcacgcaccaccacgcccagctaattttttgtattttagtagagacagagtttcaacatcttgcccaggctggtctcaaactcctgagctcaggcagtctgcccgcctcagcctcccaaagtgctaagattacaggtgtgagccactgcacccggcctgagccctttaaaggaggctctagaggttggagacaggagaagcagagctctctcttgctggccttgaagaagcaagttgctgtgagttccacagctgcaaggaaatgaattctgcccataatcacatgagcttggaaaaggatctcaagtcccagatgagaccccagccaacatcttgattgcagctcatgaggccctgagcagaagacccaacgaagtcatgcctggactcctgaccatgaaactgtgagaaaataaatatgtgtggttttaagccactgaatttgtggaaatttgttatgcaggtatagaaaacgaatacactccaatacctcgaaaaatattaacatggtattcactggtgtttaatttcacaaagaactaggaaa

SEQ ID NO: 724790 - DNA, 633 bp, Homo sapiens
aatgctttataattaaaagtaacattttaagaaacaaatgaataagtgcatgcaaaaatattgaagccaacaaacaaaaactggaataagaacatacaaaattgaaaagtcacagaggctaatgctgctggagaagtgtggggagctagagaagagggatggagattaagaggggtttcgggccttatggatgtcctgtaagaaagcggggagcaggtggccgggcacagtggctcacgcctataatcccagcactttgggaggccgaggcgggcggatcacctgaggtcaggagttcgagaccagcctggccaacatggtgaaaccccgtctctactaaaatataaaaaaattatccaggcgtgttggcaggcgacttaatccctgctacttgggaggcagaggcaagagaatcatttgaacctgggaggcggaggttgcagtgagccgagatcgagccattgcactcaaacttgggggataagagcgagacttctctcaaaaaaaaaaaaraaagaaagaaagaaagaaagaaagaaagaaagtggggagcaggtgtgggaatttccccagctttctgccattttgtagtttcccggattaccgtttttctcacttcttatctgcttctcc

SEQ ID NO: 724791 - DNA, 633 bp, Homo sapiens
aatgctttataattaaaagtaacattttaagaaacaaatgaataagtgcatgcaaaaatattgaagccaacaaacaaaaactggaataagaacatacaaaattgaaaagtcacagaggctaatgctgctggagaagtgtggggagctagagaagagggatggagattaagaggggtttcgggccttatggatgtcctgtaagaaagcggggagcaggtggccgggcacagtggctcacgcctataatcccagcactttgggaggccgaggcgggcggatcacctgaggtcaggagttcgagaccagcctggccaacatggtgaaaccccgtctctactaaaatataaaaaaattatccaggcgtgttggcaggcgacttaatccctgctacttgggaggcagaggcaagagaatcatttgaacctgggaggcggaggttgcagtgagccgagatcgagccattgcactcaaacttgggggataagagcgagacttctctcaaaaaaaaaaaagaaaraaagaaagaaagaaagaaagaaagaaagtggggagcaggtgtgggaatttccccagctttctgccattttgtagtttcccggattaccgtttttctcacttcttatctgcttctcc

SEQ ID NO: 724792 - DNA, 633 bp, Homo sapiens
aatgctttataattaaaagtaacattttaagaaacaaatgaataagtgcatgcaaaaatattgaagccaacaaacaaaaactggaataagaacatacaaaattgaaaagtcacagaggctaatgctgctggagaagtgtggggagctagagaagagggatggagattaagaggggtttcgggccttatggatgtcctgtaagaaagcggggagcaggtggccgggcacagtggctcacgcctataatcccagcactttgggaggccgaggcgggcggatcacctgaggtcaggagttcgagaccagcctggccaacatggtgaaaccccgtctctactaaaatataaaaaaattatccaggcgtgttggcaggcgacttaatccctgctacttgggaggcagaggcaagagaatcatttgaacctgggaggcggaggttgcagtgagccgagatcgagccattgcactcaaacttgggggataagagcgagacttctctcaaaaaaaaaaaagaaagaaagaaagaaagaaagaaagaaagwaagtggggagcaggtgtgggaatttccccagctttctgccattttgtagtttcccggattaccgtttttctcacttcttatctgcttctcc

SEQ ID NO: 724793 - DNA, 1332 bp, Homo sapiens
taatgttatattttgtatttaagcaagaactcaaaatacatatggcacacatgggtatgagctggtgattttctgtcttttcctgatccttgcttggaatgtcttagagtggtttcaatcaacaattttcaaactttggcaagcaccagaatcatctggaggacttcttaaaactgacaattgggccctgcccccagagtttctgatttagtggcatttctaacaaatcctctggtgatgttgatgccactggtctaagaatatcaccttaagaaccactggtgtgtatggttttccgtgtgttatgaattcagcactacctgcatcaaaagagaaagaaataccaccacctctgccaccttggagtgcactgggaaacttgaagacattgagcatcacaaaagcgacatttattcttggtgggaaataaaagtgaacagcagaacctagacaamttttttttaaaataaattcctctcattgctttgtatttctgcgggctgaaatagagaccgagctatctcaggctgagctttgccataaaacatttttacttattcttcctattttttttgtgacattcttttttttttcacaagaagcttaatttctcagaaccctcggctatattcacagaattattttttattatcagctcattattttactatctcctaatttacaaatgctagttaaaattacaaaaaaagtatttatttaaaaatattacgaacatatgttaaacgttgtaaaattcaaaaggttctcaagaaacaaaatttttggtccgggtaatatgatattctcaggtttactaaaaccatcacaaacaagctactagtccagtattttaaacataaaaatttacataaacctataactgctattttcattctttgataattgcactatcaccacaaagaaataaacacctactattcacgaaaataaattcacaaaaatattttctccctgttgtaaatagaaacatcaaataattagttttctaaaatgaaaattgtcaagtttcctagggctttgttctacacataagaatcctttgttttcaacgcaggccatttcctttgctctaattctgggattattgatatgagagtttgtccaggaggtagcaggaagctgggccctgtggttgtactgcagaagcagttaagaaaggaaaactagcagaggtatttttcaatgaaggggcaatcaataaaagactctgagagcaaggaacagaaatttaagtggattctgataagcactggatgagagtctccagaagtggacaggtattgaacttgttccagtacgttttttttttta

SEQ ID NO: 724794 - DNA, 1271 bp, Homo sapiens
gccacactgatttgcacaatggttgaactagtttacagtcccaccaacagtgtaaaagtgttcctatttctccacatcctctccagcacctgttgtttcctgactttttaatgatcgccattctaactggtgtgagatgatatctcattgtggttttgatttgcatttctctgatggccagtgatggtgagcattttttcatgtgttttttggctgcataaatgtcttcttttgagaagtgtctgttcatgtccttctcccactttttgatggggttgtttgtttttttcttstaaatttgtttgagttcattgtagattctggatgttagccctttgtcagatgagtaggttgcaaaaatgttctcccattttgttggttgcctgtttactctgatggtagtttcttttgctgttcagaagctctttagtttaattagatcccatttgtcaattttggtttttgttgccattgcttttggtgttttagacaactcttaatctcaactagtaagcagcagagctggggaacaaaagttcacactaatcaccattaggactgccatacagtcccacatgcagcctccacccaacacacactcaaatttttctagttataaactctgcctattcccctaagggatttgaaactcaacactaacctgtattttctcccaacaagttctatacaatggtcattatatcttccgtgtgtgaagacagtcaagaacatcagccaaaactatgatcccatcatctacctgaacgtacatatcctgtttcagcctcaagattggttcccttagatgcaggagacaacaggataatcccagaatgctctgtctgcccttggctctgtaatttcgatgttttccaccttgcaccaaagccaaatcttactggagtttttcttctcactcctgtaagtcctatcatttttggtaattaatcctccattccccaatgaacaatgtatggccatgcaggtctcaggctgacaatgaagtttgtgacatgcataaaatcactgttcatatgacagctaaaatagcaaggttcttattttgttcctcatattcatgacatgacacaccaacataagcttaagaaaacactcagtcttgtttctttctagatcaaggccttcaagccttcaattccctctccctatgaagtgtttaggtttcagagacaaaccattagaagcaaaaaaggcaagatactttaaaagatagcaatgcagatacagaaacagatcaaccattacttcaa

SEQ ID NO: 724795 - DNA, 608 bp, Homo sapiens
tgtactataatatttgttttatttttaattttatttttctttctgcaggtatgctctgaccgctgttttaagtcattttagaattattacatagttttcctcttcctcagtctcctgacttttctgtgtcttttatttagggtagcctaattttcttcmattgaatatagattgttatttgcaggagcaaatttgttcattatcatccccagattaagatcctttagattaagcaacatggtaattaaacttcacattcccaatatcttttagggaaggattagcacttttttgagttatacaccaattaccattcccaagggaagaaaattccagatcatatagcaaggcacattatcacacaaccagaatgagaataagaaaatactaagagcagccgaataagtgcacacaagtccactgatgtgcaaagagacacatatacacacatttttgaaaataaggttttctgtatgtacaggttgaatatccctaatctgaaagtccaaaatctgaaactgtttgagtgccaacatggtggtcacaggaaatgctcattgaagcattttaaattttggatgtttggattagggatgctgaggtgataa

SEQ ID NO: 724796 - DNA, 1131 bp, Homo sapiens
tcctcaaaaataccttatttggacaagttactgagccttactatttttatgtattttattatttcacaaaatgagctagtcatacaaatagcccagaaatacttttgaaatgagttctggtagtaaaattggtttgtcatttaaggagaaatataaaatcaaagttattactagcttacttctttttaggaaattacgtttgttccacatagctaattagagagaaatcaacacttataagaattcttcacaaaaacttaagtccaagttgagcaaatttattaccctaaaaaacctgatatgcayacatatatcaatatttcagtaatatttgatttttaatctataaaaatttaattaaaagatatctaaagtataggtgatatagatctgcactgtgagctaaaataatattctctgaagtttagtccctcttgctcccattcactctaaattcatcacaagtttttaaaacaccaataacaaactgagaagtgaaagtatatactagaaatactcaaaatgatcctcttgttcaatatactcacaatatctttttctagtcaagaaataatatttccctcctcccattttccttgttactgctagaatctttaacaaatgacatctacaaaaatgaacaatcacatttttatccaaagactgaatataaaatgagttctgatcatcccaaacagagaaccattctttcaataagtgggcaaagctattcagttgcaattatgcagacagggtctgtgtacaaactaaccactgatttatttcagcaaccaagcaaactaccgagattttcactgacaaacctaatgcatacacaaagtggagccacacctacctacaggcagaaacatgctgtggcagtacctttttctggcagttgagaaaacctatttaagcaactttattttcccaagtatatttttctcacttacttttaaggaaattaaaataggttggcattgtattttaacaaataaatatttgcgaagcattctaacaaacactgcgctgataaatctatcgcaactttgaaagtttcaacaggccaggtatggtagctcagggctataatcccaacactttgggaagccgagatgggaggatcacttg

SEQ ID NO: 724797 - DNA, 1131 bp, Homo sapiens
tcctcaaaaataccttatttggacaagttactgagccttactatttttatgtattttattatttcacaaaatgagctagtcatacaaatagcccagaaatacttttgaaatgagttctggtagtaaaattggtttgtcatttaaggagaaatataaaatcaaagttattactagcttacttctttttaggaaattacgtttgttccacatagctaattagagagaaatcaacacttataagaattcttcacaaaaacttaagtccaagttgagcaaatttattaccctaaaaaacctgatatgcacacatatatcaatatttcagtaatatttgatttttaatctataaaaatttaattaaaagatatctaaagtataggtgatatagatctgcactgtgagctaaaataatattctctgaagtttagtccmtcttgctcccattcactctaaattcatcacaagtttttaaaacaccaataacaaactgagaagtgaaagtatatactagaaatactcaaaatgatcctcttgttcaatatactcacaatatctttttctagtcaagaaataatatttccctcctcccattttccttgttactgctagaatctttaacaaatgacatctacaaaaatgaacaatcacatttttatccaaagactgaatataaaatgagttctgatcatcccaaacagagaaccattctttcaataagtgggcaaagctattcagttgcaattatgcagacagggtctgtgtacaaactaaccactgatttatttcagcaaccaagcaaactaccgagattttcactgacaaacctaatgcatacacaaagtggagccacacctacctacaggcagaaacatgctgtggcagtacctttttctggcagttgagaaaacctatttaagcaactttattttcccaagtatatttttctcacttacttttaaggaaattaaaataggttggcattgtattttaacaaataaatatttgcgaagcattctaacaaacactgcgctgataaatctatcgcaactttgaaagtttcaacaggccaggtatggtagctcagggctataatcccaacactttgggaagccgagatgggaggatcacttg

SEQ ID NO: 724798 - DNA, 623 bp, Homo sapiens
tgaggatgctttattccttaaaaaactgtttccttttcattaaatattttaattgaacagagtcactcttctggccctcacatccaggtrtttaaccccaccagatttattgcctctcaacttttgttcccactgattgcccaagtgtaccccttacctattcatacttcattgcattgaataagtaaattctcctcttttaaattgatcgttgcatctcatctcacctctactcagatacctctgtggcttcagagttgactaaaccagtggtttaaaaaaaagtgggggagggaggcaggcacagtcgctcacacctgtaatcccagcactttgagaagctaaggcaggaggatcacttgattctaggagtttgagactagcctgggcaacatagcaagacctcatatctacaaataattttaaaaattagccaggcatgctgacgcgcacctgtggtcctagctgctcgggagactgaggcaggagactgaggctggaagatcacttgagcctgggcagtcaaggcagcagtgagctgtgatcacaccactgcactctggcctgggtgacagagcaagaccccagcttggaaaaaaaaaaaaaaaagcgtattttacata

SEQ ID NO: 724799 - DNA, 604 bp, Homo sapiens
cctatggatttttatgtaaaaaagaaataaacatcctcatttcataaaccactgctgaagtttcyactacacaactataagtccgcaactgcactcaaatctaaccaatgaaatacctacttcatggtgtgcagtgatgagtggacgtgcacatgtgtctaacatatattagctattgaagatagtaataactcatcactatcattacagccctcgagttactgtcttgttgattttctgcaccctgctctgtttctagcgataaataacccacagtgggctttaacaaatacttgtgggagtgagttgaatatctcacactccagcttttagtgatagaagacatactggtccaaaggagaataattcaatagtataatggtaatcattggccaggtaggatttaacataattctaaaagaaagaatggttggatgaaaacaatggaatattgagatgggtacccccattaactacaggtcaagtttctcaacattggcaatactgacatttgggtccagataattctgtgttggttgggggtaggggcagtgctgtgccctgtcggatgttccgaagcatcgctggcctctatcaatgagag

SEQ ID NO: 724800 - DNA, 604 bp, Homo sapiens
cctatggatttttatgtaaaaaagaaataaacatcctcatttcataaaccactgctgaagtttccactacacaactataagtccgcaactgcactcaaatctaaccaatgaaatacctacttcatggtgtgcagtgatgagtggacgtgcacatgtgtctaacatatattagctattgaagatagtaataactcatcactatcattacagccctcgagttactgtcttgttgattttctgcaccctgctctgtttctagygataaataacccacagtgggctttaacaaatacttgtgggagtgagttgaatatctcacactccagcttttagtgatagaagacatactggtccaaaggagaataattcaatagtataatggtaatcattggccaggtaggatttaacataattctaaaagaaagaatggttggatgaaaacaatggaatattgagatgggtacccccattaactacaggtcaagtttctcaacattggcaatactgacatttgggtccagataattctgtgttggttgggggtaggggcagtgctgtgccctgtcggatgttccgaagcatcgctggcctctatcaatgagag

SEQ ID NO: 724801 - DNA, 632 bp, Homo sapiens
gatgcacgcaattggctctcacaggctggtgagagccagcctcagcacactgctcggtcacatagacctgagggcaaatgcagaccccctaaggaagtttcttacctccacatgccaatgtcctcctgtattaacaaggagaaatygttgcctgcctgctagtactattgtggggtttaaataatttccagttcatcagctcaccattcaaatagcctcctgtttaatccttgccctgaggtttttgtcaatgctgcattttttatttttaaagtttagatttttttttccgcatgtttctgttatttctaaataacattttgtttttgccttctacagggccgtgatgtaggtattccaggcatcctgttgcctgtgttcctccagtgtgagatctctgggcattgcctctgcacactatttcagactgcttgatttccacggcaattagaagtttttcatgagaaattatcttgggaaagaggttttcagcagcagcattgttgcctctgctacgacacattgtaggcacgcaggtctaacccaagttttttattaatttatcagctcgggcttcccacagtgcctgagtagtgtgggcccccaactgcaggagggcagcctctgcttta

SEQ ID NO: 724802 - DNA, 674 bp, Homo sapiens
tctctcttttctccacccgctgggccaatgtgatctagaatcctgaagttgaaaaaccagaactgcaagaatgcctcaaaaaagagaaaattaagctcttaatgaaactttgtttctgcttcatttgtatgggcaagcgactcttggcaaaatcaatcactatttcctctctgctcctgtggtaccctgcaaatacctcaaatatgcttcatatattgtattattgatctttgtctatcacccccrttgaactgatagctccttgaagagagagacatcttcttaatctttgcactctcagtgtctagggcagtgatttaaacaatcacagcagctatgattgttcaaatgcaatcagcaataaggggaaagctaagcaaatggtattgcattgacccagtggaatataagtactctgagtaagacatgctttctgcccataacatgcatttcacctaggagagaagttatggcctatgtaagtacagttttaaaaacaagggagtatataataaatgtcagaaagtaaatgtaagtaatagttaacatttgatagacattcatcttgtgtcaggtattgtgctgtttctccatgtgctttaatccatttggtcttcacaacaagcccacgatatggatattgttattcccatgttcacagttaaggcaactgg

SEQ ID NO: 724803 - DNA, 650 bp, Homo sapiens
tccagtggttctctgggagccattctggttgggggaagtggggagagtaagtattacaggacttgtcttgaagttgccttggcaaagaaagtatacaattgtttacactgattgtgtgtttatttgaggtagtgctgatggggtttgaggaagggaactaaaagcttcctcgccaaaataatttttaaaaaaatccttttgcactgccacttattcattcctatcccacaaaaatgtctctgggatttgtatataataaactcaacagaracatgaaacaaaagtccatccctatctcttaaattacaaacacgtatttaatcatatgacaaaaaccacttttggtagtataaaactccctgttcaaaatgaggagtgcctaggctcaggttctagtatacagtacttactctttattagttctctcctgtcccccacatcaattgtgatcctgctatcccccatgctcacacttctcaagactgacaatggaggacttttttttccttcttaatggaattagtatttaaacttggatctcagtcccataatattaaaaaacccttctcccattttcttgggtccttccctgagtaactctaatgctcttgggggacgggaagagaatacattgaaaaataatttttttt

SEQ ID NO: 724804 - DNA, 1805 bp, Homo sapiens
cagacaggaaaacacaatgtatctataattgaaaggcaaagacccagtgaggaaggaaaaggtgaagaaacagaagggataacttggaggagcagggtccacagtggcagaacactcaattgggttatacccctccaaatgcattcacagatttagagattcttcagcaagtaaggtgagaatgaaacaatggaaagaatttagttaggcgaagaggaaaagagagcaggaaattcagtaaatatacagaagaaagaagtaacagtaaatgaaagaataactggtatgggaccaggcatggtggctcacacctgtaatcccagcactttggaaggcagaggcaagcagatcacttcgggtcaggagtttgagaccagcctggccaagatggtgaaaccacctctctatgaaaaaatacaaaaacagccaggcgtggtggcacgtgcctgtagtcccaggcgctggactactcagggagctgaggtgaaagaattgcttgaactgggagacggaggttgcagtgagccgagatcaccactgcactccagcctgggccacacagtgaaactctgtcttaaaaaaaaaaaaagaaaagaaaaagaaagaaagaaaaactactatgcccacagatctctgaataaactagccaagtgatttaccaaaatggaaatttgcttaaaatctttcaatagcttcctactttacttatggcagccttaaactcctgaccatgcttacatcgacagcttcatccttccttcatcactcttttcacttatatacaaattggaggcaaatataatttacttcaagttttttgaaactgccagtctctcttgaccctggatatttgttcaatgctattatttcttcctaaaacacctcccccactatcttacctgtactttactctttccctattaatcccacctttaaataatttaacttttatccttcaagtcacaacacagatatcatttccttttcatagatgaaaaggttcaggaactgcatgccagagtgaagagcccctctaatatggtgtataaacatccaattcccaaccggacacagtggctcagacctgtaatcccagtactctgggaggccgaggcaggagcccaaaaattcgaggccagcctagacaacatgacaaaaccccatctctacaaaaaatacaaaaatcagccaggcctggtggcacaggcatgtagtccctgctactggggagtgtgagatacgaggatcacttgagtctgggaggttgaggctgcagtgagctgagattgtgccagctgcattcgagccagggtaatagaaacactgtctcaaaaaaaaaaaaattcaatttcattgactacttactcctatatctctctctgtatgcaggctaaggtgaagacagcatttacctttctttactaatggatttcatccacctatgacaaagtttgcccaaaaccgatattccacaaccatttaacaaattaaataaacagctgtatgactggctaaacttcagtatggcatattaaaagtggtttttcttttttragatggaatttcactcttgttgcccaggctggagtgcaatggtgccatctcagctcactgcaacctccgcctccggggttcaagcaattctcctgcctcagcctgcccaagtagctggaattacaggcatgtgccaccaagcccagctaattttgtatttttagtagagatggggtttctccatgctggtcaggctggcctcgaactcttgacatcaggtgatcctcccaccttggcctcccaaagcgccg

SEQ ID NO: 724805 - DNA, 668 bp, Homo sapiens
aaatgaacttcagttgctctctgtcttcctccatcaagctgaaggctcacacctgtgtgtgtgtgtgttttagagatgtgagacagatgaggctggtcaaatgtcaacatactgaacttaaggagtacaactgtggagagtagaagagtgatctgcacacattgtcaatggtgccatccctggctttcactgttggtctggcagacccttctctggaacagttttcttctggtcttggaactggcaggatgcccacagctgcctacagctgtctcttttccacttgcctcaatgagctcttatctttcttttcaccattaaaaatcataaatcttttttttttctgttaatttgtcctgtgctcacaagtcttttactctgtgactcaactgtgaaggaagaattgacttgtattaagtggtgacatgttgagccagacttaaatgcgcaacattttctacagtccagtgaataagatgtggaattaatcatgcttaatcactgcacacggtgacttctgcagtctctgtgttttgagtgtaaagatggtgacccaagaggaaggaagatccagagaagggagagacagtgtgagtggcccttgcctctcctctctgrgcttctcttccaccatctgacctcactgaaagccagcctatccccaactc

SEQ ID NO: 724806 - DNA, 685 bp, Homo sapiens
agatttaaccacaagtatatttcttctctctcttaaaacccattaaaatgtcagtgaaggaataaaaagtatgttaagtccacagagacaaagagaagagacaacggtgggaaaaaaacaaaaaaaattgagatggagttttgctcttgtcacgcaggctggagtgcagtggtacaatcttggctcactgcaacctctgcctcctggattcaagcaattctcctgcctcggcttcccgggtagctgggattattacaggtccccggctaatttttgtatttttttggtagagacasggtttcaccatgttggccaagctggtctcgaactcctgacctcaagtgatccacccgcctcggcttcccaaagtgctgggattacaggccatgagccaccacccccggccatgggaaaaagattttaacaaatttttaggaaatggaaaacggttgtaagatgacaaactactaataaagcaggagaaaacataacaggagagtgatgcctgtaagggagggaactggtgtcacagaacccaagagacactcaggacttggaggcactacagacctcaaaagctagggggacagatgtaggactaaacacaaagggaactgtattaaaatattaaatatgtacataaatgggttagatggccaggtcccctcctctacccttcatacag

SEQ ID NO: 724807 - DNA, 685 bp, Homo sapiens
agatttaaccacaagtatatttcttctctctcttaaaacccattaaaatgtcagtgaaggaataaaaagtatgttaagtccacagagacaaagagaagagacaacggtgggaaaaaaacaaaaaaaattgagatggagttttgctcttgtcacgcaggctggagtgcagtggtacaatcttggctcactgcaacctctgcctcctggattcaagcaattctcctgcctcggcttcccgggtagctgggattattacaggtccccggctaatttttgtatttttttggtagagacagggtttcaccatgttggccaagctggtctcgaactcctgacctcaagtgatccacccgcctcggcttcccaaagtgctgggattacaggccatgagccaccacccccggccatgggaaaaagattttaacaaatttttaggaaatggaaaacggttgtaagatgacaaactactaataaagcaggagaaaacataacaggagagtgatgcctgtaagggagggaactggtgtcacagaacccaagagacactcasgacttggaggcactacagacctcaaaagctagggggacagatgtaggactaaacacaaagggaactgtattaaaatattaaatatgtacataaatgggttagatggccaggtcccctcctctacccttcatacag

SEQ ID NO: 724808 - DNA, 1850 bp, Homo sapiens
aaggtcagtcaggacctaggagagcgccctacacagctaggtcctccacagccgctctgaaagctgactgcttctcaagagaacacacagccctgccctctgccttggctggcatcatcctacttgacagatgagccaagggggtctggctggtacctgggctggcgaccaccttgcttaaagcagatacagtctcctgcctcgcctcctcatctatatcataatatggttgcatcaatacattacagaaatgtcacagcttggctttcccagcagggctcagttgaatcaacaaacacacctgctcagctaatttccaaaaaagaaaaattagccacaagattggtttgggcaggccggccatatctgcaaggctgtttaagttttacagctccaaataggtttcatctcacatgccaccccactcaatgggtggtgcttctttgagcactgtaaggtgacttcttggacccataggaaagagagccacgatcaattagtaatatctgccattagcaggaggtgtggagtggggagggggttgcctgtgccacacatttgccattcacatattacattgtaaggatactaaaaatggccgggtgcagtggctcatgcctgtaatcccagcactttgggaggccaaggccrgtggatcacttgagatcaggagtttaaaactagcctgggaaacatagcgaaaccctgtctctgctaaaaaaaaaaaaaatacaaaaattagcccagcgttgtggtgcacgcctgtaatcccagctactcgggaagctgaggcaggagaattgcttgaacctgtgaggcagaggttgcagtaagctaagatcgcactccagtctgggcaacagaatgagactctgtctcaaaaaacaaaaacaaaacaaaacaacagcaacaacaaaaaaatacagatactaaaaatatttcagtccaggtaatagctggggcaaggcctgaactacgactaacgttatactttgtacacttattcttcaccctctccactctgctctgtgtccaggaagcgtgcttctgtggacggcatcctccagtttcccctcgggtttcctccagcttctggttgctttcaaccaggaagagatcttggcagaccctagggaagaggagagaggctgtgcatttcttccctgctagatgctacaggtctagccatagacacatccctccgcaacttcccctcctacccagttccagctccagtagcactgctccctcccctgcccctcaccacagggataatgggctcatctctgtgtgtctcacctctcctgtttgttcccttaaccctgcatctctaattggccccttcgtgaaggtctcttcatctgaaacatctgggataaattttgtttcctgctgggactctgacttatagagctttgctaagaaaatctttccattatttccatagccaaataggaagatgggattctggctggtaatagggatgactactttggcctatgccaacacctttcactgcttaattgggcagaatatgacttactgctatctcatgcctgctgcgttcccacagcatgagctcacacgggctccattaggtaatggagagaggatgcagtttaggtcctaataacccaaagcttcttgggctctaattttacatcttatgtgcttgatttgaggaccaggcacatctcataagccctaatagcttcactgtgaaatgatcttttgcagagccataagttgcaatttaattatgcaggactcattctgaagacaatggccatgggagaccctaagtcgcagaggatggaaagacacgctaggcggagagggaaggaggactg

SEQ ID NO: 724809 - DNA, 1850 bp, Homo sapiens
aaggtcagtcaggacctaggagagcgccctacacagctaggtcctccacagccgctctgaaagctgactgcttctcaagagaacacacagccctgccctctgccttggctggcatcatcctacttgacagatgagccaagggggtctggctggtacctgggctggcgaccaccttgcttaaagcagatacagtctcctgcctcgcctcctcatctatatcataatatggttgcatcaatacattacagaaatgtcacagcttggctttcccagcagggctcagttgaatcaacaaacacacctgctcagctaatttccaaaaaagaaaaattagccacaagattggtttgggcaggccggccatatctgcaaggctgtttaagttttacagctccaaataggtttcatctcacatgccaccccactcaatgggtggtgcttctttgagcactgtaaggtgacttcttggacccataggaaagagagccacgatcaattagtaatatctgccattagcaggaggtgtggagtggggagggggttgcctgtgccacacatttgccattcacatattacattgtaaggatactaaaaatggccgggtgcagtggctcatgcctgtaatcccagcactttgggaggccaaggccagtggatcacttgagatcaggagtttaaaactagcctgggaaacatagcgaaaccctgtctctgctaaaaaaaaaaaaaatacaaaaattagcccagcgttgtggtgcacgcctgtaatcccagctactcgggaagctgaggcaggagaattgcttgaacctgkgaggcagaggttgcagtaagctaagatcgcactccagtctgggcaacagaatgagactctgtctcaaaaaacaaaaacaaaacaaaacaacagcaacaacaaaaaaatacagatactaaaaatatttcagtccaggtaatagctggggcaaggcctgaactacgactaacgttatactttgtacacttattcttcaccctctccactctgctctgtgtccaggaagcgtgcttctgtggacggcatcctccagtttcccctcgggtttcctccagcttctggttgctttcaaccaggaagagatcttggcagaccctagggaagaggagagaggctgtgcatttcttccctgctagatgctacaggtctagccatagacacatccctccgcaacttcccctcctacccagttccagctccagtagcactgctccctcccctgcccctcaccacagggataatgggctcatctctgtgtgtctcacctctcctgtttgttcccttaaccctgcatctctaattggccccttcgtgaaggtctcttcatctgaaacatctgggataaattttgtttcctgctgggactctgacttatagagctttgctaagaaaatctttccattatttccatagccaaataggaagatgggattctggctggtaatagggatgactactttggcctatgccaacacctttcactgcttaattgggcagaatatgacttactgctatctcatgcctgctgcgttcccacagcatgagctcacacgggctccattaggtaatggagagaggatgcagtttaggtcctaataacccaaagcttcttgggctctaattttacatcttatgtgcttgatttgaggaccaggcacatctcataagccctaatagcttcactgtgaaatgatcttttgcagagccataagttgcaatttaattatgcaggactcattctgaagacaatggccatgggagaccctaagtcgcagaggatggaaagacacgctaggcggagagggaaggaggactg

SEQ ID NO: 724810 - DNA, 920 bp, Homo sapiens
atgaggtttaggtggggacacaaagccagatcactttggttgttcagatatttagtttcctgccacttggaaaccttgctggatttctgtgggatgacaataattttaaaaatagtatttactggatgcttaccatgttcagacatgattctaagtgctttctctgtattaatcactaaatcctcataataaccctatgtgggtagatattagtaaccacattcatagataaggacagtgtcccagcaagcctaggcaggtttgcctacagccgtggagtggtagagccagtatttgaacccaggaaatttgcctctagcacctgctgctttgcccacaggctgtctcagaagtatggaaagcagtgctgttcatacaattcagttcactccacacacttgttggggcataacaagttcttcaagggccacataactctagcactgtatatttcatatttattgagtgcttctgttttctaggcatggtaccaagtgccttcatatacaagcctgttaatcagagtttctattaacggcatgatacacaaacggacactgaggctttgaaggctgagggacttgctccaggtctcaccgttagaaagtgacagagctgaggctgggcgcggtggcttgtgcctgtaatcctaacactttgggaggctgaggcgggtggatcatgaagtcaggagtttgagaccagcctagccaacctggggaaaccctgtctctactaaaaatacaaaaattagccaggcatggtggcgggcgtctgtaatcccagctactcaggaggctgaggcaggacaatcaattgaatccgggaagtggaggttgtagcgagctgagatcgtgccactgcactcaggcctggatgacagagcgagaccccatctcaaaaaaaaaaaaaaraaaaaa

SEQ ID NO: 724811 - DNA, 920 bp, Homo sapiens
atgaggtttaggtggggacacaaagccagatcactttggttgttcagatatttagtttcctgccacttggaaaccttgctggatttctgtgggatgacaataattttaaaaatagtatttactggatgcttaccatgttcagacatgattctaagtgctttctctgtattaatcactaaatcctcataataaccctatgtgggtagatattagtaaccacattcatagataaggacagtgtcccagcaagcctaggcaggtttgcctacagccgtggagtggtagagccagtatttgaacccaggaaatttgcctctagcacctgctgctttgcccacaggctgtctcagaagtatggaaagcagtgctgttcatacaattcagttcactccacacacttgttggggcataacaagttcttcaagggccacataactctagcactgtatatttcatatttattgagtgcttctgttttctaggcatggtaccaagtgccttcatatacaagcctgttaatcagagtttctattaacggcatgatacacaaacggacactgaggctttgaaggctgagggacttgctccaggtctcaccgttagaaagtgacagagctgaggctgggcgcggtggcttgtgcctgtaatcctaacactttgggaggctgaggcgggtggatcatgaagtcaggagtttgagaccagcctagccaacctggggaaaccctgtctctactaaaaatacaaaaattagccaggcatggtggcgggcgtctgtaatcccagctactcaggaggctgaggcaggacaatcaattgaatccgggaagtggaggttgtagcgagctgagatcgtgccactgcactcaggcctggatgacagagcgagaccccatctcaaaaaaaaaaaaaagaaraaa

SEQ ID NO: 724812 - DNA, 1251 bp, Homo sapiens
attttttttttttatttttagtagagacagggtttcaccgtgttagccaggatggtctcaatctcctgacctcgtgatccacccacctcagcctcccaaagtgctgggattaaaggtgtgagccaccgcgcctggccartgcttagtgactttctaagaaaagtatgttaatacaaaaaaatgtgtcatggaaaagctttactttctaccactgcactcacctatcatcttaaaacacccatgttttgtgattgtcatgattctttctctaaaatatattcaccagttcttcccatctctgataaaaagctatagtgctctcttttaaagtcagcctttcactttactggcttacagaatcaagaaaaaataaaaagccaactataggtttaaacttaaccaaaattttatggaggctaacaacagtagtattctcctcatctaactttccaggactgagtatgaactgactgaaaccatcaaaacatctaataagaagtattttggagggtgagtaggtctcagttagaatgtgtatactttttcagtttaaaagtaagattcaagcaactcaccattgttccaaaaggaatggctcttgaagcatggtaataaatggctatgaaattgatgaagaaggcagtgccacacaccatagctgggataaggaatgccccaataaacatctgctttatccatctccttcctgaaaagaaaggaaactatgaaagtttaatataattatttagtacgaaattatttgtttgaaattttaatataaagatcatgaaatttaacatcttaataatttcttcaaaataatagctaacaaataccaaagatttccaagtacgtatagtgaaatcacagcttctgaagtgggtgcactggaaaagagcaatgacctgtaataaaatattctgacattttgtcttgactctgccactgaactgctgtgaactttcataagccactctctctctctaggctacaagttggcctagaaaggggtttttattactggtttaaattaactgatcaaaaaaaagagaaaggggttttaaaactattccttggagttctggagcttcttggcatgcccatgaagtcactggtgaagaaaaatcccaggtgcccttacccctgcttcaaccagaacaattacattttcaacagttacacattggagtttcatgtaagttttcatttgaaaagcaggttatactactttaaaaagaagaaaaaagtcta

SEQ ID NO: 724813 - DNA, 680 bp, Homo sapiens
tgcacctgatcccttctcagagcctgggcatcgcattaacattctggagactctgagatgtcctgcacaacaaaatcctatctaactttaattcacccagcttgtcccagaaacaattgtccatgaatcctttgtttctgagtagaagcaattaataatggcacctcagaagtaagaatcacaagactttgggaaaccycaaacatggtggtctccaagatgtcattatagcttaaatattttatgaaaccttggcagacagatttttacatggattaaaaatatagtaaataactacaatgtaagacttcctaatttgtgactaagaatttatacattctgattctggcattctcccccaaacactctgacatcatctcatcacaggataaaactgaggtgacataccaaataatctaattctccccataaacacacacacacagacacacacacacacgcaataatcagtagaacctaccctgtttactttatgatgatgttataaaattttataatgaaacagcatatggaaaatacagaaaaaaattaatagcttccaaatgttaatgtcatatctcaaaaaatgaaggttcaatgagaaactaactgtaaaggctataaaagtatggaaagtctggatgaggtgaatttagtttggctcactaatttatgaaata

SEQ ID NO: 724814 - DNA, 767 bp, Homo sapiens
ttcaacaggtctctaggaagttccaaactttcctatatcttcctgtcctcttctgagccctccaaactattccaacttctgcctgttttccagatccaaagtcgcttccacatttttggttatctttacagcagcaccccactctactggtacaaatttactgtattagtctgttcctatgttgctaataaagacatacctgagactgggcgatttataaggaaagaggtttaatggattcacagttccacatggctggggaggcctcacaatcatggcagwaggcaaaggagaagcgaaggcatgtcttacatggtgaaaggcgagagagcatgtgtagggggagtgccctttataaaaccatcagatctcatgagacttattcactatcatgagaacagcatgagaaagacccaacctcatgattcagttacctcacaccaagatctttccatgacacatggggattataggaactacaattcaagatgagatttgtgtggtaacacagccaaaccatgtcagctggtaaggacacttccaagtgatctagcttttcacataatatccattacccagtcccacacaaatggttgtcggcaaaacaactgagccctcctccaatgcatcccttggttctcctgtgaggggactgaagctgttctggtcaaactcaatatgttcttatatattttaggcataaaacagagtcagaaagagctctatggacaaaaagcattataatgacaaatggatattgccctgac

SEQ ID NO: 724815 - DNA, 767 bp, Homo sapiens
ttcaacaggtctctaggaagttccaaactttcctatatcttcctgtcctcttctgagccctccaaactattccaacttctgcctgttttccagatccaaagtcgcttccacatttttggttatctttacagcagcaccccactctactggtacaaatttactgtattagtctgttcctatgttgctaataaagacatacctgagactgggcgatttataaggaaagaggtttaatggattcacagttccacatggctggggaggcctcacaatcatggcagtaggcaaaggagaagygaaggcatgtcttacatggtgaaaggcgagagagcatgtgtagggggagtgccctttataaaaccatcagatctcatgagacttattcactatcatgagaacagcatgagaaagacccaacctcatgattcagttacctcacaccaagatctttccatgacacatggggattataggaactacaattcaagatgagatttgtgtggtaacacagccaaaccatgtcagctggtaaggacacttccaagtgatctagcttttcacataatatccattacccagtcccacacaaatggttgtcggcaaaacaactgagccctcctccaatgcatcccttggttctcctgtgaggggactgaagctgttctggtcaaactcaatatgttcttatatattttaggcataaaacagagtcagaaagagctctatggacaaaaagcattataatgacaaatggatattgccctgac

SEQ ID NO: 724816 - DNA, 2969 bp, Homo sapiens
gaatcactgcttcaattttcttccatcaatgtgatgacttaattgtgtgattgtatttatagttgtcttgcaacaactccattatctcatacagttcttttgatatctgatgccatcttagttcctttttcatgtttgttgtcttctccatatttcatcttttatttcaaaagatccacatctttccaaatctttgagagtgtagacgtattgttctttaaaattaattaggtttcctgtagaagtattttcccaatgtgtgtccttaggtatcagattctctatttgtattttgtaatgtttcataggcttccctcaccactttttaaatagtacctttgaaaagggagagctgtattcagctctggtccatgcctgtgatcatggggaaatggtcagtgttcgagccttccatttgcatcctagagaggactactggagatgcaaagcagcaagcccatcattctgataacttgttgttttttgcttattcatcttttcactggaagagatcaatccctggaactttggagactgggcttctgagcttcaaaatgaacttccccccactccctagagaagacaaattgctagcaatctgcggttcaacccattttcacctctccctcacttagagcccctcggttatgtctctgggcttctcaatccaggctttggtacatggacattcttcctgatatctagcagatggcctgagcagtatctctagtttctaatgccattataactttttcatctcttttatttgggtccatgagtattttaattaaaaggggaggaagggaaatcaatattgcttggcttctgccctcttgaagctttggctgagaatcaacagttgcttttctgctgggctttcagaaatttcccctactttcttacttgcctcaactccaagatagtgaaccatctgcccagtgatcctggtttccctttccctttgaagtggccccctcattccatagcacgtgcttcatagaagttcatagaagtttcacaggttgggctcgtgcaaagctgactctgagatggagactagggttgccagggagtgcttagactcaacacctgcggaagggactacaggaagcaagattaggcagaagtcaactgagatacagtcccaaggaaggcctcaggcaaccccataaggagctctggggctgggatggccatttaaacgtcccgagctggacgaggggccaggactttatatcctcaagtgatcattctttggatatgggttgccttggaggcggcatgaccttgagtgaggcagtttaaacagggctgatgctgaggattgtcctccagcagcactcccagcagctgagaaaataaatccttcattcctgaagggggatcggggtgatatagcacaatgtttacataaggctgtcattggctaagacagcccaatactttggcctctgggatcttcagcaactgagctgaaataacacggagtgccaccactcatgaaggtacaagggcaagattataaacttctcataatagattagagtaagataataaccacgtggacttaaattagaaccagaactgtttagagtactttaggctaaaaacatttttgatgacaattggtgaaggaattacagtctgccactagataaatatcctccagcaggaagtggttaaagctaattagaagtcacctgttttgagagaataagaactaatacagtctcctggatttgcaaggagaatttgtgttgtctcaataatctccctacgtgttatgccttcagggtctgaaagtgaaatgatcacaaactgtaagggcctatgaactagattagtattttattcaactatgagtgaatcctccatttatgtactctcactctgtgatcagcaaggccacaacaaagggaaactatgatttagtgcttgatacaggcttctttggacaattaatgactagtgactgaaacaattcaaatcaggggttacaaactcatacacctgcagaggtcaaggagccacatagggagcagaacagccggtgtctgcagtgaactacaacatgaacactctcattaaggtgttttccctccccagcatcagctccccactgtgttgatgtgggaacacctgcctgatcattggttttgaggacatgccaccaaatcatttttaaaawtttttttattatactctaaattctgggatacgtgtgcagaacattcaggtgtgttacataggtatacatgtgccatggtggtttgctgcacccatcaactcgtcatctacattaggtatttctcctaatgctatccctcccccaggccccctccccgcaaacaggccctggtgtgtgatgttaccctccctgtgtccacgtcttctcattgttcaactcccatgtatgagtgagaacatgtggtgtttggttttctgttcctgtgttagtttgctgagaatgatgatttccagcttcatccatgtccctgcaaaggacatgaactcatccttttttatggttgtatagtattccatggtatatatgtgccacattttctttatccagtctacccttgatgggtatttgggttggttccaggtctttgctattgtgaatagtgctgcaataaacatgtgtgcatgtgccttgatagcataaatcatttttaagaaaagctggaaatccagatttctatatgaaattcacagattttttttagtacaggaaacttgttcagatttcagaaaatgacaatgctatatgaaccaaacaataaatttcttaaggtagtatcaggcctgtgggctaccagattgtgacctttgagtcaaggtttcatcagaaacctttttggcaaggttagtcagagttaatatataaacagaatgatgctgaagtttattgcaacagtggattgtttaaatagacagccaacaccaagaatatcctcaatatgcat

SEQ ID NO: 724817 - DNA, 2969 bp, Homo sapiens
gaatcactgcttcaattttcttccatcaatgtgatgacttaattgtgtgattgtatttatagttgtcttgcaacaactccattatctcatacagttcttttgatatctgatgccatcttagttcctttttcatgtttgttgtcttctccatatttcatcttttatttcaaaagatccacatctttccaaatctttgagagtgtagacgtattgttctttaaaattaattaggtttcctgtagaagtattttcccaatgtgtgtccttaggtatcagattctctatttgtattttgtaatgtttcataggcttccctcaccactttttaaatagtacctttgaaaagggagagctgtattcagctctggtccatgcctgtgatcatggggaaatggtcagtgttcgagccttccatttgcatcctagagaggactactggagatgcaaagcagcaagcccatcattctgataacttgttgttttttgcttattcatcttttcactggaagagatcaatccctggaactttggagactgggcttctgagcttcaaaatgaacttccccccactccctagagaagacaaattgctagcaatctgcggttcaacccattttcacctctccctcacttagagcccctcggttatgtctctgggcttctcaatccaggctttggtacatggacattcttcctgatatctagcagatggcctgagcagtatctctagtttctaatgccattataactttttcatctcttttatttgggtccatgagtattttaattaaaaggggaggaagggaaatcaatattgcttggcttctgccctcttgaagctttggctgagaatcaacagttgcttttctgctgggctttcagaaatttcccctactttcttacttgcctcaactccaagatagtgaaccatctgcccagtgatcctggtttccctttccctttgaagtggccccctcattccatagcacgtgcttcatagaagttcatagaagtttcacaggttgggctcgtgcaaagctgactctgagatggagactagggttgccagggagtgcttagactcaacacctgcggaagggactacaggaagcaagattaggcagaagtcaactgagatacagtcccaaggaaggcctcaggcaaccccataaggagctctggggctgggatggccatttaaacgtcccgagctggacgaggggccaggactttatatcctcaagtgatcattctttggatatgggttgccttggaggcggcatgaccttgagtgaggcagtttaaacagggctgatgctgaggattgtcctccagcagcactcccagcagctgagaaaataaatccttcattcctgaagggggatcggggtgatatagcacaatgtttacataaggctgtcattggctaagacagcccaatactttggcctctgggatcttcagcaactgagctgaaataacacggagtgccaccactcatgaaggtacaagggcaagattataaacttctcataatagattagagtaagataataaccacgtggacttaaattagaaccagaactgtttagagtactttaggctaaaaacatttttgatgacaattggtgaaggaattacagtctgccactagataaatatcctccagcaggaagtggttaaagctaattagaagtcacctgttttgagagaataagaactaatacagtctcctggatttgcaaggagaatttgtgttgtctcaataatctccctacgtgttatgccttcagggtctgaaagtgaaatgatcacaaactgtaagggcctatgaactagattagtattttattcaactatgagtgaatcctccatttatgtactctcactctgtgatcagcaaggccacaacaaagggaaactatgatttagtgcttgatacaggcttctttggacaattaatgactagtgactgaaacaattcaaatcaggggttacaaactcatacacctgcagaggtcaaggagccacatagggagcagaacagccggtgtctgcagtgaactacaacatgaacactctcattaaggtgttttccctccccagcatcagctccccactgtgttgatgtgggaacacctgcctgatcattggttttgaggacatgccaccaaatcatttttaaaaatttttttattatactctaaattctgggatacrtgtgcagaacattcaggtgtgttacataggtatacatgtgccatggtggtttgctgcacccatcaactcgtcatctacattaggtatttctcctaatgctatccctcccccaggccccctccccgcaaacaggccctggtgtgtgatgttaccctccctgtgtccacgtcttctcattgttcaactcccatgtatgagtgagaacatgtggtgtttggttttctgttcctgtgttagtttgctgagaatgatgatttccagcttcatccatgtccctgcaaaggacatgaactcatccttttttatggttgtatagtattccatggtatatatgtgccacattttctttatccagtctacccttgatgggtatttgggttggttccaggtctttgctattgtgaatagtgctgcaataaacatgtgtgcatgtgccttgatagcataaatcatttttaagaaaagctggaaatccagatttctatatgaaattcacagattttttttagtacaggaaacttgttcagatttcagaaaatgacaatgctatatgaaccaaacaataaatttcttaaggtagtatcaggcctgtgggctaccagattgtgacctttgagtcaaggtttcatcagaaacctttttggcaaggttagtcagagttaatatataaacagaatgatgctgaagtttattgcaacagtggattgtttaaatagacagccaacaccaagaatatcctcaatatgcat

SEQ ID NO: 724818 - DNA, 2969 bp, Homo sapiens
gaatcactgcttcaattttcttccatcaatgtgatgacttaattgtgtgattgtatttatagttgtcttgcaacaactccattatctcatacagttcttttgatatctgatgccatcttagttcctttttcatgtttgttgtcttctccatatttcatcttttatttcaaaagatccacatctttccaaatctttgagagtgtagacgtattgttctttaaaattaattaggtttcctgtagaagtattttcccaatgtgtgtccttaggtatcagattctctatttgtattttgtaatgtttcataggcttccctcaccactttttaaatagtacctttgaaaagggagagctgtattcagctctggtccatgcctgtgatcatggggaaatggtcagtgttcgagccttccatttgcatcctagagaggactactggagatgcaaagcagcaagcccatcattctgataacttgttgttttttgcttattcatcttttcactggaagagatcaatccctggaactttggagactgggcttctgagcttcaaaatgaacttccccccactccctagagaagacaaattgctagcaatctgcggttcaacccattttcacctctccctcacttagagcccctcggttatgtctctgggcttctcaatccaggctttggtacatggacattcttcctgatatctagcagatggcctgagcagtatctctagtttctaatgccattataactttttcatctcttttatttgggtccatgagtattttaattaaaaggggaggaagggaaatcaatattgcttggcttctgccctcttgaagctttggctgagaatcaacagttgcttttctgctgggctttcagaaatttcccctactttcttacttgcctcaactccaagatagtgaaccatctgcccagtgatcctggtttccctttccctttgaagtggccccctcattccatagcacgtgcttcatagaagttcatagaagtttcacaggttgggctcgtgcaaagctgactctgagatggagactagggttgccagggagtgcttagactcaacacctgcggaagggactacaggaagcaagattaggcagaagtcaactgagatacagtcccaaggaaggcctcaggcaaccccataaggagctctggggctgggatggccatttaaacgtcccgagctggacgaggggccaggactttatatcctcaagtgatcattctttggatatgggttgccttggaggcggcatgaccttgagtgaggcagtttaaacagggctgatgctgaggattgtcctccagcagcactcccagcagctgagaaaataaatccttcattcctgaagggggatcggggtgatatagcacaatgtttacataaggctgtcattggctaagacagcccaatactttggcctctgggatcttcagcaactgagctgaaataacacggagtgccaccactcatgaaggtacaagggcaagattataaacttctcataatagattagagtaagataataaccacgtggacttaaattagaaccagaactgtttagagtactttaggctaaaaacatttttgatgacaattggtgaaggaattacagtctgccactagataaatatcctccagcaggaagtggttaaagctaattagaagtcacctgttttgagagaataagaactaatacagtctcctggatttgcaaggagaatttgtgttgtctcaataatctccctacgtgttatgccttcagggtctgaaagtgaaatgatcacaaactgtaagggcctatgaactagattagtattttattcaactatgagtgaatcctccatttatgtactctcactctgtgatcagcaaggccacaacaaagggaaactatgatttagtgcttgatacaggcttctttggacaattaatgactagtgactgaaacaattcaaatcaggggttacaaactcatacacctgcagaggtcaaggagccacatagggagcagaacagccggtgtctgcagtgaactacaacatgaacactctcattaaggtgttttccctccccagcatcagctccccactgtgttgatgtgggaacacctgcctgatcattggttttgaggacatgccaccaaatcatttttaaaaatttttttattatactctaaattctgggatacgtgtgcagaacattcaggtgtgttacataggtatacatgtgccatggtggtttgctgcacccatcaactcgtcatctacattaggtatttctcctaatgctatccctcccccaggccccctccccgcaaacaggccctggtgtgtgatgttaccctccctgtgtccacgtcttctcattgttcaactcccatgtatgagtgagaacatgtggtgtttggttttctgttcctgtgttagtttgctgagaatgatgatttccagcttcatccatgtccctgcaaaggacatgaactcatccttttttatggttgtatagtattccatggtatatatrtgccacattttctttatccagtctacccttgatgggtatttgggttggttccaggtctttgctattgtgaatagtgctgcaataaacatgtgtgcatgtgccttgatagcataaatcatttttaagaaaagctggaaatccagatttctatatgaaattcacagattttttttagtacaggaaacttgttcagatttcagaaaatgacaatgctatatgaaccaaacaataaatttcttaaggtagtatcaggcctgtgggctaccagattgtgacctttgagtcaaggtttcatcagaaacctttttggcaaggttagtcagagttaatatataaacagaatgatgctgaagtttattgcaacagtggattgtttaaatagacagccaacaccaagaatatcctcaatatgcat

SEQ ID NO: 724819 - DNA, 1417 bp, Homo sapiens
tagattccatatgttgaattctctctcaccttgtaagtagaaactttgctgatttttagtttgctttctaaagttttccgtgcctgacagaaacagtacttattaatgtatgatgcaatttcattgcgtagcatctctacaacacatttaatcttcaatctctatttctttagccttttctagctattctcatgcgttacagccattataaatggggaataattttaccccaagagtttcctgaccaatatgtgcttatttcagctgtgcggattagtaagatgttagtgttcctttttcacacttaacattttcaataatttgaaactgtcatttatgtcagtgatttacaaatacatataaatttttttctctttcagatatggagtttggacctccaacagttaatgataaactaatgagattttttgatcactgtgagaagtttttaactgaagtagaaaaaaatgctacagctctttatcacgtggaagccttcaaaactggaccagaaatgcagaacattttaaaaaaagttgcagctactttgcaagtgccagtaaatgatttaaatgcaggtaatatgtctgttgtcttttatttgaacttaacagtttaaataattttgaactgtgaaaatgaaaacataaggaaacagtcttttttaaagacccataattgatctacattaagaaaataatatgttctgggtcaaaaaaattgtataccttgtgcttactatttaccatttttagattcatattcttctttgagtgttatttaaattactgtacaagattctagttatattctggagtttttttgagggcagagtaatataaagcctcaactgtaggcattatttttaaaacaaattatcttttctgaatttccccctgataaagtgatacaaatggaaaaatcatataaattctttagcttttgaagcagttcaaaagtacctgttaatgtgtaagaggggtaagttttagaaagtgaaaagcaaagtactatgatgttttttgagttatatgtagcaatgctgagaagatgagcagtcatgtctatcataagttattgcagtggatgggctgactatgcaacttaccatccaaactggtgggacactttcgaaagtgaaagggaacactattaataattttgccaggaaagcaggtgggaaaccatggcacatggtcacctagcaatgggagattaagaaaataagatttttttctgttttctaggaatttatrttccatagggtagatgttgacaaagatacatgcaaagattgtagattacattatactctgaattaatttccaaaagactggaagtagatgttggggaaaaaatagattagaatttatcagtcacagggcctggatgctttataaggatcaaaaagaagatg

SEQ ID NO: 724820 - DNA, 977 bp, Homo sapiens
  misc_feature 3, 4, 5, 6, 7, 8, 9, 10, 11, 12, 13, 14, 15, 16, 17, 18,19, 20, 21, 22, 23, 24, 25, 26, 27, 28, 29, 30, 31, 32,33, 34, 35, 36, 37, 38, 39, 40, 41, 42, 43, 44, 45, 46,47, 48, 49, 50, 51, 52, 53, 54, 55, 56, 57, 58, 59, 60,61, 62: n = A,T,C or G
  misc_feature 63, 64, 65, 66, 67, 68, 69, 70, 71, 72, 73, 74, 75, 76, 77,78, 79, 80, 81, 82, 83, 84, 85, 86, 87, 88, 89, 90, 91,92, 93, 94, 95, 96, 97, 98, 99, 100, 101, 102: n = A,T,C or G
cannnnnnnnnnnnnnnnnnnnnnnnnnnnnnnnnnnnnnnnnnnnnnnnnnnnnnnnnnnnnnnnnnnnnnnnnnnnnnnnnnnnnnnnnnnnnnnnnnnncaagtagctggccccacaggtgcgccccaccatgcccagttaattttctaattttttcgcacaaatggagtctcactatgttgcccaggccaacctttaactcctggtctcaggtgatcctccccagttgtacctctcagactgattataggtgtgagccgccacacctgacctataattttattttagatttacatgagaagtgatgctgttttaaagtgtaatgctctgaattaaaggaattctctatggtaatatatttatacataacaaagcactaacaattacagaaggccttgatgcctgttctattattcgttttatgtttctgtgagtaattgatgctttgatgtattttggccatagaggcactattgtaatgcatgtagactgactttcactggacagaggtttgctgagctggttctgttcatgtgctatggctggagacatgaggcagaggacacagaggccctgccctgatggcactcacactgtaaacttgaggcartgaggacgcacagttaggagctgaagttgtaccacagaacacataaagggagagttagacacaagacgagggggctccaggtgagccagtgagagccgtggggccttctgtccctccagccagcagacgctgagtgactgcaggacccagccgattccaggttcccgagcaagctgccttctgtgcttgtgatttttatgttgtggggggattgatggtgccgcctcaggtggagatcagtgtgacggagtccacagggcaggatagaacactggatgtgtgcagtagggtcttaggccaagtccactttctctgatgggggagcatttcagcaaaggcccttctgggcatatgaaggtttccc

SEQ ID NO: 724821 - DNA, 1804 bp, Homo sapiens
ggggatcatatagcagattcagactaaagcactctttgtccactaaccatccagaggatatgaggctgaaagagatcttggaatttcaaggaaaacttacttatcagcacaacttttgttttaatctgaagaaaacaaagtgtttttttcactgacagattctgaatacctccactgggactcagttaatattggggagtgaaagaatctatccttcttaaaaaacagtagatcattcccccaattttcctttaagtcttttcttctcagttcttttttttttttgagaaagggtcttgctgtatcacccaggctgtagtgcagtggtgccatcttagctcactgcaacctctgcctcctgggttcaagtgattctcatgcctcagcctccccagcaactgggactacaggtgtgcgccaccatgcctggctaatttttgtattagagagggtttcaccatgttggccaggctggtctcaaactcctggcctcaggtaatctgcctgcctcggcctcccaaagtgctgggatgataggtgtgagccactgcgcccagcctcttttctcaattttaaaaagcataaataattgaagttggagtaacttttttttttttttttttttgagatggagtctcgctctgtcacccaggctggggtgcagtggtgcgatctcggctcactgcaagctccgcctcctgggttcacgccattctcctgcctcagcctcccgagtagctgggactacaggcacccgccaccatgccyggctaattttttgtatttttagtagagacagggtttcaccatgttagccaggatggtctcgatctcctgacctcgtgatccgcccacctcggcctcccaaagtgctgggattacaggcatgagccaccgcacccggccacattttttaaaaaaatgttgtagttgggagttagaagataattgccagcctcagcatgttctatgccatttccagctcatgatcaagcatgaaaaagggtctttataatagaaactaattcacagtggatcctttttcttatcctttccacaggatgttgtccagctgtcatatctaaagtcattctacctaataatttacttatttaaatctattgcagattaattatttgcaacagagcctttagcaggtaaacatggtgctagaggaatctttaagatggagattagcaaagtatgtgctgggatcactgtcttaggaggacagcaagaaaataggattctgtcttcagatacgtttagaaaacactctataccacattccagatatgagcaatcatggtaaagaaatctgcttaatcaagttaacccagcagttgcaaaacgtatttaatcatggaaccccttttcatgtaaagtacattagctttgcaaagaatgaatattacacagtgaaccactgggaaattctgaacgagaccaacccccacatttgatcagtaaggaaactcatcagattagtatttcaacaatatttacagagtccctgatgctagcaaaagtcctaggatctggggatgagagtgaatactcatacacccaacgtttaagtaattccctggggtctagaaggaagcatttagctcagagacaataaggtggcggctgttaaatgtgaccgtggggaatatgccagtgagagcaccagagggaagaaggagggtgcaccctgttctgggagaggggctgcacctggaaggagggctcaacccattctctgagaggggctgcacctggaaggaggactcaccctgttctgggagaggggctgcacctg

SEQ ID NO: 724822 - DNA, 627 bp, Homo sapiens
aggaggtcagtttgtaacaaatccacctgagaacactgttggacaaagtgcaggagatgggatatttgggtccagcattcagagaagttaccagtggagaagcaatgatgatcagagtcatgggagtacaacagaaaccacagaataatgagctcttcaagagagcgtcaagaaatagagcagaatcccaggaacagcaaagaggaagctcaggtgagagattaagtgacttgagaggtaagaagaaatgtggaacaaagtgagatcaaataattcaagcaaaaatgatctggactagaccagggcatcaaatgctgcacggatttcaaatatttataatctggccagaatagaatggaaaatatcagtaggaattaactagtagaaagctattactaaagtgatttttattgtaatggtaggggcagttgccagatagcactggtgaaaacgtgaattgtgaaaggcaaaatgtcacggcattaaccaccacacaattaaatgtaataaggacttattaacgatcttattgtggtcctacctggccatgtagtttaatttaggttttacataggtagtaaaggaktctaaactgacttccagcttcctatcttaaaagagttgaca

SEQ ID NO: 724823 - DNA, 860 bp, Homo sapiens
tcccttactcttccttctctgttacatttgtggcttcctggaggaaaatgctattctgtcttatctctctctccatactctgtgttgggaagttggtaacagtggtaagaatgtttcttgataataatgatgtckcacaaaattttaggcttattcgtttcttaatcttccactcactttttcttatatccagccattgttttaatggataatactagtagtagtatactcatagctttatacatggaatatttttacttgaaaacacttgtatatggctatagacaaatatatgcaagaatatcacatataatacctatgtagatatgcaggtattatttccactgaagcgcagagcgaaaacccgtttgttcaaagtcacttctctaagtagtaactgaggctagaacccaggttcacccaaatgcactcttacccttgccgggtggtgcatgacaaaatattcctccaatctagcggctctgctgtgactctctctggtcttcaattgctccctgccaggaggagtaagataaagtccttggcaaaccactccatgccttccacctggatggccaacagggaatttgcttctctgtttgtgcccacctggtggcccaagggagacactgtttcattttacattagattccaatttcaacactggtcgccagcatttgttgcaacagaacgttcataggtggaatgctggcatccctctaaatccgtgttctactcctttaacaactttagaacatatgccttcagttgttttagggacataattgattcaggtcccccaaagcaagcactttcatattaactgcgtgttagaaagaggcaatacaatcacagcttca

SEQ ID NO: 724824 - DNA, 860 bp, Homo sapiens
tcccttactcttccttctctgttacatttgtggcttcctggaggaaaatgctattctgtcttatctctctctccatactctgtgttgggaagttggtaacagtggtaagaatgtttcttgataataatgatgtcgcacaaaattttaggcttattcgtttcttaatcttccactcactttttcttatatccagccattgttttartggataatactagtagtagtatactcatagctttatacatggaatatttttacttgaaaacacttgtatatggctatagacaaatatatgcaagaatatcacatataatacctatgtagatatgcaggtattatttccactgaagcgcagagcgaaaacccgtttgttcaaagtcacttctctaagtagtaactgaggctagaacccaggttcacccaaatgcactcttacccttgccgggtggtgcatgacaaaatattcctccaatctagcggctctgctgtgactctctctggtcttcaattgctccctgccaggaggagtaagataaagtccttggcaaaccactccatgccttccacctggatggccaacagggaatttgcttctctgtttgtgcccacctggtggcccaagggagacactgtttcattttacattagattccaatttcaacactggtcgccagcatttgttgcaacagaacgttcataggtggaatgctggcatccctctaaatccgtgttctactcctttaacaactttagaacatatgccttcagttgttttagggacataattgattcaggtcccccaaagcaagcactttcatattaactgcgtgttagaaagaggcaatacaatcacagcttca

SEQ ID NO: 724825 - DNA, 860 bp, Homo sapiens
tcccttactcttccttctctgttacatttgtggcttcctggaggaaaatgctattctgtcttatctctctctccatactctgtgttgggaagttggtaacagtggtaagaatgtttcttgataataatgatgtcgcacaaaattttaggcttattcgtttcttaatcttccactcactttttcttatatccagccattgttttaatggataatactagtagtagtatactcatagctttatacatggaatatttttacttgaaaacacttgtatatggctatagacaaatatatgcaagaatatcacatataatacctatgtagatatgcaggtattatttccactgaagcgcagagcgaaaacccgtttgttcaaagtcacttctctaagtagtarctgaggctagaacccaggttcacccaaatgcactcttacccttgccgggtggtgcatgacaaaatattcctccaatctagcggctctgctgtgactctctctggtcttcaattgctccctgccaggaggagtaagataaagtccttggcaaaccactccatgccttccacctggatggccaacagggaatttgcttctctgtttgtgcccacctggtggcccaagggagacactgtttcattttacattagattccaatttcaacactggtcgccagcatttgttgcaacagaacgttcataggtggaatgctggcatccctctaaatccgtgttctactcctttaacaactttagaacatatgccttcagttgttttagggacataattgattcaggtcccccaaagcaagcactttcatattaactgcgtgttagaaagaggcaatacaatcacagcttca

SEQ ID NO: 724826 - DNA, 860 bp, Homo sapiens
tcccttactcttccttctctgttacatttgtggcttcctggaggaaaatgctattctgtcttatctctctctccatactctgtgttgggaagttggtaacagtggtaagaatgtttcttgataataatgatgtcgcacaaaattttaggcttattcgtttcttaatcttccactcactttttcttatatccagccattgttttaatggataatactagtagtagtatactcatagctttatacatggaatatttttacttgaaaacacttgtatatggctatagacaaatatatgcaagaatatcacatataatacctatgtagatatgcaggtattatttccactgaagcgcagagcgaaaacccgtttgttcaaagtcacttctctaagtagtaactgaggctagaacccaggttcacccaaatgcactcttacccttgccgggtggtgcatgacaaaatattcctccaatctagcrgctctgctgtgactctctctggtcttcaattgctccctgccaggaggagtaagataaagtccttggcaaaccactccatgccttccacctggatggccaacagggaatttgcttctctgtttgtgcccacctggtggcccaagggagacactgtttcattttacattagattccaatttcaacactggtcgccagcatttgttgcaacagaacgttcataggtggaatgctggcatccctctaaatccgtgttctactcctttaacaactttagaacatatgccttcagttgttttagggacataattgattcaggtcccccaaagcaagcactttcatattaactgcgtgttagaaagaggcaatacaatcacagcttca

SEQ ID NO: 724827 - DNA, 658 bp, Homo sapiens
tgtatgctttcttttattagttttctttttctttaaagtgaatatttgtttctgcactaggcattcagagtaaaatcccttttttccttaagacactacataaatccaggcttgcatttactatggcattgatcaaactaaatgccacttactaaccaatacagaagaaagtaaagtcaacaagttatattatatgagcatttaagggaattaacctgaattgccagtagaggtctctgctgctctatgtaaatatcttttaaaggcaaagcaaaggaaagcaaacaaaacaaaacaaaaaacaaaacctaacaccccccaccaaaaaaaaaaatttttttcgaagaaatttgctggctaaattgtagtgtggcacaaaaggtgcattagaagaggaaaatatatttagagcttatgccatattttgggggtaagtggctaggtctgttaaggaatgcacctctatggaagcaaatctggctacatttcatrgggggacttgaagttagactcatgtagagaatagccttaggcagcccagcagggattgagtacagcagggcaatggaagagcagagtggaaaacgagtaatattgaattagccagagtcaggtacagaaatgccaggtgccaggtttgtgtttaggttggtacaaa

SEQ ID NO: 724828 - DNA, 940 bp, Homo sapiens
  misc_feature 498, 499, 500, 501, 502, 503, 504, 505, 506, 507, 508, 509,510, 511, 512, 513, 514, 515, 516, 517, 518, 519, 520, 521,522, 523, 524, 525, 526, 527, 528, 529, 530, 531, 532, 533,534, 535, 536, 537, 538, 539, 540, 541, 542, 543, 544: n = A,T,C or G
  misc_feature 545, 546, 547, 548, 549, 550, 551, 552, 553, 554, 555, 556,557, 558, 559, 560, 561, 562, 563, 564, 565, 566, 567, 568,569, 570, 571, 572, 573, 574, 575, 576, 577, 578, 579, 580,581, 582, 583, 584, 585, 586, 587, 588, 589, 590, 591: n = A,T,C or G
  misc_feature 592, 593, 594, 595, 596, 597: n = A,T,C or G
gggttctccttatgggaagctgccctggggagatagcctagctgacaggcaaagatttgtcagcagggcagtcaccgggacactgctgtgcaggccggtggaggttgcattcggctgactggcccgttcagagttttttttttttttttcagatggagttttgctcatgtcagccgggctggagtgcattgacacgatctcagctcactgcaacctccacctcccgggttcaagtgattcttgtgtctcagcctcccaagtagctgggattacaggcgcccaccaccacgcccggatcatttttgtatttttagtagagatggagttgcgccatgttggccgggctggtcttgaactcctgacctcaggtgattcacctgcctcagcctcccaaagtgctgggattccaggcgtgagcccctccacccagcctagttcagagtcttaaagctgaggtggtgtttccgacgctgctgaaagggggattcttctagagtnnnnnnnnnnnnnnnnnnnnnnnnnnnnnnnnnnnnnnnnnnnnnnnnnnnnnnnnnnnnnnnnnnnnnnnnnnnnnnnnnnnnnnnnnnnnnnnnnnnnccagcctttggcaacatagtgagaccccatctctacagaaaatttaaaaatgagctggccgtggtggtgtgcgcctacgagatcgaggctgcagtgagccgtgattgcaccactgcactccagcctggtgacagagtgagactctgtctcaaaaaaaaaaaaaaaaagtttgaagatcgagagacatactattcatactattgtagaatctttgctttgtaaaggctttcttagtttctgtgaagggaggaagttcacgtttctcattttttcacttgcaaaggcttctaacaacgtgaagatgacaacgatttcctcccaggcagtcattatggcaaraaag

SEQ ID NO: 724829 - DNA, 1086 bp, Homo sapiens
  misc_feature 986, 987, 988, 989, 990, 991, 992, 993, 994, 995, 996, 997,998, 999, 1000, 1001, 1002, 1003, 1004, 1005, 1006, 1007,1008, 1009, 1010, 1011, 1012, 1013, 1014, 1015, 1016, 1017,1018, 1019, 1020, 1021, 1022, 1023, 1024, 1025, 1026: n = A,T,C or G
  misc_feature 1027, 1028, 1029, 1030, 1031, 1032, 1033, 1034, 1035, 1036,1037, 1038, 1039, 1040, 1041, 1042, 1043, 1044, 1045, 1046,1047, 1048, 1049, 1050, 1051, 1052, 1053, 1054, 1055, 1056,1057, 1058, 1059, 1060, 1061, 1062, 1063, 1064, 1065: n = A,T,C or G
  misc_feature 1066, 1067, 1068, 1069, 1070, 1071, 1072, 1073, 1074, 1075,1076, 1077, 1078, 1079, 1080, 1081, 1082, 1083, 1084, 1085: n = A,T,C or G
tggccatctcctgatccaagtccagggtgacgtagcacagcttctccttgatgccatgcacgatttcccactgggcggtggtggtgaagctgtagcggcgctccacgaggatcttyatgaggtaatcagtcaggtcctggtcagccaggtccagaaacagggtggcctggaggagggcctacccctcgtagatgggcacagtgtgggtgaccctgtcgctggagtccatcacgatgtggccagaagcgtacagggacagcatggcctggatggccatgtacatggctggggtgttgaaggtctcaaacatgatatgggtcatcttctcgtgattggccttggagttcaggggggcctcagtcggcactacgggtgctccttggagccacacgcggctcgttgtagaagttgtggtgccagatcttctccatgtcatcccagttggtgatgatgctgtgctctatggggtacttcagggtcaggatacctctcttgctctgggcctcatcaccctcgtaggagtccttttgacccatgcccaccatcacacagatgtggaagggcagcggagctctgtgctcgcggggtggacgcggtcttagcagtctgttctacattcttaaccttttttttttatggacctcttggctttctggtagagtctgggacccccttttcaaagtaatgcttctatgtgcataaaacaaatacatgggattacaaggcaaaccaactatattgaaatacagttgcctccttggatcctatggaggtccaagtactcaagtgaaaaatttccataagagctgggtgcgttggctcacacctgtaatcctagcattttgggaggccaaggcaggcgtactgcctgagttcaggagtctgagaacagctcaggcaacacagtgaaaccctgtctctactaaaatacaaaaaattagcttggcatggcagcatgcgcctgtagtctcagctacttgggaggnnnnnnnnnnnnnnnnnnnnnnnnnnnnnnnnnnnnnnnnnnnnnnnnnnnnnnnnnnnnnnnnnnnnnnnnnnnnnnnnnnnnnnnnnnnnnnnnnnnnc

SEQ ID NO: 724830 - DNA, 581 bp, Homo sapiens
ggtctgtacctgagggggtttctcaaatgctctcaaggaatatgtctgcacaaacgggaccttttcaccacttctccagatctgtgactgcactggagggcctcgatctttagtgtcactaagaaaagctgtcaatgaaacagaacaacaaaaaaaaaggtttatataataacagcactaggatcattctaactggcacattccagcagaattcagtttctgcaaaatacaaactcaatctaggccacatagaaacagtttacttaaagtagtctgtggtagatcatattaatagccatccccagtgaatcaaactagtttgggtccataggcctttgcaatgkgatactcctgccattaagaagtagagcctatttccccaactcttgaatctgggttggcaaagtggcttgccttgactggcagaatatgatataaatgctactgtatgagttccagagactagctttgagaggccttgcatttctgctcttgccttattagcatcccaagacaaccatgctgtgaagaagtcggtctaccccactggagaaggaaaggctgttcagggaagtgaagat

SEQ ID NO: 724831 - DNA, 586 bp, Homo sapiens
cacagtgcatccagtcagagaagtgaaagtgaagggttagaggggaagggggaatgagccggaaagaacaaggtgcgctttggaagtcccgtgaaagcctctgtttaaaataattacgactttggccgggcgcagtggctcacgcctgtaatccctgcactccggaaggccgaggcgggtggatcacttgaggtcaggagttcgagaccagcctggccaaaatgacraaaccccgtctctactaaaaatacaaaaattaaccaggtgtggtggcgggcgcctgtaatcctagacactagggaggctgaggcagtagaattgctagaacccagggggcggaggttgctgtgagacgagattgcgcgccactgcaccctaacctgggtgacagagcaagactccgtctcaaaaaaaaaaaaaaattatgactttaaatagcctatttcaaatatcaagccacagcaaagctatctcttgccttctagaggaagctatttcatgaaactgtaatacttcttccaacatgtctgtctggtttccctactttgtcaggaaagcctagcagagagcaggcccagctggttca

SEQ ID NO: 724832 - DNA, 586 bp, Homo sapiens
cacagtgcatccagtcagagaagtgaaagtgaagggttagaggggaagggggaatgagccggaaagaacaaggtgcgctttggaagtcccgtgaaagcctctgtttaaaataattacgactttggccgggcgcagtggctcacgcctgtaatccctgcactccggaaggccgaggcgggtggatcacttgaggtcaggagttcgagaccagcctggccaaaatgacgaaaccccgtctctactaaaaatacaaaaattaaccaggtgtggtggygggcgcctgtaatcctagacactagggaggctgaggcagtagaattgctagaacccagggggcggaggttgctgtgagacgagattgcgcgccactgcaccctaacctgggtgacagagcaagactccgtctcaaaaaaaaaaaaaaattatgactttaaatagcctatttcaaatatcaagccacagcaaagctatctcttgccttctagaggaagctatttcatgaaactgtaatacttcttccaacatgtctgtctggtttccctactttgtcaggaaagcctagcagagagcaggcccagctggttca

SEQ ID NO: 724833 - DNA, 586 bp, Homo sapiens
cacagtgcatccagtcagagaagtgaaagtgaagggttagaggggaagggggaatgagccggaaagaacaaggtgcgctttggaagtcccgtgaaagcctctgtttaaaataattacgactttggccgggcgcagtggctcacgcctgtaatccctgcactccggaaggccgaggcgggtggatcacttgaggtcaggagttcgagaccagcctggccaaaatgacgaaaccccgtctctactaaaaatacaaaaattaaccaggtgtggtggcgggcgcctgtaatcctagacactagggaggctgaggcagtagaattgctagaacccagggggcggaggttgctgtgagacgagattgcgcgccactgcaccctaacctgggtgacagagcaagactccgtctcaaaaaaaaaaaaaaattatgactttaaatagcctatttcaaatatcaagccacagcaaagctatctcttgccttctagaggaagctatttcatgaaacygtaatacttcttccaacatgtctgtctggtttccctactttgtcaggaaagcctagcagagagcaggcccagctggttca

SEQ ID NO: 724834 - DNA, 610 bp, Homo sapiens
cccttccttccttccttccttccttccttccttccttcctyccctccctcctctctccctccttccctgccttctttccttcgttctgccaacttgccagaaggagcccaagaaaaagcacccagatgcttcagtcaacttcttagaattcttcttttttttatgttcagaaaagatggaaattcatttctgctaaagagaaagaaaaaattggaagacagggtgaaggtgaacaggcccattataagaaagaaacaaaaatctatattctgtctacaaggaaacgagagagagaaagagagagaagaaagaagttccaggattctaatgtaccaaagggatctcctttttcttgttttgttctgaaaatttcaccaaaagagcacaggagaacatcttggctaattcattggcgatgatgtaagaaaactgagagaaatgaaagaaatgaagaattactgctgcagataatatacagccttgaggaaagaaaggcttttaagattatagatataaaggctattgctgtattctgggataaaagaaagtctgatgcagggaaaggggaagttggaaaaactggaaaaagaaaaaagaagaaaagaaaaaa

SEQ ID NO: 724835 - DNA, 610 bp, Homo sapiens
cccttccttccttccttccttccttccttccttccttccttccctccctcctctctccctccttccctgccttctttccttcgttctgccaacttgccagaaggagcccaagaaaaagcacccagatgcttcagtcaacttcttagaattcttcttttttttatgttcagaaaagatggaaattcatttctgctaaagagaaagaaaaaattkgaagacagggtgaaggtgaacaggcccattataagaaagaaacaaaaatctatattctgtctacaaggaaacgagagagagaaagagagagaagaaagaagttccaggattctaatgtaccaaagggatctcctttttcttgttttgttctgaaaatttcaccaaaagagcacaggagaacatcttggctaattcattggcgatgatgtaagaaaactgagagaaatgaaagaaatgaagaattactgctgcagataatatacagccttgaggaaagaaaggcttttaagattatagatataaaggctattgctgtattctgggataaaagaaagtctgatgcagggaaaggggaagttggaaaaactggaaaaagaaaaaagaagaaaagaaaaaa

SEQ ID NO: 724836 - DNA, 1567 bp, Homo sapiens
tggatttgttttttcctagcggccattatagtttcctcatcttacctgctgtctcaacagctttgctgtagcttggcttcctcctctaatagtcctccagctcctgctccttttattggaccatctctcctctactcatagtggtggttcagtgtttcagcaattagtgaaaatttccgtctcagactgacttttctttacaatcttaaggatctttcagttttcattattaatagtagtagtattttattttattttcaattttttatgatggggtctccctgtcacccaggctggagtacagtggcataatcttggcccactgcagccttgacttcctgggctcaagtgatcctcccacctcagcctccccagtagctgggaccacaggcacacatcaccacatccggctaatttttggtttttttttttttttttttttgtagagatgaggtctcaccatgttgcccaggctgatcttgaactcctgggctcaagtgatccacctgcctcagcctcccaaagtgctgggattacaggtgtgacccaccatacctggccagatctttcagttattactagtctttgctatcgttcctgggaaaaaagtttaggcaaattcattcagctctacctgccaaagaattaaatctaatacgacattaaaggtgacaaagtgggtcataatctaacttgctgttgttgtttgcttgtggtgaattctctagcttccaaagatgtaatttttgttaatcagtccctcttggttcttcccctaatccctggcccatcctcttactccatcactacctgatatgagacctttttctttgttttttattagggagcatgatcctctggttctggaaatctgaagtcaggccccaaactctgtgtgccatttctctacggaggtctacctccaagctctcgggcagataataaccaaaatttcaaagttctaggaggaatttcctttttaaaaaatctgctatttatgcagactgtcacttcttgagaatattacaatgaaagctttgagttgaagttttaggagctcaagacataatcctttcttcctcttttaagttcagatcaaattgggaaatagagaagtcaaacagagaattaataatgctacagtactttwattactgatcaaactaagtggagaacttgcatttagatctgtgatgatgcaaaggtcctgctaatatttcactccagaattaggcagacttcactccagaaacagcaggcctttctcaaatgggcaggctgactggcttcttaccacatggcatagggcaaaccagaatgacctactctgaggctggcatcttaagtgttcagctatcaccacaagacttctcagattctcagtgaagaagggaacagggtgcagtccaacacaaaggaggacccacctcctaccagagagcagaaatgatcttagtacctttgtgtcccttggccagctccagtggcggtggtgatctcagagacttccagctgttctctctctcccagcctttagctgggaaaagggtttgtccctgtaatacac

SEQ ID NO: 724837 - DNA, 766 bp, Homo sapiens
taagcctaattgaaaaatgagaagattcccagagatttggcaaggccatgggagaaattgttgggacaggttatagaaaaggactaaaatactcaaaatagattagtggccctaatcagatatttgtgcatttcagctttttagagaaatrcaatgagatgccctaaaaaccaaaggaaaaaaattcatagatttctagaacgtgcaaaatagacgttgaaaatgaggcgtgccaggtgctatcaagagtagaggctgagtcaggactcaatgttggggaccgaagctcaggccctgccccagaaaggattagctccagctgatggctttgtgggctcaggggccacacagaccaggacctctgttttttcacagaagccagaaatatgagatggtgcatctcatcccacaactgttaaatgttagtaaatctttaaatacctgctatttactgagaattcatcatgtaccagacagcttctaagagttttagtgcattgtttccattgattctctcaacaactgtatgaaatatgttttgatcattatttctgtttcataaatgagaaaactcaagcacagagaggtcagaatcacttccccaatgccacacagcagaggagctgggatttaaacccaatctatctgcttccagcactcagttcttttttttttcttgagacagagttttactcttgttgccaggctggagtgcaatggagggatcttggctcactgcaacctctgactcctgggttcaagcaat

SEQ ID NO: 724838 - DNA, 1420 bp, Homo sapiens
ctttggagggttgttttttttttattttatggttattacttttattagatacaggtgtcactatgctgcccaggctggagtgcagttgctattcccaggcacaatcatggctcactgcagcctcgaacccgcaggcttaagcaatcctcccgactcagcctcttgaggagcggggactacaggtgcatgccgctgagcctggcctaccttcgtaggttttgagcagaggaatggcatgctctggcttaccttttcaattttggtgaggccccttggcaaggctccttatggtttttagcttcccgcaggagagctcactccctgcactcggggtctgctttggtcacgtcaggaaagccaactaggcccaggggctctccaggaccccacgctcccctactggccccacttcacaagttgccatcccatgcctggccccccaggtatgagtttgagaaccctgctaagataggttgcccgcatgggcttctgcagggaaagctactcacggcggccgtgggragcctctgcgtgcaggccacgggaagccgcagcttccagtccgtctccccatccagctgatccgtccgcaagaagcatgaccctgtggaaggaagtcgggtgccgtcacctgcacctcaagcacccttcccttggcagctctgggcagcgtctgctctggtccttgtaaaaacagccaaccaatggccagcgaccacaagagaaaatacatatcctatctcctacttcttccataataagctctggggtcaaaaagctcagagttcaaatcctcactccgccactccctctgagtgggatccccagctagtttcttggacttgtcaagctttagtgtctgtaaaacgtggagaaacgcagacttcgcaagcttgctgtaaagattcaatggggagatagaacggggacgagcacaggttgaccagcattccgagccgtctggccaggcatcgccagcaccttctcaggacccaaaccacctgagtgcaggtccaggctctgccacgtaatagctttgtgccctgagagttgcctatcctctctgagcctcagtttcctcgtgtgtaaaagtggagataggaacagcactgaccctgtagagatgttgtgacaattaaagagctgattcgtgcgcagagttcagaacaggactgatcgatccaggcaagcactaggtcattatgggctggcacatttcagaggtgtatctttcagtctgacatacagatccgtgcaagtagtcagctgtatactccatcagatacagaacataccccattcactgccactgcagttcagtctttgagaactattaatgtagaacactcataattttggtttgtttgtttgttttttcaagaaaaaaagagcatgtcaggggccctactccataatgctc

SEQ ID NO: 724839 - DNA, 1420 bp, Homo sapiens
ctttggagggttgttttttttttattttatggttattacttttattagatacaggtgtcactatgctgcccaggctggagtgcagttgctattcccaggcacaatcatggctcactgcagcctcgaacccgcaggcttaagcaatcctcccgactcagcctcttgaggagcggggactacaggtgcatgccgctgagcctggcctaccttcgtaggttttgagcagaggaatggcatgctctggcttaccttttcaattttggtgaggccccttggcaaggctccttatggtttttagcttcccgcaggagagctcactccctgcactcggggtctgctttggtcacgtcaggaaagccaactaggcccaggggctctccaggaccccacgctcccctactggccccacttcacaagttgccatcccatgcctggccccccaggtatgagtttgagaaccctgctaagataggttgcccgcatgggcttctgcagggaaagctactcacggcggccgtggggagcctctgcgtgcaggccacgggaagccgcagcttccagtccgtctccccatccagctgatccgtccgcaagaagcatgaccctgtggaaggaagtcgggtgccrtcacctgcacctcaagcacccttcccttggcagctctgggcagcgtctgctctggtccttgtaaaaacagccaaccaatggccagcgaccacaagagaaaatacatatcctatctcctacttcttccataataagctctggggtcaaaaagctcagagttcaaatcctcactccgccactccctctgagtgggatccccagctagtttcttggacttgtcaagctttagtgtctgtaaaacgtggagaaacgcagacttcgcaagcttgctgtaaagattcaatggggagatagaacggggacgagcacaggttgaccagcattccgagccgtctggccaggcatcgccagcaccttctcaggacccaaaccacctgagtgcaggtccaggctctgccacgtaatagctttgtgccctgagagttgcctatcctctctgagcctcagtttcctcgtgtgtaaaagtggagataggaacagcactgaccctgtagagatgttgtgacaattaaagagctgattcgtgcgcagagttcagaacaggactgatcgatccaggcaagcactaggtcattatgggctggcacatttcagaggtgtatctttcagtctgacatacagatccgtgcaagtagtcagctgtatactccatcagatacagaacataccccattcactgccactgcagttcagtctttgagaactattaatgtagaacactcataattttggtttgtttgtttgttttttcaagaaaaaaagagcatgtcaggggccctactccataatgctc

SEQ ID NO: 724840 - DNA, 674 bp, Homo sapiens
agtggacctcacaatggagggaaactcgcctgaacagagtttcccaaacttcagccattttcatacacacatgggatttctatgatctccaaatacctctagcttctacctacacaattttgtctaaatttgatcaccttacatcagtggttctcaactacaggcaattttgcacccccagggtgggtatctggcaatatctggaaacactgttgtctgtcacaactccaagatgctactctcatctagtggatggaggcagccaaggatgctgcgagacaccttacaatgcacagacaacctccacaacagagaagtatccagcccaaaacgccacttgtgcccagttgagaactcctgctctaggttttatatataaactatttgtttaaaatggattcactccatttacataaatgtattttaaatgatagcctctggccaggcatggctcacacctgtcatcccaacactttgagaggccgaggcaggaaaacagcttgagttcaggagttggagaccagcccgagcaacacggtgagacctcatctctactaaaattcaaaaataawtagccaggcatggtggacatgcctatagtctcagctacttggggggctaaggacgaaggattgcttgagcccgggaagtcgaggctgcagtgagccctgatc

SEQ ID NO: 724841 - DNA, 999 bp, Homo sapiens
tctctgccggatgtttcaggttcgcctyctctccccgtcacctcctcagaatcttaggagaccacataggatcaatccttgttcaaaggcaaaggccaaaaaagtatgactgcaaatatgtgaagtacgatttggcacggagttcattttgggaccctaagtcctctaggcggtacagctatatattgcaatggactgagtgtttgacacacttgcccagaactcctgcatacaaatgaggagtggcatccttaacctcaggcagttaaatgttccattcccctgaaactaccattttccaaagagctttggaattgtcttagggcctatttaaatgccataggaaaaaagttaatttcatttctttttatggtcccatgtcatttttaacccctagtagtagcagtatttctagctgttaaaagtaagtatttttgagtcacaaatctaacaattgatttgtggcaatttgtttaacctcctagagccacagcttacttatttctggaatggtatgatagtaaaatctaccttatggggcctctctgaggattatggataaagcggttaacacaattccaggcaactagtaaacattcaaaatgtgttactattattactgggattgttaccgccgttgttattaaacaacttgttcacataccttttttcactcgacttggctcagaattctaccagactgttcagaaaaatcaagtgtgtgtttaatgtacagtattttaaagtcacaaatccagaggcttttaagaataagttacaaggtctgaagtgatttttgaaagtacactgagcggagtagatcctgttgaatatattccaggctctaaaatgactatttctaaaggagatgatgctgtggaatatgttataaaggaacaaaaaattactttactctgtagacacatttcatagtttttgtgcaattttctagtttcaacagcttgtccaatatgtattgaatatatattctatgaatga

SEQ ID NO: 724842 - DNA, 999 bp, Homo sapiens
tctctgccggatgtttcaggttcgcctcctctccccgtcacctcctcagaatcttaggagaccacataggatcaatccttgttcaaaggcaaaggcmaaaaaagtatgactgcaaatatgtgaagtacgatttggcacggagttcattttgggaccctaagtcctctaggcggtacagctatatattgcaatggactgagtgtttgacacacttgcccagaactcctgcatacaaatgaggagtggcatccttaacctcaggcagttaaatgttccattcccctgaaactaccattttccaaagagctttggaattgtcttagggcctatttaaatgccataggaaaaaagttaatttcatttctttttatggtcccatgtcatttttaacccctagtagtagcagtatttctagctgttaaaagtaagtatttttgagtcacaaatctaacaattgatttgtggcaatttgtttaacctcctagagccacagcttacttatttctggaatggtatgatagtaaaatctaccttatggggcctctctgaggattatggataaagcggttaacacaattccaggcaactagtaaacattcaaaatgtgttactattattactgggattgttaccgccgttgttattaaacaacttgttcacataccttttttcactcgacttggctcagaattctaccagactgttcagaaaaatcaagtgtgtgtttaatgtacagtattttaaagtcacaaatccagaggcttttaagaataagttacaaggtctgaagtgatttttgaaagtacactgagcggagtagatcctgttgaatatattccaggctctaaaatgactatttctaaaggagatgatgctgtggaatatgttataaaggaacaaaaaattactttactctgtagacacatttcatagtttttgtgcaattttctagtttcaacagcttgtccaatatgtattgaatatatattctatgaatga

SEQ ID NO: 724843 - DNA, 999 bp, Homo sapiens
tctctgccggatgtttcaggttcgcctcctctccccgtcacctcctcagaatcttaggagaccacataggatcaatccttgttcaaaggcaaaggccaaaaaagtatgactgcaaatatgtgaagtacgatttggcacggagttcattttgggaccctaagtcctctaggcggtacagctatatattgcaatggactgagtgtttgacacacttgcccagaactcctgcatacaaatgaggagtggcatccttaacctcaggcagttaaatgttccattcccctgaaactaccattttccaaagagctttggaattgtcttagggcctatttaaatgccataggaaaaaagttaatttcatttctttttatggtcccatgtcatttttaacccctagtagtagcagtatttctagctgttaaaagtaagtatttttgagtcacaaatctaacaattgatttgtggcaatttgtttaacctcctagagccacagcttacttatttctggaatggtatgatagtaaaatctaccttatggggcctctctgaggattatggataaagcggttaacacaattccaggcaactagtaarcattcaaaatgtgttactattattactgggattgttaccgccgttgttattaaacaacttgttcacataccttttttcactcgacttggctcagaattctaccagactgttcagaaaaatcaagtgtgtgtttaatgtacagtattttaaagtcacaaatccagaggcttttaagaataagttacaaggtctgaagtgatttttgaaagtacactgagcggagtagatcctgttgaatatattccaggctctaaaatgactatttctaaaggagatgatgctgtggaatatgttataaaggaacaaaaaattactttactctgtagacacatttcatagtttttgtgcaattttctagtttcaacagcttgtccaatatgtattgaatatatattctatgaatga

SEQ ID NO: 724844 - DNA, 999 bp, Homo sapiens
tctctgccggatgtttcaggttcgcctcctctccccgtcacctcctcagaatcttaggagaccacataggatcaatccttgttcaaaggcaaaggccaaaaaagtatgactgcaaatatgtgaagtacgatttggcacggagttcattttgggaccctaagtcctctaggcggtacagctatatattgcaatggactgagtgtttgacacacttgcccagaactcctgcatacaaatgaggagtggcatccttaacctcaggcagttaaatgttccattcccctgaaactaccattttccaaagagctttggaattgtcttagggcctatttaaatgccataggaaaaaagttaatttcatttctttttatggtcccatgtcatttttaacccctagtagtagcagtatttctagctgttaaaagtaagtatttttgagtcacaaatctaacaattgatttgtggcaatttgtttaacctcctagagccacagcttacttatttctggaatggtatgatagtaaaatctaccttatggggcctctctgaggattatggataaagcggttaacacaattccaggcaactagtaaacattcaaaatgtgttactattattactgggattgttrccgccgttgttattaaacaacttgttcacataccttttttcactcgacttggctcagaattctaccagactgttcagaaaaatcaagtgtgtgtttaatgtacagtattttaaagtcacaaatccagaggcttttaagaataagttacaaggtctgaagtgatttttgaaagtacactgagcggagtagatcctgttgaatatattccaggctctaaaatgactatttctaaaggagatgatgctgtggaatatgttataaaggaacaaaaaattactttactctgtagacacatttcatagtttttgtgcaattttctagtttcaacagcttgtccaatatgtattgaatatatattctatgaatga

SEQ ID NO: 724845 - DNA, 599 bp, Homo sapiens
aggcccaggttcaaatagcaattaaaggggtgtcttcaaaagagttaccaatgcagacagtgggaaaaggtggtaaatgaggagccaggagtcaataatctccatgtatgttttagaagaaaatcgttacaaatatggagtatcctcttgttaaatgcgtttgtgaagtcaaggaaacttgactaggaccraaactaattttggaattgatctttggaattgacagttatgaattcactgtgaaatgggaggcagtggttattttagagtaaaaagaaaaaaagggtagacaattaattcaagaaatttggtaactaagaaaaggagtggtggggcagcttcttgcagaggagcaaggctcaaaagaggtctttgaacatggaggatattttaagttatttacaagcacagaaatggtggatggaggcaatggaagttcggaggggagaataagatcataggaggggtaggagatcaaaaacacaattcaaaactaattgggccacttcttcccaagaaactgtaaagaagtcagttaatagtggtacagaaataggtcacctgctgaaggattggctatgtgtgtgtgggacagggca

SEQ ID NO: 724846 - DNA, 594 bp, Homo sapiens
tagttgcatgacattaaataatttaattaacacctgttaggccgtttgcctgtataattggaatagtatattattttactcaatatatatttatgagattactgtgtccttgccagtactgtgaatccaggaaatgattcaatgaacagggcaagtgctgtgaccttagtgtggtgaaggcaataagatagtaaaaaaaataaaatattagtgttatatgaactatgaagaaaataatacaaaactaaagagtgggaagaaaggaagattttagaaacagagtcagagaagatatttttgaggaagtggctttgagcagagacttaaaggatgagactaatcatattctggacagaaaaaacaacagagaaacttggaggctgtaaaaccttgatttgctaaagaaaccagctttggtttcagcagagyaattcagaggatgtgctaaattaaataatgactcctcatccctacaacctgtaaatgctaccttatatgacaaaagggactttgtagatgtgattaagaatcttgagatgagggaattattctggattgtaagggtggaatatacttgtagtcatatgtatcttt

SEQ ID NO: 724847 - DNA, 1232 bp, Homo sapiens
  misc_feature 1027, 1028, 1029, 1030, 1031, 1032, 1033, 1034, 1035, 1036,1037, 1038, 1039, 1040, 1041, 1042, 1043, 1044, 1045, 1046,1047, 1048, 1049, 1050, 1051, 1052, 1053, 1054, 1055, 1056,1057, 1058, 1059, 1060, 1061, 1062, 1063, 1064, 1065: n = A,T,C or G
  misc_feature 1066, 1067, 1068, 1069, 1070, 1071, 1072, 1073, 1074, 1075,1076, 1077, 1078, 1079, 1080, 1081, 1082, 1083, 1084, 1085,1086, 1087, 1088, 1089, 1090, 1091, 1092, 1093, 1094, 1095,1096, 1097, 1098, 1099, 1100, 1101, 1102, 1103, 1104: n = A,T,C or G
  misc_feature 1105, 1106, 1107, 1108, 1109, 1110, 1111, 1112, 1113, 1114,1115, 1116, 1117, 1118, 1119, 1120, 1121, 1122, 1123, 1124,1125, 1126: n = A,T,C or G
atgttatttcacaatgagtgtattaacttatatttcttttgttgctttctttttctcttttttttttttttttgagatggtgtctcactctgtcacccaggctagagtgcagtggtgggatctcagctcactacaacccccayctgctgggctcaagcaattctcttgcctcaccctcctaagtagctgggactacaggcatgtgccaccatgcccagctaaagtttttgtattttcagtacagactgtgtttcactataatggccagagtggccttgaactcctgacctggtggtccacccgccttggcctcccaaggtgctgggattacaggcatgagccactgcatccgaccaacttatatttcatttagttagaacaccccattttgttattttaattggagaaacctgtgtaagctaagtttcctttattattgttccttttactctttataattgacataggtgaatttattcattcagccaatttgtttaggtaaatgctggggaggcttcataagtcataaagatattttgatatgtaaatgtagcaaacacaatgcttgctgtgtaatagatgcaccattattggccacaaatatttctgctggagttagtttgtagctccaagtaaagataaagaaatacacatggtgaagaaataaaatcgattctgtatatggagaggacattgttcttatgctgcaaaattgactctttctgaatttaaagagacattctgcttattttctgattatctttagttatgtttgtgtgtctacttatgtttatcccaactgtgtatgcatcacagcccttctttttattctttgtgttatggctacaactttattgctgtttgttttgtgccatgtcacttcacacagtactttgtaggttctgatgaaagtttgtcaatgaactttcagatctgttaattgagataaaaggcatgcagtgttcacaggtgagaggaaataaatcagtcagaattggtaccgagctcgaattcgtaaaaattgatnnnnnnnnnnnnnnnnnnnnnnnnnnnnnnnnnnnnnnnnnnnnnnnnnnnnnnnnnnnnnnnnnnnnnnnnnnnnnnnnnnnnnnnnnnnnnnnnnnnnaaaaaaaaagaaattgactatggatataatgaaaatcttctgggacagcattcattcattacttaggaagagcctgtttcttgttgttattgttgtttttgagaca

SEQ ID NO: 724848 - DNA, 1488 bp, Homo sapiens
tgttgtacaccttgaatacatacaatttttatttgtcaattatacctcaatgaagctgaagagaaaaaaaaagaatgacagtcctcagtgggttagtgaatcctccaaaaactgaatgcaaaattaacacacagggatatagcacgtggctttcatgaaattctcagaggcctgaaggagacatgtgaatattctctccaacatccatttcttccctcactgctgaagagcatggatagtcacagtgatacccccaccccaatcttcctacatggacaggttttggtaatccaagtctaaaccaacccaccatggtatttcctggactgtagggattggctcagggtggttccagcatggtgaacagtaacttcggtcaattggttgtcaagggcaaacacaccctctccactggtgaacaaggatgcccatagtccccattactttgggtcacctccctgttatttccacaggggccatgggcccgactcagtataaagcactgggggcaaagtgaaaagatggaaagagactggtgggtctctgatgacattctggctggggattgatcgaccatgactgccccccagcgggacgttcaaattaaacaagctaggtgcttctctaatcctgaagatcagtttgaagtgaggtctctggtatcggcaactgaaagcatcttctactgacataagagttctttaagaaccactggcccaaggaaagactttaaggaaccatgagtatatgcgtggggtgacagcagagagaatgaactgaaaggatatgaagaagaaagaaagaacttggctatttaattttggccttctgaccttgagatatacacctagtggttatttttttgtgtgctttttggatgtagttgataatagtaattttagttctattctcttttccattcttgtaaccagcatacactatttctactaaataaacagctacccagtaggtcttgtatgacaaaccacgttctccgcattagcagtgccctggggatggagggtactttatggtcagcccaatgcaatgtcattctaaatttgcacatttggttccttcgttcttacgtgtaaggcggttgttaaactacagcttttcatttctcctcaaaagggtgtgtgtgaggccactgtaagaaaacgtttctctaatgtaagttgttctagagtgggggtgagaggtgactttccaaacaatctcaaatgaagtatrtgtgtcctaacacagccctgcatgagagaggaatcctggtgacacattcctttgtttctgtttgtttctgcgtgatcatgctgccgagatcttgataaattctctactcacaggatctcattcaataactagttctcacaagtgaggcttttgatgactcttcgtggcttacagaatacagccccaacttcatcacaggtcttatgatttggccttcacttacttatccaacctaacctctttgtttttttgttt

SEQ ID NO: 724849 - DNA, 1488 bp, Homo sapiens
tgttgtacaccttgaatacatacaatttttatttgtcaattatacctcaatgaagctgaagagaaaaaaaaagaatgacagtcctcagtgggttagtgaatcctccaaaaactgaatgcaaaattaacacacagggatatagcacgtggctttcatgaaattctcagaggcctgaaggagacatgtgaatattctctccaacatccatttcttccctcactgctgaagagcatggatagtcacagtgatacccccaccccaatcttcctacatggacaggttttggtaatccaagtctaaaccaacccaccatggtatttcctggactgtagggattggctcagggtggttccagcatggtgaacagtaacttcggtcaattggttgtcaagggcaaacacaccctctccactggtgaacaaggatgcccatagtccccattactttgggtcacctccctgttatttccacaggggccatgggcccgactcagtataaagcactgggggcaaagtgaaaagatggaaagagactggtgggtctctgatgacattctggctggggattgatcgaccatgactgccccccagcgggacgttcaaattaaacaagctaggtgcttctctaatcctgaagatcagtttgaagtgaggtctctggtatcggcaactgaaagcatcttctactgacataagagttctttaagaaccactggcccaaggaaagactttaaggaaccatgagtatatgcgtggggtgacagcagagagaatgaactgaaaggatatgaagaagaaagaaagaacttggctatttaattttggccttctgaccttgagatatacacctagtggttatttttttgtgtgctttttggatgtagttgataatagtaattttagttctattctcttttccattcttgtaaccagcatacactatttctactaaataaacagctacccagtaggtcttgtatgacaaaccacgttctccgcattagcagtgccctggggatggagggtactttatggtcagcccaatgcaatgtcattctaaatttgcacatttggttccttcgttcttacgtgtaaggcggttgttaaactacagcttttcatttctcctcaaaagggtgtgtgtgaggccactgtaagaaaacgtttctctaatgtaagttgttctagagtgggggtgagaggtgactttccaaacaatctcaaatgaagtatgtgtgtcctaacacagccctgcatgagagaggaatcctggtgacacattcctttgtttctgtttgtttctgcgtgrtcatgctgccgagatcttgataaattctctactcacaggatctcattcaataactagttctcacaagtgaggcttttgatgactcttcgtggcttacagaatacagccccaacttcatcacaggtcttatgatttggccttcacttacttatccaacctaacctctttgtttttttgttt

SEQ ID NO: 724850 - DNA, 1855 bp, Homo sapiens
tactcagtatatttaggcagtgccactctagtgagagttgacagctatacccagtactgaagaaaagtaatgtcaaattattctgaatacaatgagacttggaagggacattgaatgtagttaggaacataacgcctgtccatcagagagcaatactgatgcatgcaggcgccctaaatgaagggaaccagatgaacgtcaacaagtatcgttcataaaagctaaaactacgtttcggtggctttctcatggaaaatgatagataaaaatttgtatctcgtaaaatggaaatatgtattctaaatgtgaaacttaagagccctgttataatacaggagagtgcctcaaatgaggtgattcactttaatcttcctaatactaatggcaaaattttcgttaattcttaatggtgaaattaaggagggataagcctgtattaaaaatgttccggccaggcgcagtggctcacgcctgcaatcccagcactttgggagaccgaggcgggcagatcatgaggtcaagagattgagaccctcctggccaacatggtgaaaccctgtctctactaaacctgcaaaaattagctggatgtggtggtgtacgcctgtagtcccagctactcgggaggctgaagcaggagaatcgcttgaacccaggaggcagaggttgcagtgagctcagattgcaccactgcactccagcctggcgacagagcaagactctgtctcaaaaaaaaaaaaaaaaaaaaaaaaagggtcctgaaagtgaatttgaaaacaacatgtgaaatttcaagtatctttaactttattttaaatgtaggttgcaagcagagatgtcagtaatgatattaacattggtttttgtcagctgcaaaaccagtaactcaaacaggatgctgtccccttcattctttttagtatgcaaaaatatatggatatcatttaaacatgcaatakaaaatgtggctttttaaaaaatagttgaaatattaagctgataaccaaggaaatgttggggaatttatttcctttattgttgcattctcttgtttgaaatgaaatcatactttattgaaaaagttatatattcattttaggattaccttagtcattagatttagtgtctctggaaatcagtgctttgctctggtttggttggtggtgaatgttaatttaaaaagcagttcatttcagggtgctgtcatattatatattctttgttatattttttgcttgggcagtagcatcaggaatgctttccttgtattttaagtgctttttccatttttgtcagatgttagtgtgggagcaaaacattttggtatctgagagcacagactatggaggattgggaccaaaaaaaaaaaagtcaccatgtttttaatccaaagaattaatatgaaatttaatgttatatggtagaaacatttcttgtttcactaaaaaagcagctcacatttcttaaaacaggtatcatttgagaaataattattgactgctgacaacgtaacagggagccttcgggtatttgaacaaaacagatagaagtcacttctcttttagaactctttataaaggagagagaataaataagtaaattatgcagtatgttagaagacagcaaatgtgacaggtaaaaagctagagtgagtatcagtagggattgttgtagttgtcattagtgtgatgagtgttggctttatctagaaggtgacttgggagcagagatgtgaggttggtaagggaggccatgaaggtgtctggggggagagcattccaagcaaaataaacagtgaatgcaaaggccctgggcctgcttggcatgttcaagaacagcaagaatgccgtggtgg

SEQ ID NO: 724851 - DNA, 533 bp, Homo sapiens
gaggcggagcttgcagtgagccgagatcacgccactgtactccagcctgggtgacagagtgagactccgtctcaaaaaaaaaaaaaaaaaatcacatttttctgtaatatactatagtttataaaatagagtctgatataggccagttttatatgactattttctaagtgcagttatttttcattttttgtttgctctaccttaatagtgaatggttgagattccccaaagatgaaaggaactattatatgtcaaatcatttatttgacattctgtttaaggagcagctctgtatcaatacctgtttttcattgacttaatgataccctcttcttctgtgttgctccttttctgcttcctcttttttcttttcaccttttcttatctcgtaatttggtattcattcccatcattttctggacactttttctcaaatatcctgtcaagttcaagggagtatttgctgargtcattttgtatgttttcatgagggtgatcatcactatatgtcaccccccattttcaaacatttt

SEQ ID NO: 724852 - DNA, 533 bp, Homo sapiens
gaggcggagcttgcagtgagccgagatcacgccactgtactccagcctgggtgacagagtgagactccgtctcaaaaaaaaaaaaaaaaaatcacatttttctgtaatatactatagtttataaaatagagtctgatataggccagttttatatgactattttctaagtgcagttatttttcattttttgtttgctctaccttaatagtgaatggttgagattccccaaagatgaaaggaactattatatgtcaaatcatttatttgacattctgtttaaggagcagctctgtatcaatacctgtttttcattgacttaatgataccctcttcttctgtgttgctccttttctgcttcctcttttttcttttcaccttttcttatctcgtaatttggtattcattcccatcattttctggacactttttctcaaatatcctgtcaagttcaagggagtatttgctgaagtcattttgtatgttttcatgagggtgatcatcactatawgtcaccccccattttcaaacatttt

SEQ ID NO: 724853 - DNA, 1854 bp, Homo sapiens
taaataatacgatgtaacttaaaagatgtataaatattttctctctaggttttttctgcctatgcaactacaaaaactttcaagagattcatgaccaattatgaaattggcagtttctacttacagctttaatgaagtatgagcaccacaaaacaatctgatacacaaaatgccaaggataaaagtacagctttgtttggccttaacagatatctaacttgtttcctgttaagatatattcaagtataaaatctcataccaatttcataactgttcaacaaaatatatttatgttcagtatttcattgggctagataatggggcaaatattttttgaaacttatcaagtctatgaaaatactatttggcttaaaaaatggcacaggtttgggaggctgaggtggcaggatcacaagatcaggaatttgagaccagcctggccaatatagtgaaaycccgtctctactaaaaatacaaaacttagctgggtatggtggcgggtgcctgtagtcccagctacacgggaggctgaggcaggagaatcgcttgaacaatttctataggtatcagcgatgcacacatcatgaataataaaacctacctgtaattgtccacaaaacacagattcctgttaaaggagggtagagatcagctaggtattgaaaaatccttcttattgaaaaaaagaaaaaggctgggtgtggtggctcatatctacaaccccagataggagctaatatctataatccactttgggagaccaaggtgggaggattggttgaacccaggagtttgagaccaggctgggcaacatagggcgatttcatctctacaataaccttaaacagttagtcaagcatggtagtgccctcctgtcgtcccagctgctcaggacgctggggtgggaggattgcttgagctggggagtgaggggtgcagaggttccagtgagctgagattgtgccactgcactctagcctgggcaacagattgagtccctgtcttaaaaaaagacaaaacaaaaccaaaaaaaagcatgattttgtttggtctaagtccttaggtttatacctacttcaataacaaaataattgtggtgaaagaatcagatttcttaatgtcttgtaaacagttgataccaggccaggcacggtggctcatgcctgtaatgccagcactttgggaggccgaggtgggtggatcacttgaggccaggatttgagaccaacctggccaacatggtaaaacctcatctctactgaaaatacaagaattagccgggcgtggtgacgtgcacctgtagtcccagctacctgggaggctgaggcaggagaatggcttgaacctgggaggcaaaggttgcagtgagccaagaccaagccactgcactacagcctaggcaacagagtgaaactccatctcaaaaagaaaagagctgataccaaaggaagcttatttcatatggtatcagcaaatttcttattttataagaactctccattagcattatcatggtatatatttacagtaaaaagaaagatacatttccttccaaagttcactctccttttccatcactaaggaaatacctaacttcgatcttcacatagtcagtgccatactctcgaggttatggaaatgttccacggtttaaaacaatatagataattgtgaagtaggtatgcttatgtattaactctttgattctttaagcaattatgaatagtaggggagatacttctgcttcctgtaatgataaactatgtaactgtagatcaatcttcccactgaggaacaactaaaaatcttaatatcttccatcagttttgtaaaattctcactatcatcttttca

SEQ ID NO: 724854 - DNA, 1854 bp, Homo sapiens
taaataatacgatgtaacttaaaagatgtataaatattttctctctaggttttttctgcctatgcaactacaaaaactttcaagagattcatgaccaattatgaaattggcagtttctacttacagctttaatgaagtatgagcaccacaaaacaatctgatacacaaaatgccaaggataaaagtacagctttgtttggccttaacagatatctaacttgtttcctgttaagatatattcaagtataaaatctcataccaatttcataactgttcaacaaaatatatttatgttcagtatttcattgggctagataatggggcaaatattttttgaaacttatcaagtctatgaaaatactatttggcttaaaaaatggcacaggtttgggaggctgaggtggcaggatcacaagatcaggaatttgagaccagcctggccaatatagtgaaaccccgtctctactaaaaatacaaaacttagctgggtatggtggcgggtgcctgtagtcccagctacacgggaggctgaggcaggagaatcgcttgaacaatttctataggtatcagcgatgcacacatcatgaataataaaacctacctgtaattgtccacaaaacacagattcctgttaaaggagggtagagatcagctaggtattgaaaaatccttcttattgaaaaaaagaaaaaggctgggtgtggtggctcatatctacaaccccagataggagctaatatctataatccactttgggagaccaaggtgggaggattggttgaacccaggagtttgagaccaggctgggcaacatagggcgatttcatctctacaataaccttaaacagttagtcaagcatggtagtgccctcctgtcgtcccagctgctcaggasgctggggtgggaggattgcttgagctggggagtgaggggtgcagaggttccagtgagctgagattgtgccactgcactctagcctgggcaacagattgagtccctgtcttaaaaaaagacaaaacaaaaccaaaaaaaagcatgattttgtttggtctaagtccttaggtttatacctacttcaataacaaaataattgtggtgaaagaatcagatttcttaatgtcttgtaaacagttgataccaggccaggcacggtggctcatgcctgtaatgccagcactttgggaggccgaggtgggtggatcacttgaggccaggatttgagaccaacctggccaacatggtaaaacctcatctctactgaaaatacaagaattagccgggcgtggtgacgtgcacctgtagtcccagctacctgggaggctgaggcaggagaatggcttgaacctgggaggcaaaggttgcagtgagccaagaccaagccactgcactacagcctaggcaacagagtgaaactccatctcaaaaagaaaagagctgataccaaaggaagcttatttcatatggtatcagcaaatttcttattttataagaactctccattagcattatcatggtatatatttacagtaaaaagaaagatacatttccttccaaagttcactctccttttccatcactaaggaaatacctaacttcgatcttcacatagtcagtgccatactctcgaggttatggaaatgttccacggtttaaaacaatatagataattgtgaagtaggtatgcttatgtattaactctttgattctttaagcaattatgaatagtaggggagatacttctgcttcctgtaatgataaactatgtaactgtagatcaatcttcccactgaggaacaactaaaaatcttaatatcttccatcagttttgtaaaattctcactatcatcttttca

SEQ ID NO: 724855 - DNA, 1463 bp, Homo sapiens
atgcattattaaaagacctctgctgtgcccaccactgggagatagggcaagaggcagcagtgaccctgcattctgaatgcacagagacactgacagtcactcactctaaataccaatgacaatatccccaaacccacaccaccctaacccatgccttgctctgaatttgggcagtctggaaaaaatgaaaatggaaacctttaaataaaactcataaaacttcagttccaagcacaatatttttggttctttggacaataagtgtttcactgagatttatgcctagggtccttttccatatcccggctctgtgtcagcgttcacatcagccctcagttcttcttgcaaatcaagggtataatatactgattccttcaaataatatttgtgttaaaatcattaaatgcccatgcaagtaattttttattaatgggatgagaaataatacataatacataccaattttatgacagcgagaggagttattaactttagaatatctgttgtataaattaaaaatcttaagaataagtccagtgttttaaatatactatggaaaaacaaaattaatgccaggagaattttgactggaatatagaaatgcctttatcattctgggaaaaatactaccctataaaagccacatcctctgataagttcagaaattatcctttttatataaatattattcacttggaaaaatgttttctataaacagctcccttagtgcattttaacacatacttttatttacagacattagatttacacatgtttccagtataaatctttcgtatatagcaaagagaatctgtgaccaaaaattctgttcaattcggatgtggggagcaaataaatgaccaatgttcccatatacatagtaatatatggctaattttatataacatgttcacattaaaaataagaacataaaaatttttaaatcttcaggaactgtcttcaggaaatttcagaagactatgacttttaaattacgcttttacttgatccaccttccaaaagctcagaatccttatattaaaagagctggcactgacataatttgatttaatcctgtaaatatgcatggaagtcccgatgtacatcatctactatgctctgcctgcgtgatgcaaggtgaatcaggcaccatccrctgtccctcttgttaaggagtccacaactgtgctggcaggacagacacgtatataactgattataatgtacttgagataactggtatatcccggtggtgggaataagaggctttggcagcacacggagtaaagagcgaggatcctggaaggcaacctgcatgtagggagagtggaagctcacccgaggaggtgacatttgagctggttgtaaaggaagaataggatcagaccaggcgaaggagaggcattccaagtgaagaaaaaacaattatccacacatgccaagtttttcagatttgactttta

SEQ ID NO: 724856 - DNA, 598 bp, Homo sapiens
ctggggcctgtcgtggggtggggagaggggggagggatagcattaggagatatacctaatataaacgacgagttaacgggtgcagcacaccaacatggcacttgtatacatatgtaacaaacctgcacattgtgcacatgtaccctagaacttaaagtatatttaaaaaaaaaaaagaaaggaaatgcagataacaactgtcatatatagttgctgtgaaaatcagaaaaacatatgtacagcatctggcacataataaacatgaagtatagcttctagaacaattcactggagtagtaatcatggtggcagtagtggtattgctttggccatcttgataggagggctacataaaaaaaaaaacagaacttatgaatacacaaagatgtttttcttmaatttcttacttcacaaaataactcaacccaagtttccttagtgagttaacctagcatattcaaagtatggtttgacttacaaatttttttaatgtatcatctgcaacagatgacttctgtaatttggggaaaagtcctagggaaatcccggtacaggatcacttcatcagttcatctccctcctccatcagtttatacat

SEQ ID NO: 724857 - DNA, 598 bp, Homo sapiens
ctggggcctgtcgtggggtggggagaggggggagggatagcattaggagatatacctaatataaacgacgagttaacgggtgcagcacaccaacatggcacttgtatacatatgtaacaaacctgcacattgtgcacatgtaccctagaacttaaagtatatttaaaaaaaaaaaagaaaggaaatgcagataacaactgtcatatatagttgctgtgaaaatcagaaaaacatatgtacagcatctggcacataataaacatgaagtatagcttctagaacaattcactggagtagtaatcatggtggcagtagtggtattgctttggccatcttgataggagggctacataaaaaaaaaaacagaacttatgaatacacaaagatgtttttcttcaatttcttacttcacaaaataactcaacccaagtttccttagtgagttaacctagcatattcaaagtatggtttgacttacaaatttttttaatgtatcatctgcaacagatgacttctgtaatttggggaaaagtcctakggaaatcccggtacaggatcacttcatcagttcatctccctcctccatcagtttatacat

SEQ ID NO: 724858 - DNA, 606 bp, Homo sapiens
taagtgacacaatatctgtgaagtgtcataaagcaaagtgcaataaaacaagatatgactacagtaaatattttagatttttgtctccagtacaactattcagctccaccattgcaaaagacatataagtaatgcccttttaaagatgggcatgattataataaaactttatttctaaaggcaggtagaaggttggctttgatctgcaggctatggtttgctggcccttgttttagaccaatccccgatttcaaattttagctctgctgcccattagctgtgtgakgctaagcatacttcattttattatctcaattatttctcaaaataacccttgtgtaatgcattaatctcctcatattacaagtgaaacttgatggcttatagaggttaagccctcagacttcctaggatataagaagtaaacctgggattctaatatgagtttgtataatttcatagctttcagcttttttgattatgatatgttgcttataactctcatttacttctgaaatagaattctaagccaagtttggagcccagaggaaataaagagaaagaaaatggggaggtgtgcaatgaccattacagatgatttaggga

SEQ ID NO: 724859 - DNA, 662 bp, Homo sapiens
ataaagtagaatcatatcaggatagctcttttgcccccaggttcatcattatttttagtcacagtcttgactgagcaactactaaatatgaaccaccaaactgagagaggtagaataacaaagtgaaagatgcctagagcaataaacggattttaattttttttttaagcctccatctctctagtgtccgtttgtgatagaaggtttgagagaagacatcacaaaattcagcaacataaacaaaaatgtgatgctcagtacctgagcacatgtacttggcagggcgttcctcaatgagagcttagagtacttctcagaaatatggcaatgggtcatttggacagagtggtcactgtgrccatgtctcgtggcaatgttcatttttctttcacttatgcagaagctatctgccctgggtaattattttgagagcctgaatatctgtataaacacttacttttgccataatgttacaaaattcccttagcagtttatattttccatattcagttatatttattaccttatgccatgacagccttatcatatcaggaagttatccaccatgatgattgcaaacaaactgacatgtccaaaatgaaagaaaaataaataaatattgttatgtcattagcaggaagtgaaaaactttcaggttctaa

SEQ ID NO: 724860 - DNA, 611 bp, Homo sapiens
gctttgggtgtgaaaaccaggataatgtgaatgaagtattttatttaacttaaaattgagtaatcatcccaaaataggctaaatagatatctgtgttgctaaccagtcaaaacttctgcttccactactagaaaatcaaaaaaagtggtttaagattttacaaaatcactgagtaaaagcttacttttctcttaggccagtctacctctaggtggaattcttatagggactccagggcctcattttttgcttatttgtactagattaacctttttaacgtgtaatggggcataacataaagactctgcacacagaatcaggtagagatgattccaagttatgtaacttctctagccactgcttcttcatctgtaagattgggctaaaagtgcttatcttctagggttgttagaattatgtgaaaagccatgtgaaagcaagtagtgtattatatacacatgctcaatggaaattatttggtcstcaatgaaatattgtgttgatgagaataaaatgcatacgtatagacttttttcaaaattttctcttgttaggaatattaaactttaaaaagtaggccatttgtgtcttgaaatatgttactactacta

SEQ ID NO: 724861 - DNA, 611 bp, Homo sapiens
gctttgggtgtgaaaaccaggataatgtgaatgaagtattttatttaacttaaaattgagtaatcatcccaaaataggctaaatagatatctgtgttgctaaccagtcaaaacttctgcttccactactagaaaatcaaaaaaagtggtttaagattttacaaaatcactgagtaaaagcttacttttctcttaggccagtctacctctaggtggaattcttatagggactccagggcctcattttttgcttatttgtactagattaacctttttaacgtgtaatggggcataacataaagactctgcacacagaatcaggtagagatgattccaagttatgtaacttctctagccactgcttcttcatctgtaagattgggctaaaagtgcttatcttctagggttgttagaattatgtgaaaagccatgtgaaagcaagtagtgtattatatacacatgctcaatggaaattatttggtcctcaatgaaatattgtgttgatgagaataaaatgcatacgtatagacttttttcaaaattttctcttgttaggaatattaaactttaawaagtaggccatttgtgtcttgaaatatgttactactacta

SEQ ID NO: 724862 - DNA, 1976 bp, Homo sapiens
cttcttttttgcacacagagattatgacccttcaaaagttcctatctttatctactcygctcagtgccacttccgtaaggaactggcttagatacagactaccaaggacctcttcaacaaagagtttagaagatctatgtgatgcaaaaagcaattcttgtttaacataaagaaacttgccaaagaacgcaaagttgttttgtgatttattttctgtgataaacaaatttgtttaggttcttacaccttttcagatttccgttgtttccttccagtatgcatcccaaccattcaccttttcttagtgatgctcctttttgggggacgagtgggggagacggaatctcgctctgtctcccaagctggagtgcagtggcacaatctcactgcagtctacacctcccgggttcaagcacttctcctgcctcagcctccgagtagctgggactacaggtgtgcgccataatgcctggctaatttttgtatttttggtagagacaggagtttcaccatgttggccaggctggtttaacccctgacctcaagtgatccacccacctcggcttccaaaagtgctgggatcacaggcatgagccaccgtgccgggccttcctagtgatgattgatgccaccattattcaagaatttctacatttaaatatcaaccaactggcagtatattttcaatgtagcagacttattttgaaaatctttccatctaggcatttcactcttctttgttctattctttctcttttatttgtgccttctttacatccttttatttcttttttatctgaatgattacatagaaacaatgtttctaggatgctcttattaaattatttttgtttggcttatgatttcatagtggattttatttttatttcacatttctatataagaattatgaatattagggaattcttatgaaaatgtttattgtgtttttaaagtttacatactgttttttaatttttttagtgatgtggctacataaataatacaaaagtcagtgcctttaacacctgacttatcttccccatttcctcaattattctactcagaagcaatgtttccagtttcttacttgtgtttctgcagatactctatgtatatacaaacaaattatatttaagtctccatccctgttgaaattctccttaaaataacaaacagaatacaaaaattagaggaacccctgcctttgtgcttagagaatctctgttggtatggtataaattatacttctctgtactttctacaacaaacatatattacttttataattggggaaagtactgttaacaaaaacatgtttctaagtttcactatttcatgtggctgcttccatttattattgacagttttatcccatatctgatagttctattttctattttctttactctgggtaagagcaggtttggtgggtgaaggataaaaataccactcctcagtcattgacagttacctcccagctgctaaagtttgaagcatctgtcaccaaaaagataggctggctgaagaactgggatgacacagggcaactcgccacctttactaggcaaggtcctgagagccctatagagtatacaggtcaggaacttctttgcaaagcagtatgacacagttaagtatgtacacactatgttaaatgcatgagtttttttcctaatgaagttttgcatttacacgctgaatttttttaaataaccatctttgtaaatgtttcatatgcttacttgattgttttattcaacataatttgaactttctaatagcaaaacatgattatcacaaacattatgctgtaatcagaacagctcaggtatgtaaaatccttgcatttccaagtggctttttctttggtaattttaacgatacattacacaattttaaattttcaagtagtagaaaagtatatacaatgaaaaataagtcttcctcttactccaaaatccttaattccattc

SEQ ID NO: 724863 - DNA, 1976 bp, Homo sapiens
cttcttttttgcacacagagattatgacccttcaaaagttcctatctttatctactccgctcagtgccacttccgtaaggaactggcttagatacagactaccaaggacctcttcaacaaagagtttagaagatctatgtgatgcaaaaagcaattcttgtttaacataaagaaacttgccaaagaacgcaaagttgttttgtgatttattttctgtgataaacaaatttgtttaggttcttacaccttttcagatttccgttgtttccttccagtatgcatcccaaccattcaccttttcttagtgatgctcctttttgggggacgagtgggggagacggaatctcgctctgtckcccaagctggagtgcagtggcacaatctcactgcagtctacacctcccgggttcaagcacttctcctgcctcagcctccgagtagctgggactacaggtgtgcgccataatgcctggctaatttttgtatttttggtagagacaggagtttcaccatgttggccaggctggtttaacccctgacctcaagtgatccacccacctcggcttccaaaagtgctgggatcacaggcatgagccaccgtgccgggccttcctagtgatgattgatgccaccattattcaagaatttctacatttaaatatcaaccaactggcagtatattttcaatgtagcagacttattttgaaaatctttccatctaggcatttcactcttctttgttctattctttctcttttatttgtgccttctttacatccttttatttcttttttatctgaatgattacatagaaacaatgtttctaggatgctcttattaaattatttttgtttggcttatgatttcatagtggattttatttttatttcacatttctatataagaattatgaatattagggaattcttatgaaaatgtttattgtgtttttaaagtttacatactgttttttaatttttttagtgatgtggctacataaataatacaaaagtcagtgcctttaacacctgacttatcttccccatttcctcaattattctactcagaagcaatgtttccagtttcttacttgtgtttctgcagatactctatgtatatacaaacaaattatatttaagtctccatccctgttgaaattctccttaaaataacaaacagaatacaaaaattagaggaacccctgcctttgtgcttagagaatctctgttggtatggtataaattatacttctctgtactttctacaacaaacatatattacttttataattggggaaagtactgttaacaaaaacatgtttctaagtttcactatttcatgtggctgcttccatttattattgacagttttatcccatatctgatagttctattttctattttctttactctgggtaagagcaggtttggtgggtgaaggataaaaataccactcctcagtcattgacagttacctcccagctgctaaagtttgaagcatctgtcaccaaaaagataggctggctgaagaactgggatgacacagggcaactcgccacctttactaggcaaggtcctgagagccctatagagtatacaggtcaggaacttctttgcaaagcagtatgacacagttaagtatgtacacactatgttaaatgcatgagtttttttcctaatgaagttttgcatttacacgctgaatttttttaaataaccatctttgtaaatgtttcatatgcttacttgattgttttattcaacataatttgaactttctaatagcaaaacatgattatcacaaacattatgctgtaatcagaacagctcaggtatgtaaaatccttgcatttccaagtggctttttctttggtaattttaacgatacattacacaattttaaattttcaagtagtagaaaagtatatacaatgaaaaataagtcttcctcttactccaaaatccttaattccattc

SEQ ID NO: 724864 - DNA, 1976 bp, Homo sapiens
cttcttttttgcacacagagattatgacccttcaaaagttcctatctttatctactccgctcagtgccacttccgtaaggaactggcttagatacagactaccaaggacctcttcaacaaagagtttagaagatctatgtgatgcaaaaagcaattcttgtttaacataaagaaacttgccaaagaacgcaaagttgttttgtgatttattttctgtgataaacaaatttgtttaggttcttacaccttttcagatttccgttgtttccttccagtatgcatcccaaccattcaccttttcttagtgatgctcctttttgggggacgagtgggggagacggaatctcgctctgtctcccaagctggagtgcagtggcacaatctcactgcagtctacacctcccgggttcaagcacttctcctgcctcagcctccgagtagctgggactacaggtgtgcgccataatgcctggctaatttttgtatttttggtagagacaggagtttcaccatgttggccaggctggtttaacccctgacctcaagtgatccacccacctcggcttccaaaagtgctgggatcacaggcatgagccaccgtgccgggccttcctagtgatgattgatgccaccattattcaagaatttctacatttaaatatcaaccaactggcagtatattttcaatgtagcagacttattttgaaaatctttccatctaggcatttcactcttctttgttctattctttctcttttatttgtgccttctttacatccttttatttcttttttatctgaatgattacatagaaacaatgtttctaggatgctcttattaaattatttttgtttggcttatgatttcatagtggattttatttttatttcacatttctatataagaattatgaatattagggaattcttatgaaaatgtttattgtgtttttaaagtttacatactgttttttaatttttttagtgatgtggctacataaataatacaaaagtcagtgcctttaacacctgacttatcttccccatttcctcaattattctactcagaagcaatgtttccagtttcttacttgtgtttctgcagatactctatgtatatacaaacaaattatatttaagtctccatccctgttgaaattctccttaaaataacaaacagaatacaaaaattagaggaacccctgcctttgtgcttagagaatctctgttggtatggtataaattatacttctctgtactttctacaacaaacatatattacttttataattggggaaagtactgttaacaaaaacatgtttctaagtttcactatttcatgtggctgcttccatttattattgacagttttatcccatatctgatagttctattttctattttctttactctgggtaagagcaggtttggtgggtgaaggataaaaataccactcctcagtcattgacagttacctcccagctgctaaagtttgaagcatctgtcaccaaaaagataggctggctgaagaactgggatgacacagggcaactcgccacctttactaggcaaggtcctgagagccctatagagtatacaggtcaggaacttctttgcaaagcagtatgacacagttaagtatgtacrcactatgttaaatgcatgagtttttttcctaatgaagttttgcatttacacgctgaatttttttaaataaccatctttgtaaatgtttcatatgcttacttgattgttttattcaacataatttgaactttctaatagcaaaacatgattatcacaaacattatgctgtaatcagaacagctcaggtatgtaaaatccttgcatttccaagtggctttttctttggtaattttaacgatacattacacaattttaaattttcaagtagtagaaaagtatatacaatgaaaaataagtcttcctcttactccaaaatccttaattccattc

SEQ ID NO: 724865 - DNA, 1001 bp, Homo sapiens
ttgtatttttagtagagacgggktttcgccatgttggtcaggctagtctcgaactcctgacctcaagtgatccacctgcctcagcctcccaaagtactgggattacaggtgtgagccaccgtgccaggctacatctctgttcttgaacatctagaatttattcccaagttttgaaactttatacaccagtctgaaaaaaaattttgtggagcctctgctttttaggtcatttccttatgaagatttcctagaagtggacttcctgaaataaagaccaatttaccaattgtgccaatttgcattcagtgggaggattttgattgctgaaaaatgaagtaataatccttcaattagttgtttatcctttggggatcatgtatcttttttttttttttttttttttttttggagacagagtcttgctctgtcacccaggctggagtgcactggcacaaactcggctcactgcaaactccgcctcccaggttcaagcaattttcctgcctcagccccctgagtaagtgagatcacaggcacccgccaccatgcctggcttaattttgtattttagtagagatggggtttcaccatgttggccaggctggtctcgaactcctgacctcaggtgatccacccatctcggtctcccaaaatgctgggattacaggcatgagccactgtgccgggccgatcatggatccttttgagacaatgattaaagtatgggtcttctctccagaaaaaaagaaacacaattgcatcaataaacaaaacggcatgaaatttcaagggtttctcagaacctctgaagcctatgtaaaattgacacctctcttgaataagaaatattatcgtatccactgaatagaagttttgttgccatacttcaacaaataagttcacataccaactcttgtattgtcaactaccttttgtacataaaccatcacttactgagcacccacaatgtaccagcaacatgccagatgccagaggcagaa

SEQ ID NO: 724866 - DNA, 1001 bp, Homo sapiens
ttgtatttttagtagagacggggtttcgccatgttggtcaggctagtctcgaactcctgacctcaagtgatccacctgcctcagcctcccaaagtactgggattacaggtgtgagccaccrtgccaggctacatctctgttcttgaacatctagaatttattcccaagttttgaaactttatacaccagtctgaaaaaaaattttgtggagcctctgctttttaggtcatttccttatgaagatttcctagaagtggacttcctgaaataaagaccaatttaccaattgtgccaatttgcattcagtgggaggattttgattgctgaaaaatgaagtaataatccttcaattagttgtttatcctttggggatcatgtatcttttttttttttttttttttttttttggagacagagtcttgctctgtcacccaggctggagtgcactggcacaaactcggctcactgcaaactccgcctcccaggttcaagcaattttcctgcctcagccccctgagtaagtgagatcacaggcacccgccaccatgcctggcttaattttgtattttagtagagatggggtttcaccatgttggccaggctggtctcgaactcctgacctcaggtgatccacccatctcggtctcccaaaatgctgggattacaggcatgagccactgtgccgggccgatcatggatccttttgagacaatgattaaagtatgggtcttctctccagaaaaaaagaaacacaattgcatcaataaacaaaacggcatgaaatttcaagggtttctcagaacctctgaagcctatgtaaaattgacacctctcttgaataagaaatattatcgtatccactgaatagaagttttgttgccatacttcaacaaataagttcacataccaactcttgtattgtcaactaccttttgtacataaaccatcacttactgagcacccacaatgtaccagcaacatgccagatgccagaggcagaa

SEQ ID NO: 724867 - DNA, 660 bp, Homo sapiens
catccagattcttcgctgagattcagcagatccccattctccgcacttggtgtgtttgtgcgctcctgtgcgccagacctgacctgccatacacggcacatggcacactgtgtaagaaaggtgtagaaaggctttttggatccacagccggtgtccatactgtgcaaagagaggcaagagatgtggctttcttcctgtagtttaattgtgaaggagatcacggtccagcctggagtcagacacagatacacccccgccccatctctcaaaaacggaacacccatcgcagagaaacttggacctcagctcccttatgtagacctcttagataagtatgaggaaggtggatatgggagcacttttagatarggcaagggacattccaggtgcctccaccccgtattattgtgggcagggagataggacaggggcaggaagaagagcgaaccttgtaatacactctctcacattgcatctctttaatctcagtcttgcttagacgtcttattttttccatcttgcttgacgatctctgtctgaaacattccttatatcttctctcttcctatctgtctattggtctctcacactgtctctgcctctccttgccacctgccctgtctccatggttaccatagcttccatccacatattttagga

SEQ ID NO: 724868 - DNA, 608 bp, Homo sapiens
tcttctgaaattctgtgaaatttgggtttgtttttttttttattccactatatggttgattttctaaaatttcccatcgtgcctggtgtactgaattctaaagttaatacatttacttctatatatgacagttaagtctgttaattttgttgttaaaaawtttatatctttactgagttttttctgagaaatgattattaaatcttcctctatggttgtaaatttatttcctttttgtttctgtcaactttgctttgcaaaccatcccgagcactgttactcctaggaatctagagtgttgacacagccagcatctttggcagcccctgactcctatttatcccctagcccacacaactgtcaaaagcactgctcagcactaacaaatactcactaacagtactgggttagcaagtactttcgagtaaatgtgatattttgtacagctttctagttatcatcagaggcaggatttatccaatatttaatgttctattaccaaaagcagaagtgctaacttggtggtttttaaaatgttttttagctatggaaccccttgtgaaatgagcttatatgaaagctcagtacatgaaaggtagaaacccaaa

SEQ ID NO: 724869 - DNA, 608 bp, Homo sapiens
tcttctgaaattctgtgaaatttgggtttgtttttttttttattccactatatggttgattttctaaaatttcccatcgtgcctggtgtactgaattctaaagttaatacatttacttctatatatgacagttaagtctgttaattttgttgttaaaaaatttatatctttactgagttttttctgagaaatgattattaaatcttcctctatggttgtaaatttatttcctttttgtttctgtcaactttgctttgcaaaccatcccgagcactgttactcctaggaatctagagtgttgacacagccagcatctttggcagsccctgactcctatttatcccctagcccacacaactgtcaaaagcactgctcagcactaacaaatactcactaacagtactgggttagcaagtactttcgagtaaatgtgatattttgtacagctttctagttatcatcagaggcaggatttatccaatatttaatgttctattaccaaaagcagaagtgctaacttggtggtttttaaaatgttttttagctatggaaccccttgtgaaatgagcttatatgaaagctcagtacatgaaaggtagaaacccaaa

SEQ ID NO: 724870 - DNA, 657 bp, Homo sapiens
  misc_feature 557, 558, 559, 560, 561, 562, 563, 564, 565, 566, 567, 568,569, 570, 571, 572, 573, 574, 575, 576, 577, 578, 579, 580,581, 582, 583, 584, 585, 586, 587, 588, 589, 590, 591, 592,593, 594, 595, 596, 597, 598, 599, 600, 601, 602, 603: n = A,T,C or G
  misc_feature 604, 605, 606, 607, 608, 609, 610, 611, 612, 613, 614, 615,616, 617, 618, 619, 620, 621, 622, 623, 624, 625, 626, 627,628, 629, 630, 631, 632, 633, 634, 635, 636, 637, 638, 639,640, 641, 642, 643, 644, 645, 646, 647, 648, 649, 650: n = A,T,C or G
  misc_feature 651, 652, 653, 654, 655, 656: n = A,T,C or G
gtttatcttttattttccttaaggtatatttaatgaccagaagttcttaatttttatataatcaaaatctattaatcttttatggtccatagctttttgtgacttaagtagtatttttctagcccatggtccaaaaaatactcacctatgctttccactaagatacagaatagtttatttttattaacatgtatgaccttaacccctctagagttgattctttttaatttaatgaaggattcagctttatcttttcttcatctaatccataaagattataattttgaaatctctacatattgaacagtctcttcttattccactggtctaagttattgcctctgtcatatactgaagtttcataaaygcatgggcctatttctagactttttgctctatgctattgttcatgtgtgtgtgttcctttttgaattttatttttatttcttttactttggatcatggcttactgcatccttgactacttgagctcaagcagtgttcacatcttagccaccctcccaggtagctgggactacagatgtgggccataatgnnnnnnnnnnnnnnnnnnnnnnnnnnnnnnnnnnnnnnnnnnnnnnnnnnnnnnnnnnnnnnnnnnnnnnnnnnnnnnnnnnnnnnnnnnnnnnnnnnnna

SEQ ID NO: 724871 - DNA, 1194 bp, Homo sapiens
ggatttagaagtttctttgaccaattactgaagtgcctggcacataattgatgctcagtaagtatttggatgaaggcataaaaatatattcacctgtgacaatgatgatccacactgtcacatgcagtggactcagtcagctaactatatttttaaaatattgtgtaatttaggttctcttaaaattccaaaccagatggagattaaatgagaattggttaaaattaatgcataatgtttcctgaataaaatagctcactcaatctgagaggccttttcctgtttgctggaattctgtttcccttattattttttcagttccaggtaagactgtttcgggggagactttctcctccagatcccacctctataatctggcaggtaagggcaccataaactggaatgatgcttcctatttgtacactgagatttctctagtgcagctcaaccctgccacagggatgatggtttgcttgtaaagcttgggtaatgaatagcccaagatttattttcacatttatttaggacaattttctctctgtcactgtgccaacactatcagcacaactcaatgttgcataaaaaagcacaagctttggagaaaaagaaaaaggtctgggcttaaatgtctgctctgccactcatcaattgcctgaccttgggctggttattggacatatttgagcttcattttcttcacagggttgttgttccagttaaacaagactacatttacacagttcctggcacctaggaggcctgcaatttagttctcttttagttaatttcctgtgggtccattttgctttctatcacctcagctttcttgtttttctatgagcccttcctagttccctcttctctcttgactagtctaaagcaaatcaataaacactagctcaccctgcagttggaacacccctgtaatgctgttacttggtcagcatctccttgtccatcgtgaagggaaggtaagyatttgggattcctagaggtgccctggttgccttcctccagaaccgaattgtcttactttattccatgatggcatcaatagatgcatgcataatttttcagctcatattcctgatttaagttcatatttctcctcaatgtatacagccccatcttaagattttttcccttagggataggttcaaattaccttgcctcaatgtctgtgggtattgaagg

SEQ ID NO: 724872 - DNA, 657 bp, Homo sapiens
aaaaaatgcaaagaaaatgtccaggataatggtaaataggctctaagatgacaattgtacagtaagcctaaaaagcctacaaaacttcctctgcaagggaggaaataattgattgttgatgtatttcactgtactataagaggttttacagagagttttagcactaacacatagaaaaggagccaactcatgcagtgtcttatagactgttagaaaaaattcattctttttctgtttgtaatagaagcactggagaatttcagacacaggaatgaatgatttgatttacaattttcaaagaattctctggctgcaatgttgagaagtgactgagacaggagtagaaataagatagccaaattagtaaggatagcaaaattcaagatcagagactgtctaatatggtagcctttagccccaggtggttattaagcacttgaaatgtggctcatctgaattgaaatgtgctttaactataaaatacacactagattttgaagttagcagaagagaamagaagtaaaatatctcaataattcttaacatttattacatgttgaaatgataatactttagatacactggtttcaatgacatatatgattaaaattaactttacctgtttcttttttttaatgtagcaattataaaatttta

SEQ ID NO: 724873 - DNA, 628 bp, Homo sapiens
gtttctcattcttatagttgcttttattatttttattcttaaagtttttaagtttcttggaatcaccctcccatacatgtrtagtacaatcactacctttctgaaattaaaaaaatttatgcacaaacatctccccaaaattcctacatgacagaacaatacctgcttaaaaaaatttgtcactgtgagagtagctggtcgaaagctcgtcaagttacaagcatcatctccacttgttgtcctttcaagtgatcgtctgccaacaatactagaattcctcctctctgaccaagacccttttcgttctacaaaagaattaaaaaaaaaattcattttcatagaagttaaattttgttttaaagtagctttccaaacacaaggaagaatctactaaattgaaaattacccactcagcatatcaagtatagtaggagaattttgcttttggagagattagtaagaaagtacctaaatcttctggttgtctttttacaacatcacaggtgtaaaaataagtttctaacatgcaaagatctatgggcatgaccaatgatgagccacaaagagcagctatagaggaagtatgcatttactacaaaatgtttaccacaggaaaattttagtcatc

SEQ ID NO: 724874 - DNA, 1028 bp, Homo sapiens
gatcaatttatccttttctataaatggacatggtctctaatgcaaatctgcagagaagagcaatttctaaaatattgaggagtcttcaatttatacttcatctgactttatccagaggtcaatttgagaaaaaatagaggtctggcaactgccaaaatctgactgcatttacttaacaaattgctgctctatggataagtgataattgagggtgaccagaaaaactgactaaatcattaaattcagaatttttcaatgatctccaactaagtacttgttcaatttagggggatgtttatattctgcttaattcatacacactgaaaaagacatggagcaagaaagatgatctgggttctcagattaagctataaagctatgcaaaagaaaacggagcaggaagagaaaaaagtgaaaggagaagaaggagaaggagatggaagggaaggaaggggaggaaggaaggcaagcaggttaggtttaattccatcacatctaataccattttacccccaaattatgcatgtcatcttagctgtatgcttcttttattaaaatatatatatatataaaatataggctggatgcagtggctcactcctgtgtaaccccagcactttggaaggccgagacgggcagatcactttaatccaggagttggagaccactctgggcaatatggggaaaccctgatctacaaaatatacaaaaattagctgagtgtggtggcacacgcctgtggtcccagctactcaggaggctcaggtgaagaggattgcttactctggggaggtgaagattgtagtgagcagaaatcgcrccactgcactccagcttagacaatgcggcaagattctgtctccaaaaaaaaaaaaaaagaaagaaaagaaaagagaaactgggcatcttaaaaatctgaacaactagtactattttggtttatcttttgtattgttgttcagtcagtttctagaaataaaatgcaaaattttacctggacatttgaaatttacaatatgtagaagaaa

SEQ ID NO: 724875 - DNA, 1028 bp, Homo sapiens
gatcaatttatccttttctataaatggacatggtctctaatgcaaatctgcagagaagagcaatttctaaaatattgaggagtcttcaatttatacttcatctgactttatccagaggtcaatttgagaaaaaatagaggtctggcaactgccaaaatctgactgcatttacttaacaaattgctgctctatggataagtgataattgagggtgaccagaaaaactgactaaatcattaaattcagaatttttcaatgatctccaactaagtacttgttcaatttagggggatgtttatattctgcttaattcatacacactgaaaaagacatggagcaagaaagatgatctgggttctcagattaagctataaagctatgcaaaagaaaacggagcaggaagagaaaaaagtgaaaggagaagaaggagaaggagatggaagggaaggaaggggaggaaggaaggcaagcaggttaggtttaattccatcacatctaataccattttacccccaaattatgcatgtcatcttagctgtatgcttcttttattaaaatatatatatatataaaatataggctggatgcagtggctcactcctgtgtaaccccagcactttggaaggccgagacgggcagatcactttaatccaggagttggagaccactctgggcaatatggggaaaccctgatctacaaaatatacaaaaattagctgagtgtggtggcacacgcctgtggtcccagctactcaggaggctcaggtgaagaggattgcttactctggggaggtgaagattgtagtgagcagaaatcgcgccactgcactccagcttagacaaygcggcaagattctgtctccaaaaaaaaaaaaaaagaaagaaaagaaaagagaaactgggcatcttaaaaatctgaacaactagtactattttggtttatcttttgtattgttgttcagtcagtttctagaaataaaatgcaaaattttacctggacatttgaaatttacaatatgtagaagaaa

SEQ ID NO: 724876 - DNA, 842 bp, Homo sapiens
accactaattaaaaatggactcctcctctcttcttccctctttcttagtatattcccttacagtttatcatgacgatctgtgagaataattgtcgtagagggctttggagggaccatttctgcatgtagatggactggggctgtcagtgaaacctggatggttataagctttctattttaatgaatttatacgagtacaaatatatcgcttcagagccaccttttgtttgcctcaagaaatagccaattcatgttacatttttaaaaaggtcttccactattaattaaaaggaatgatttggggtggggtagggtgcgagtgtggcagagattggttgtgaccaccttcagcttattaacttccacttccagcaggttcccaggggggccacctattaaagactgagaggacattgcttttccaaacctcctctctttttactgctcggctcatctcctcagcttgggacctcagcgggcaagggcagagtaggagggagggccccgaggggtggyggacaggctggtagtccaagacggtctggaatggaatagaatatgaagagaaatgcagcccacccactccttcggggagaggagagtgctggtggagaaactcggggcctgaatttttcttgaggaatctaagaagatcctttggcttcaaggcagatggaacctggatggtttaggggaggaatgggacttgacagcggcgctcaaagcttctgggcagggctttgatctaattgacagaagtgaaaatagtagaccttggctcctctctgctcccatctctctcctgctcaaagtccttggtcaggcactgttcgttccttcca

SEQ ID NO: 724877 - DNA, 3867 bp, Homo sapiens
ttaaaggctgcctccgtcctgccgcgcggcctttagagggttggagctggcagaaccgtaactccctctctgagggtgaatacgggccttgattgccagaagggccctcggccggggacgcgggatgatgcggggccgggagatgctttcctggaggctgagaaacctggagggagacccccaaaacttctcagttcgccgaccccttggtcccagagggagaggaggtgggctgtgcctcagcagggtcgcaggcattgcaggggcatcacgttagtcagagcatgttggcatggaggccactcagcccagggaggcaggactcacgccccaaatggaaggcacgcagtcgtgcctgcctagaggcgttaatattgtgccacactttgggggtgaggatctggcaactttatacctttttgagttgtcttttcaagtctgtaggatcagcccacagcttggttcctgtgaagtgagcttgctgtgactgcttcttcagggacaactgtggtcatcttggggagatgccttggggtctgtggcaagaggcaaaaaggagaatgtgtgatactcagaatgcattaaagcgtgctcttacagagcagaagtcagtggctgctcaccagagaggggcctgggggttgagaaaagcaaaaaaatggatgggcttctatcagatttcaacactgatgaactccagttggggggcaggtgccagccagggctattaaataataayaggaggggctgccataggatgacaggatgggggagggtggggaggggaagaggaaggggacgtgctccaagaaggcacccagcaccagtggtctcattagctttttgctatcagtcctcaactacatttgggggacagttcctgaccaggcaatctgtcagcaaaggggtgctgcaatctgtcagcaaagggaagaggggaagtttggggtcttaactggctctctactaagatacccagaggaatgccttcatttgcataataaaccagaggaaaatttgagtctgcccctgagttccaaaggttctgggtaccagggcttgaatccagcagtgtgactattcgtgcctcagttttttcatcctgaaatttggaaagtcgttctttccattgtgatattctctagctagaacccagagaggataagaaactgcctcatggtagcctcccaggggagaaggttctagtaggagatggcctcagagcaaggacttccagcctcccatcctctggtggtctgggaggatcacaggatgtcaaggccttgctcctgtggccttgattcagattagctgtggttcaagactgcctgtgtggcacatgtggatacgtgcaaggtcgctgaggcagtgctgtgcccttaaagtttatctgcttttccaacccaaaagcagactccctaaagggtagggaatgcctcattactcactgggccctcctgcagctcctggcatggaactgacacatagttggcactggcaatgcacatacttactagatgttaaagaagtccagaaccagaaccagaggcacataaataggatctgcatcagcagtgggttagagaaagggtgggaaactaagtgaaatcttagaatgcatccaaggaagtagatcaatttgagctttaactactggagaatggcccctgagaaggccccatttgttcacacgtatagctaattgtatatacctttgaggaatgcaagagccggcaggaaattcccctcctcctgaaccacagagtatttctgggtgggcatcgattgtctatgggccatggcgtaagacccccaccccccgaccccccggcaacaaaagtatcttcttgctccctaaaaaaaaatgtatggagactacatatccttgcctgtctagtcagccttggttaatttcataaagtaaaggggccctgagcctgcctgcccggccgagtttagagttgaaagggaaacgtctttgaggtggaaaccaattgcatggatcaaatggtcctgatggtgcatagagccttaggtttggaaagaagtgaagggccttgccgccttgctggggacttgagcctctcagccattggtgctctctggagctgcccgcccaccaggggcaatggcccttgttggcctccaggccccctccttccctggatgctgtgctgttctcctcttggtcttgtttcattggctgtggcagaaactttggtcccaacaaggcccaggaaacagaccctagcaaagacctgaggcaactgggtgccccaggaccacaggaactcatgtgtgctgtgagggctttaagagctttgaagtggggagtctctgacgtggatcagggctatgggtgctgatgctgtcaataagccacacgcaaaggttgggtcaatatgactgcttctcagaccctcttcggaggcagactctccctcacctgcctggccaaattccctctgggcagaaggaccctagggagcttttcctggcccatgtggcagaggcccaggctcccactcagacaatgaccccttgctttgcccactgaaagaagtccccagaagatgagctctgttacaagcagaacagaaaagaaacagtgggattagggctccaaaaaccctccagaactatcagagaattctggacagtggtccctgatggcatctgtgttaggggctgggaacaagaacccctctcacaggcacctctacaggcggggttaagactgtcaaatactggccgaggccaagggagactctgtcatgtctgaggccataggcatgttttcttctggacttcagcgagaggcagagcccccagccccatgcagtcacctcagctctgcctgagaagaagcgagggaagcccattcctccccatcagttggcctctggggaggcaaagtcaagtatgtgatggttccttacctgtgcagggaaaatggaacttgggagtcagctgtctgaaggcatcacgccttgtatgacccttgcaagcccaagctacctacctgttcctgtacagaaaccctccctggcctcatcctgtgggtggcaaacccacatattcagttattgctgttttcttccttccttggatacttgtctccaataaatatttacagtgggacccacagatgaaccttagccccaaacataagatagctatgtcaaaaggggtcctgggacagtgataccccaggggggtcaggcaaaaacagaagcaagcctcttggccacctcctcccttagccttctgcgtaaagatggacttgcaggaggagaacacaccctgcaactacagaacctcatggtacggaaccaccaggggatcctcgcccacggccctgggtggaattgatgttgggaagatagattagtagtgaggcgcatcaccccactgtgactcaccttcttctgcccccacgcctgtccttcagaccatctccctgctgcggcagagccactgagttcagggagcaactgtgggcagatgaaattgggctgtggtgggtgtgggaatccctgtggacttccaaaagcacttcggtttctgccctgcttggcgtggttccagaacccagggtggtggcgaggtgggagctggcagagcgcagggaagaagttccaggatcagagctcacctttctgttcttcaccctgatctgttcttccctgatcagtcctcccagactgcactggagagtgaggcctttgcctgttcggatttgctgcctcgtgtgtttcaagctgcccacacttcacaggctgcttcgaagccctccctacccaccccgtgagaaacgcccctggggagaggcagagatgggtcttttagtcttgcagcccttgtttg

SEQ ID NO: 724878 - DNA, 3867 bp, Homo sapiens
ttaaaggctgcctccgtcctgccgcgcggcctttagagggttggagctggcagaaccgtaactccctctctgagggtgaatacgggccttgattgccagaagggccctcggccggggacgcgggatgatgcggggccgggagatgctttcctggaggctgagaaacctggagggagacccccaaaacttctcagttcgccgaccccttggtcccagagggagaggaggtgggctgtgcctcagcagggtcgcaggcattgcaggggcatcacgttagtcagagcatgttggcatggaggccactcagcccagggaggcaggactcacgccccaaatggaaggcacgcagtcgtgcctgcctagaggcgttaatattgtgccacactttgggggtgaggatctggcaactttatacctttttgagttgtcttttcaagtctgtaggatcagcccacagcttggttcctgtgaagtgagcttgctgtgactgcttcttcagggacaactgtggtcatcttggggagatgccttggggtctgtggcaagaggcaaaaaggagaatgtgtgatactcagaatgcattaaagcgtgctcttacagagcagaagtcagtggctgctcaccagagaggggcctgggggttgagaaaagcaaaaaaatggatgggcttctatcagatttcaacactgatgaactccagttggggggcaggtgccagccagggctattaaataataacaggaggggctgccataggatgacaggatgggrgagggtggggaggggaagaggaaggggacgtgctccaagaaggcacccagcaccagtggtctcattagctttttgctatcagtcctcaactacatttgggggacagttcctgaccaggcaatctgtcagcaaaggggtgctgcaatctgtcagcaaagggaagaggggaagtttggggtcttaactggctctctactaagatacccagaggaatgccttcatttgcataataaaccagaggaaaatttgagtctgcccctgagttccaaaggttctgggtaccagggcttgaatccagcagtgtgactattcgtgcctcagttttttcatcctgaaatttggaaagtcgttctttccattgtgatattctctagctagaacccagagaggataagaaactgcctcatggtagcctcccaggggagaaggttctagtaggagatggcctcagagcaaggacttccagcctcccatcctctggtggtctgggaggatcacaggatgtcaaggccttgctcctgtggccttgattcagattagctgtggttcaagactgcctgtgtggcacatgtggatacgtgcaaggtcgctgaggcagtgctgtgcccttaaagtttatctgcttttccaacccaaaagcagactccctaaagggtagggaatgcctcattactcactgggccctcctgcagctcctggcatggaactgacacatagttggcactggcaatgcacatacttactagatgttaaagaagtccagaaccagaaccagaggcacataaataggatctgcatcagcagtgggttagagaaagggtgggaaactaagtgaaatcttagaatgcatccaaggaagtagatcaatttgagctttaactactggagaatggcccctgagaaggccccatttgttcacacgtatagctaattgtatatacctttgaggaatgcaagagccggcaggaaattcccctcctcctgaaccacagagtatttctgggtgggcatcgattgtctatgggccatggcgtaagacccccaccccccgaccccccggcaacaaaagtatcttcttgctccctaaaaaaaaatgtatggagactacatatccttgcctgtctagtcagccttggttaatttcataaagtaaaggggccctgagcctgcctgcccggccgagtttagagttgaaagggaaacgtctttgaggtggaaaccaattgcatggatcaaatggtcctgatggtgcatagagccttaggtttggaaagaagtgaagggccttgccgccttgctggggacttgagcctctcagccattggtgctctctggagctgcccgcccaccaggggcaatggcccttgttggcctccaggccccctccttccctggatgctgtgctgttctcctcttggtcttgtttcattggctgtggcagaaactttggtcccaacaaggcccaggaaacagaccctagcaaagacctgaggcaactgggtgccccaggaccacaggaactcatgtgtgctgtgagggctttaagagctttgaagtggggagtctctgacgtggatcagggctatgggtgctgatgctgtcaataagccacacgcaaaggttgggtcaatatgactgcttctcagaccctcttcggaggcagactctccctcacctgcctggccaaattccctctgggcagaaggaccctagggagcttttcctggcccatgtggcagaggcccaggctcccactcagacaatgaccccttgctttgcccactgaaagaagtccccagaagatgagctctgttacaagcagaacagaaaagaaacagtgggattagggctccaaaaaccctccagaactatcagagaattctggacagtggtccctgatggcatctgtgttaggggctgggaacaagaacccctctcacaggcacctctacaggcggggttaagactgtcaaatactggccgaggccaagggagactctgtcatgtctgaggccataggcatgttttcttctggacttcagcgagaggcagagcccccagccccatgcagtcacctcagctctgcctgagaagaagcgagggaagcccattcctccccatcagttggcctctggggaggcaaagtcaagtatgtgatggttccttacctgtgcagggaaaatggaacttgggagtcagctgtctgaaggcatcacgccttgtatgacccttgcaagcccaagctacctacctgttcctgtacagaaaccctccctggcctcatcctgtgggtggcaaacccacatattcagttattgctgttttcttccttccttggatacttgtctccaataaatatttacagtgggacccacagatgaaccttagccccaaacataagatagctatgtcaaaaggggtcctgggacagtgataccccaggggggtcaggcaaaaacagaagcaagcctcttggccacctcctcccttagccttctgcgtaaagatggacttgcaggaggagaacacaccctgcaactacagaacctcatggtacggaaccaccaggggatcctcgcccacggccctgggtggaattgatgttgggaagatagattagtagtgaggcgcatcaccccactgtgactcaccttcttctgcccccacgcctgtccttcagaccatctccctgctgcggcagagccactgagttcagggagcaactgtgggcagatgaaattgggctgtggtgggtgtgggaatccctgtggacttccaaaagcacttcggtttctgccctgcttggcgtggttccagaacccagggtggtggcgaggtgggagctggcagagcgcagggaagaagttccaggatcagagctcacctttctgttcttcaccctgatctgttcttccctgatcagtcctcccagactgcactggagagtgaggcctttgcctgttcggatttgctgcctcgtgtgtttcaagctgcccacacttcacaggctgcttcgaagccctccctacccaccccgtgagaaacgcccctggggagaggcagagatgggtcttttagtcttgcagcccttgtttg

SEQ ID NO: 724879 - DNA, 582 bp, Homo sapiens
tttctccttccctggagtttatgggtcctactcttcacatgggagatgctttatatgggagaacacaatttggtgtggaggttctcttttttggaaatgtagcaagcaggaaaggtttctggatctttgtgtgcacatgtgtgtataagcacacctatgcatgtgtgcttgcatatgcttctgtgcctgtaatatgtattaatgtctaggggtgagattctaattaatataaagaaattaatttgcctgaagtatttgcactggtagatgggtgtacattttgctctctggaaaccagtgcattccttaataaaaatcttagatacagaccagacactttgctgggttctgcctaccagtcacactcagtactgggtccttgcttgtcggtaattccctaaagacattggagaaggaatctatgttctctctctgtctctctctcagtcctccccccrccaccgtgtgtgtgtgtgtgtgtgtgtgtgtgtgtgtgtgtgtgtgtgtgtgtgtgtgtgtgtctttcgggaatagtgattgaggcattggatcttttctcttcagggccatgtttccagatag

SEQ ID NO: 724880 - DNA, 593 bp, Homo sapiens
gacagcaattattaaataataatttaatttaaaatattctcaatactctcaaaattacactcaataaagcaagtccttgctgactgtcagaactgatcagaatggaacaagctgctctgggaagtagaggggtgcctgtctttgaagatactgaagcagagtttgcataactgattgacagagatgcttataggagggattcagaatccaacgggtggttggaaagcgttattgttgtccattcttaactaggaaatgctatgagtttcagaaaagtaaaaatgtttatggaacattagcaaytgtcttctggatacctaggtgaattggacatctttcagtcaaaaattagtcatcgctgtggccacagacacatgttagtcccatataggcaccaagatgatggataacttatggtagggattgcctgtttaggtttttccagctctgagttcattggacagtactccaaaacacactgagaaatgccagtttcctgttttatcccagagctactcccaaagtctgaattttaattctgttctttcttccaaagcacataaaaatggtttctctccatcaaattgtcctca

SEQ ID NO: 724881 - DNA, 1513 bp, Homo sapiens
tgttgattttgtatttattcttttgggtttttcctaacttaagttagatgcttggttcattaaatttcagccttcttgcctaatgtcacaggcatttcagtgatgtttgagctgcatcccacaggtttcgataggtagcgtttctgttatttacttacgagtatttctcaattcccaatattgtttctgagagttatttagaagtataaattcctagtgcctacacacatgggttcttccagttacctttagtctattgatttctaatttaattgctttgtagtaaacaaatatatatttgataccagtctcttaaaatttgctgagacttgctttctgaccccatgtcatcagttctcctacgtattctgcatgagtctgaaagaatgtgtattgtgaagctgttgcrtataatgtgttgtaaatcttgatgagatcaaacttcccattatattgtttaagtcttctgtattctcaggcttgataaatcagttgccaagaaaggtgtgcgaaaggccaggcttcctagcactttgggaggccgaggcaggcggattgcctgagctcaggagtttgagaccagcctgggcaacatgtggaaccccatctctactaaaatacaaaaaatttgccgggtatggtgacgtgagcctgtggtcccagctacttgagaggctaaggcaagagaatcgcttgaacccgggaggtggaggttgtagtgagctgagatcgcgccactgcaatccagcctggttacagagtaagactcagtctcaaaaaaaaaaaaaatccagtgtgacaatgtttttattttaactggatcattttccattaaatgtaattatgcaaatatttacatttttatcataatttgtgctttttatttgtcctcttctgttttgtcttttgtccttgccttcttttggaatgatttttttttttaatctttcatttatcccctcctctaatttagatggtaaatgttctgggtttttttttagtggtttctctagaaattttaacatgaatgcttatacaattttaaagttggtcaacattttaacttcctccaaaactcaaatcccctccctcccatgtgtgtgctgtcactgtggtgtgtttcagctctgccttgtagtagaaaacaagactgtttgatatactgtttgtttacatttactcgcatttttagtccaaatctttcctccctgaaatagagcctttttaaaactgtgctctattggtagccgactcgctctgtttttatttatatagaaatttataacattttcctttggtctttttttccacagactttttttaatctgaggtacagattttcagcagttataatcttcagcagtttttcccaaatatatgtatgtatacatgtacatatgtgtgcgtgaatgtgtgtatttttcagcctgtcttggtttcagatgaaacagaactcctcattttctatactattttgccattgttcttttttttttttttttttttttttttt

SEQ ID NO: 724882 - DNA, 1513 bp, Homo sapiens
tgttgattttgtatttattcttttgggtttttcctaacttaagttagatgcttggttcattaaatttcagccttcttgcctaatgtcacaggcatttcagtgatgtttgagctgcatcccacaggtttcgataggtagcgtttctgttatttacttacgagtatttctcaattcccaatattgtttctgagagttatttagaagtataaattcctagtgcctacacacatgggttcttccagttacctttagtctattgatttctaatttaattgctttgtagtaaacaaatatatatttgataccagtctcttaaaatttgctgagacttgctttctgaccccatgtcatcagttctcctacgtattctgcatgagtctgaaagaatgtgtattgtgaagctgttgcgtataatgtgttgtaaatcttgatgagatcaaacttcccattatattgtttaagtcttctgtattctcakgcttgataaatcagttgccaagaaaggtgtgcgaaaggccaggcttcctagcactttgggaggccgaggcaggcggattgcctgagctcaggagtttgagaccagcctgggcaacatgtggaaccccatctctactaaaatacaaaaaatttgccgggtatggtgacgtgagcctgtggtcccagctacttgagaggctaaggcaagagaatcgcttgaacccgggaggtggaggttgtagtgagctgagatcgcgccactgcaatccagcctggttacagagtaagactcagtctcaaaaaaaaaaaaaatccagtgtgacaatgtttttattttaactggatcattttccattaaatgtaattatgcaaatatttacatttttatcataatttgtgctttttatttgtcctcttctgttttgtcttttgtccttgccttcttttggaatgatttttttttttaatctttcatttatcccctcctctaatttagatggtaaatgttctgggtttttttttagtggtttctctagaaattttaacatgaatgcttatacaattttaaagttggtcaacattttaacttcctccaaaactcaaatcccctccctcccatgtgtgtgctgtcactgtggtgtgtttcagctctgccttgtagtagaaaacaagactgtttgatatactgtttgtttacatttactcgcatttttagtccaaatctttcctccctgaaatagagcctttttaaaactgtgctctattggtagccgactcgctctgtttttatttatatagaaatttataacattttcctttggtctttttttccacagactttttttaatctgaggtacagattttcagcagttataatcttcagcagtttttcccaaatatatgtatgtatacatgtacatatgtgtgcgtgaatgtgtgtatttttcagcctgtcttggtttcagatgaaacagaactcctcattttctatactattttgccattgttcttttttttttttttttttttttttttt

SEQ ID NO: 724883 - DNA, 525 bp, Homo sapiens
gaaactccatctcaaaaaaaagaatatttttatagtacatatagatttaggttgagggttttttttttttctcaatgggattgtttccattgttgctgtttcaagaagtcagtctaattatcayttctttgaaaataatctgtcttttctttgagtgcatttgattgattgagacagggtctttgccctgccccctaggctggagtccagtggcatgatcacagctcactgccacctccaactcctggcctcaagtgatcctcccactgcagcctccccagcagctaggactataggcatgtcctgccgtgcctggctattttttaaatttcttatagagataaggtctcactatgttgcccaggctggtcttgaactcccaacctcaagaaatgctcccactcagcctcccaaagcactgggattacaggtatgagccactgcacccagccactttgaatatttttacagtatctttaagtttttcaaaaggtaatacattcatatggttaaaaaagaaaaggt

SEQ ID NO: 724884 - DNA, 675 bp, Homo sapiens
tgagccaccactcccagctaattttttaaaaaatttttgtagagacaggggtctcactttgtatcctggggtggcctcaaacaatcctcccacctcagcctcccaagggtgctggattacaggcatgagccactgtccactgtgcctggtctataatttttttttttaagacagagttttgctctgtcacccaggctggagtgcagtggtgcaatctcagctcactgaaacctctgcctcccaggttcaagcgattctcctgcctcagcctcccgagtagctgggattacaggctcccgccaccacgcccrgctaatttttgtatttttactagagaccgggtttcaccatgttggccaggctgggctcgaactcctgaccacaggtgatctgcctgcctcggcctcccaaagtgctaggattacaggcgtgagccaccacacccaccgtggcccataattcctaagtaatcaaaaatctaaaaagcaccccctaggatctgcttctgttgtttctctcattaagctttgctcttgtttcatgacttctgtgcttacagagaaggaacaggaataactaatcattatcaaataacctctgaatgtatagggtaccacaacagaaggaaattggtcacataagccactacactccccgcccttgtaatcaatcaca

SEQ ID NO: 724885 - DNA, 675 bp, Homo sapiens
tgagccaccactcccagctaattttttaaaaaatttttgtagagacaggggtctcactttgtatcctggggtggcctcaaacaatcctcccacctcagcctcccaagggtgctggattacaggcatgagccactgtccactgtgcctggtctataatttttttttttaagacagagttttgctctgtcacccaggctggagtgcagtggtgcaatctcagctcactgaaacctctgcctcccaggttcaagcgattctcctgcctcagcctcccgagtagctgggattacaggctcccgccaccacgcccggctaatttttgtatttttastagagaccgggtttcaccatgttggccaggctgggctcgaactcctgaccacaggtgatctgcctgcctcggcctcccaaagtgctaggattacaggcgtgagccaccacacccaccgtggcccataattcctaagtaatcaaaaatctaaaaagcaccccctaggatctgcttctgttgtttctctcattaagctttgctcttgtttcatgacttctgtgcttacagagaaggaacaggaataactaatcattatcaaataacctctgaatgtatagggtaccacaacagaaggaaattggtcacataagccactacactccccgcccttgtaatcaatcaca

SEQ ID NO: 724886 - DNA, 605 bp, Homo sapiens
ctcctaaccaaaggtgctccgcctgcctcagccttccaaactgtgggattacaggcctgagccaccatgccggctggtcacttgtatctttggattacaggtgayggtttggtaacgactgctggtataccagacataagcttttctaaacactaacatcatatctttgaaattaaggttagaatttctttttaaaatattttaattaaacattttttgcttacctcacagtaaacaaagatcaaatgttaacatttctatcagtgttaccccatgttactcattatgaacctaacccggagcaaagggcatgcagcagaatgttctgcatctctttacctaaaagattcaaagttttaagaagtaaagacaggactgacccaagtataaaactctgagaaatcacaagaaaaagtcagcaaaatataccgggggagagcccaggccacaaggacaaaattctacaaggaccatgaaggggggactaagaatattttatttaaaaaaaaaaagtgcctggaagccaggagaaatgcacatcagataggttatgcccaggagctgatgggagggtacagcagctgtcacagatactgcgggaccca

SEQ ID NO: 724887 - DNA, 800 bp, Homo sapiens
ttgaggtgttgagtttatttgatttctaattcaatggaaggcatttaagctgtagatcaaatacgttttgtctgcttgtttatctatctcctacaatggcgctattccaatagaaatgtacctgtctatttgtctcactctacttttaatgaagcaggcagctcattaatggtgagtacgtcatcttacttatttttctaactgttgaaaccttgtaggccctcaaaaaatgttgatggatgaataaacaattcaacaatgagcaaaaggaacacctgtctttggtgagatgctttctctgtacacagaagaggttagaaacaaaagacttggacaaagtgttcttcagtatgatgtcattcatctcttctgatttctctctcacattcactggcatacagagtttttgaccacttgaattatgaccaaaactatttctgcttctaaatgccagagggtgatcactatcattttacttttcttaaatttctgagaaaagtcctgaggcaaataagaatcatacacaggcaagaaaagtcagagtttattatttgattcgggaaagtgtaagctgacatttaatcaactagcattatccataaaagaggtctacacgaaggttcacgggaggaacaggtgcaaggaaggtcgagctgaagaacacattcaaatacaaggcagtgtggcttaaacttaaygtggagattggtggttaagacagaatcagccccatttggtgtgattattctcaattctgagtctcaattaacattttgctcacctgagaattgactataata

SEQ ID NO: 724888 - DNA, 1089 bp, Homo sapiens
gaacaaatggaaataaaacaaagcaagcacatcaatttcatacctaagtgggaatattcaggtaacatttatttttattttattttattttattttgttttgttttttgagatggagtctcactcttgtcacccaggctggagtgcastggcacaatctcggctcactgcaacctccgcctccagggctcaagtgattctcctgcctcagcctcccaagtagctgggattacaggcacgcaccaccacacctggctaatttttgtattttaagcagagacggggtttcaccatgttggccaggctggtcttggactcctgacctcaggtgatccacccgcctcggcctcccaaagtactaggattacaggagtgagctacttactgtgcctggccttattttttattttttgtttttgttattgtttttattctcactgtagcctcagcctccctggctcaagatctttctgcctcagcctcctgagtaactgggacaacaggtgcatgccaccatgcctagctaatttttaaatttttaatagagataggatctcactgtgttgcccagggtggtcttgaattcctggcctcaggtaatcctcctgcatcagcttcccaaagtactggcattacaggcgtgaaccacagaacctggcctcaggtgacatttaaacttaaatttcaaccaacgaaatggtgggggatggggatggggatggggtgggacccagacaatcaacagtgtgtatggaatagatctttaaatgctcactctgaaagctcaaataacaaagtaaacttagcaatcaacctgctctttccatagagatactgaacacacaaaccaaaggagcatcacatcccctgaattctgattgccatactctcgccatatgcacacacacgcacgcacacacacacgcatgcgcacagacgcactttccatacattaggtcagatgtcgttagcttatcaaggaatgaaacaccttctgcttgtttcccttacattggaactggacctgagctattccttacacattaaaacaaacaaacaaaaactttctacttgccacacacgtggacgt

SEQ ID NO: 724889 - DNA, 1089 bp, Homo sapiens
gaacaaatggaaataaaacaaagcaagcacatcaatttcatacctaagtgggaatattcaggtaacatttatttttattttattttattttattttgttttgttttttgagatggagtctcactcttgtcacccaggctggagtgcagtggcacaatctcggctcactgcaacctccgcctccagggctcaagtgattctcctgcctcagcctcccaagtagctgggattacaggcacgcaccaccacacctggctaatttttgtattttaagcagagacggggtttcaccatgttggccaggctggtcttggactcctgacctcaggtgatccacccgcctcggcctcccaaagtactaggattacaggmgtgagctacttactgtgcctggccttattttttattttttgtttttgttattgtttttattctcactgtagcctcagcctccctggctcaagatctttctgcctcagcctcctgagtaactgggacaacaggtgcatgccaccatgcctagctaatttttaaatttttaatagagataggatctcactgtgttgcccagggtggtcttgaattcctggcctcaggtaatcctcctgcatcagcttcccaaagtactggcattacaggcgtgaaccacagaacctggcctcaggtgacatttaaacttaaatttcaaccaacgaaatggtgggggatggggatggggatggggtgggacccagacaatcaacagtgtgtatggaatagatctttaaatgctcactctgaaagctcaaataacaaagtaaacttagcaatcaacctgctctttccatagagatactgaacacacaaaccaaaggagcatcacatcccctgaattctgattgccatactctcgccatatgcacacacacgcacgcacacacacacgcatgcgcacagacgcactttccatacattaggtcagatgtcgttagcttatcaaggaatgaaacaccttctgcttgtttcccttacattggaactggacctgagctattccttacacattaaaacaaacaaacaaaaactttctacttgccacacacgtggacgt

SEQ ID NO: 724890 - DNA, 904 bp, Homo sapiens
catgaagcaatttttatataatagatataattttctttcaaataaattagagaaaaataytatgcatatttgtaaagactcagaagggatcggacatttagaaaagagaatcaaaatgtttataaatgttttcataagacattataattttatatatcctaaaatattaattattagatgctgaagaggacatatttcaaaggacatcaaaatagtcaatgaaaaaccaagagcaaaattcactcagcatcctatgtatactgtctatttttgaaaatagattcataaaatatgttctttagaaataattgccagtaaatttaaattatatttcagtaaaagaacaattcctggatatggacattaaggtttagtttctgatattaggtctttgcaaacaaacccattttgtttataaaacaattagcttttgaatgcatagattttgttaaagtagcaataaagaccccactttcaaaaacattcatttatgagtcccataacaacataggaatgacccttctcaccccactcaaatcacccagcttgcagaaggggacagaaacacattcagcagtgtgccacctggcatacaaatagagaatttaagcatggaagggaattacatcaacactgcttaaacggtgagaaaaaaaatctgcaaaggagcagcaggagtagaaaaatacaactagagggtgtccttttcacttactgtgatagttcacagagctacagccggagcaaagccctttccagtactggaggcggccctgggtcagtggaatacagacccagtctctacgcatggcccctcaggagcagctgtggggccaacatatttctatagaaacaactgctcaaactgaattccaatctgctttcaaaaatgatttaaaaacaa

SEQ ID NO: 724891 - DNA, 628 bp, Homo sapiens
caacttgctaataatattccacccttccatccagttattctttagagctagaaccaagaccctcggggtagaatttcttctcttctgacatataaatttgcatttttaaaaagcagatataaattcaggatctccacttcccaagtataaaactatggagacctagtataaattctcaaattatataaaaaaagaaatattaacacgaccagacttcctgatatcttgagaaagctggatttcctaaggaaaaatactttcggagctaaaaccaaccttagtaatcaccttgtgtagcttatgtgctaaaatcttcacccactttctgggatcttagaaaagtcattgaaaaaggaaccccggtttaaaggagtagcttttaactgacacagcacacttggagggattgatgagttctgtaatgtgaactgtttgcttagggattgccttgttgtttcattaccaaaggacttggattcagatcagaattggaacacagaaaataccagaattgttccattatggggagtcaagcaatcattgaagggggcgtgcaaaggtaaactttagttcacagagtctctgcaaataaatcactytcagctgtcataccactagttagcatggg

SEQ ID NO: 724892 - DNA, 593 bp, Homo sapiens
ttgcctaataaattaagtagtattttgatacttwttacttttataagatgactgtatgttttctttcttcaggaagtaggcgttgatcccagatttggcatatttttaccaatgaaaaaattgatatgtttacactacaatatttcactgctataacattctgatttgttgttgttgcttggatacaagtagaaagaaaactggtggtgggtcacacatatctgcagttacttgtaatgacaatagtagatgtttaaataaaaggtaaacagaattatagttgaactgacctcaagaatcaaaatactaatgacaaagtaataaaacaagaaaataaagccaaagggaaagacagtgaagcttaaaggacaaaacttttagagtcagtattttactatattctgtatttcattgatgacttttattaagcaaagggaggaagtccatgcatagtgttaggcacatttgctttcaaattacctggtatcccctgggttagattgccattttcatttctttgcaaatagaaagtaatgttttccgataatactgacagagaaaatcatttaatctgtacatttggggtcaattct

SEQ ID NO: 724893 - DNA, 593 bp, Homo sapiens
ttgcctaataaattaagtagtattttgatactttytacttttataagatgactgtatgttttctttcttcaggaagtaggcgttgatcccagatttggcatatttttaccaatgaaaaaattgatatgtttacactacaatatttcactgctataacattctgatttgttgttgttgcttggatacaagtagaaagaaaactggtggtgggtcacacatatctgcagttacttgtaatgacaatagtagatgtttaaataaaaggtaaacagaattatagttgaactgacctcaagaatcaaaatactaatgacaaagtaataaaacaagaaaataaagccaaagggaaagacagtgaagcttaaaggacaaaacttttagagtcagtattttactatattctgtatttcattgatgacttttattaagcaaagggaggaagtccatgcatagtgttaggcacatttgctttcaaattacctggtatcccctgggttagattgccattttcatttctttgcaaatagaaagtaatgttttccgataatactgacagagaaaatcatttaatctgtacatttggggtcaattct

SEQ ID NO: 724894 - DNA, 593 bp, Homo sapiens
ttgcctaataaattaagtagtattttgatactttttacttttataagatgactgtatgttttctttcttcaggaagtaggcgttgatcccagatttggcatatttttaccaatgaaaaaattgatatgtttacactacaatatttcactgctataacattctgatttgttgttgttgcttggatacaagtagaaagaaaactggtggtgggtcacacatatctgcagttacttgtaatgacaatagtagatgtttaaataaaaggtaaacagaattatagttgaactgacctcargaatcaaaatactaatgacaaagtaataaaacaagaaaataaagccaaagggaaagacagtgaagcttaaaggacaaaacttttagagtcagtattttactatattctgtatttcattgatgacttttattaagcaaagggaggaagtccatgcatagtgttaggcacatttgctttcaaattacctggtatcccctgggttagattgccattttcatttctttgcaaatagaaagtaatgttttccgataatactgacagagaaaatcatttaatctgtacatttggggtcaattct

SEQ ID NO: 724895 - DNA, 593 bp, Homo sapiens
ttgcctaataaattaagtagtattttgatactttttacttttataagatgactgtatgttttctttcttcaggaagtaggcgttgatcccagatttggcatatttttaccaatgaaaaaattgatatgtttacactacaatatttcactgctataacattctgatttgttgttgttgcttggatacaagtagaaagaaaactggtggtgggtcacacatatctgcagttacttgtaatgacaatagtagatgtttaaataaaaggtaaacagaattatagttgaactgacctcaagaatcaaaatactaatgacaaagtaataaaacaagaaaataaagccaaagggaaagacagtgaagcttaaaggacaaaacttttagagtcagtattttactrtattctgtatttcattgatgacttttattaagcaaagggaggaagtccatgcatagtgttaggcacatttgctttcaaattacctggtatcccctgggttagattgccattttcatttctttgcaaatagaaagtaatgttttccgataatactgacagagaaaatcatttaatctgtacatttggggtcaattct

SEQ ID NO: 724896 - DNA, 593 bp, Homo sapiens
ttgcctaataaattaagtagtattttgatactttttacttttataagatgactgtatgttttctttcttcaggaagtaggcgttgatcccagatttggcatatttttaccaatgaaaaaattgatatgtttacactacaatatttcactgctataacattctgatttgttgttgttgcttggatacaagtagaaagaaaactggtggtgggtcacacatatctgcagttacttgtaatgacaatagtagatgtttaaataaaaggtaaacagaattatagttgaactgacctcaagaatcaaaatactaatgacaaagtaataaaacaagaaaataaagccaaagggaaagacagtgaagcttaaaggacaaaacttttagagtcagtattttactatattctgtatttcattgatgacttttattaagcaaagggaggaagtccatgcatagtgttaggcacatttgctttcraattacctggtatcccctgggttagattgccattttcatttctttgcaaatagaaagtaatgttttccgataatactgacagagaaaatcatttaatctgtacatttggggtcaattct

SEQ ID NO: 724897 - DNA, 612 bp, Homo sapiens
caaacctgcctgattgcgcaaatgctcactttgagaaggtcccattataactgctgcagaaagagaacacagaactctaagaaaagcaaagctgcctccttctccctagagagaaggacctgaggcactcctcggtgctactgcaggtagcaaagagtctggcattgtaattgcagtattaaagtgggaatgcacatgggttcttaattgcttgtaaatctctgcttcatttaagccttgcagagtaagtgacttgcagggtaagtgacgacactttccaatcaaactggcaaatattttatctttytgtggcttacagtcaacagaaagttgtcattgtgtcttcgatatttcagctgcatcagtgttcagaaatgggacctaggagaatcaaggcccttcacttgtgcattaattcctctgcctgcccaatagcagaaataacactgcactctctagtgcctactgcataaattagctaatgtctataaagaataatgaagattaaaatggtgcatgtagaattgtcatgaagaatgaacacactagccatgcagtacttccttactccaagcatatgtattaaagcttatgactatgaaacctgtgaca

SEQ ID NO: 724898 - DNA, 732 bp, Homo sapiens
tacccacgactgcctgagacatgtcagatcttcaagaagtggctagctctactctgagaagctttctgtttctgcttgctacccaggcaaccaaaatgtcagtgtgcacatgtgcatgcgtgcatataaatatatacacatctctcaccrtcttattcttcacgtgctacctgtctgcgtatatgtgtttatatacatgtatgcgtatgtctgagtcacatgtacatttagaggtgtttttgctatttgaatttttgcttctttttatttttgaagaccaatggaaaagtgtttgaagacagcagattacattaaaaaatcagtttcaccgactggctctcagatactgggtacatgtatgcacacacacacctcttctaccccctctgattaatagatgcttcctcttaagtcctttaaaagaggcattcttaggcacatttctctgccaaaatgtagtggattcctctttgaagctgtgaccctgttgattttgttcactgccaaatttcacatcatgaaaaaaatagcttaatattggagtgattaactttcatggagagctgacagaattgagttcttcaaaacctaaactctgccaattttgatgtccctaatttattccaacaaccatttaagtctaaatgcttccattttaatcacattaacagtatattacaaagagactgaacacccagaggactccagttgcaaaatgaatttggctcttcc

SEQ ID NO: 724899 - DNA, 1055 bp, Homo sapiens
ataggaaaagctatccacaaatagttgctatcatgtagtttttcagtgtaaagaaaatttaaaaaatcaataaaaacaaaatgattactcagaccttgttacatagatatcgctgttagacgtcctccttttctaagataacctattgtgtggttttcagagccttttataagtcagccactagagagcaaacttcttctttttatcaggccgtagttttattttttwtaaaaaatacacaccacgtatatattgggaatctcacaatgacacattatctcagactgtaaaatctgataatatagcttctagatgcctggggcagtgggtgtaggggatgaagtgggaaattttaaggccgtttatattaaaaacacaagaaagaacaagataagatgttgtaatgttgaactaccttcctggagtgaaaatgaaaccttctgctaatggagcataaagtcttacgtttcatgccatgtaataaaatatgataggcattgtttggtctgacaggtatcttgggcctttttccagactagggtctccagggagctcaaagacatgttactgtttccaggtgaaatgtagataaattacattgtcagctacctttgctgcctccagttccagaggctccagtcacacaaaagaaagctgccagttccagaacactctcatctattggactaacccccaactattgacatcctttccaaaggtcaggatggcacccaaaacatcaatatacaggcagatcaatctgctaaagggtgccagggaacagaaggatttactgcacatagaaattccaatttttcaggccccagagtgtctcagcctcctttttggccaagaatgggagatactcagctaggtaaaccactttctcttctggtggcctgttggcaattggccccgttctcatgaccctagagtctcatggctcaccaaagtcgtcagaatcaagtttcatctctgttatttgggctttgggctatttgaaggtttatagtttaaaatttgaactttttagatatttcaaaaaaacagtattg

SEQ ID NO: 724900 - DNA, 1055 bp, Homo sapiens
ataggaaaagctatccacaaatagttgctatcatgtagtttttcagtgtaaagaaaatttaaaaaatcaataaaaacaaaatgattactcagaccttgttacatagatatcgctgttagacgtcctccttttctaagataacctattgtgtggttttcagagccttttataagtcagccactagagagcaaacttcttctttttatcaggccgtagttttatttttttwaaaaaatacacaccacgtatatattgggaatctcacaatgacacattatctcagactgtaaaatctgataatatagcttctagatgcctggggcagtgggtgtaggggatgaagtgggaaattttaaggccgtttatattaaaaacacaagaaagaacaagataagatgttgtaatgttgaactaccttcctggagtgaaaatgaaaccttctgctaatggagcataaagtcttacgtttcatgccatgtaataaaatatgataggcattgtttggtctgacaggtatcttgggcctttttccagactagggtctccagggagctcaaagacatgttactgtttccaggtgaaatgtagataaattacattgtcagctacctttgctgcctccagttccagaggctccagtcacacaaaagaaagctgccagttccagaacactctcatctattggactaacccccaactattgacatcctttccaaaggtcaggatggcacccaaaacatcaatatacaggcagatcaatctgctaaagggtgccagggaacagaaggatttactgcacatagaaattccaatttttcaggccccagagtgtctcagcctcctttttggccaagaatgggagatactcagctaggtaaaccactttctcttctggtggcctgttggcaattggccccgttctcatgaccctagagtctcatggctcaccaaagtcgtcagaatcaagtttcatctctgttatttgggctttgggctatttgaaggtttatagtttaaaatttgaactttttagatatttcaaaaaaacagtattg

SEQ ID NO: 724901 - DNA, 647 bp, Homo sapiens
accagaattatagatttcctcattcatttattaatacaaataattactgcatcctcattatatgtcaagatggtgtgctcagctttgagagtgtcgtagtttgtgttatagtagggtctccatggaccagctcattagctggacaacaaagaactggaactcagctgttcaattttcttaccttgtgctttctccaagtcatgccgtgatgctattcatcacaggagataaaaggataaataaggtacacccgtgcgcttctgcaaactgagaacctgactaaattaaggtatttaagcaactttactttgatgaattaagtcagcagcactaacttctctagtattagggaggggtttttttttttttttacatatctcaagttaaaattaataatattatgaatttagaattaccctaaatatttccctgaattttaaaataaataatctgacttccagttgcaaatggccagattatctctcccagggcttggtattcttactgtccatctgtttctctrtctctctgcacacacagacataaacacagacacacatgagctagtgctaaaggtcatatccaaaatatttgcagtgagaagaggaaaaatagatgaaatacatgtgttttgtttttttagccta

SEQ ID NO: 724902 - DNA, 656 bp, Homo sapiens
ctttccatgttagaattcgccttccttatctgtgtttgcagcctgatccttcaggctgcctttgttagaaagaaatgttttgagaggccgaggcaggtggatcacctgaggtccggagtttgagaccagcctggccaacatggtgaaaccctgtctctactaaaaatacaaaaattagtggggcgttgtggcaggtgcctgtaatcccagctactcaggaggcttgaggcaggataattgcttgaacccgggaggcggaggttgcagtgagccgagatcatgccactgtactccagcatgggcgacaaagcgagactctgtctcagaaaataaatacataagtaaatattaaataataaaataaaaattgaaaataaaagaaatggcttattgkgctgttttttgttaaaagaggattctgccaaagattcttgccctatctgcttggttgattcatttatttctcctctttcattagtgcagtaaaagtaaaaattttcatgactgaaattataaattcagaattagagtaagaaatactttaaaaatatctgattaattttgtctaaaattactataattaataaaccttaagcatttaaatttaatacaatttattttcaactcattgcccaagtccatattactgaatttta

SEQ ID NO: 724903 - DNA, 1113 bp, Homo sapiens
gaaacttttagaaataatgaataactatgtctattattttaattatgttgattgttgatggtttcacaagtatatgcatatgtccaaactcatcaaattttatgcatgaaatgtgtgttgtttttggtaatcaattatattttaatatagggattttaaaatgtagtacagaaaaagacaaaatattacctcaataaataatacctacttaaaaaacgtatcccagttgagaaagtctgttctatattcaaaaattattcatttcttttggcccttagaattacacataactgaaactgaagttagcattaattttgttcatctgagattctaatttataagctacattaatcatggaatgtaatagaggaagaaaaataactaggactacctaaaagaactaagaaaaaaatactaagaataaaaatttgggagacataagtctaaagttatgatatgggactaagaaattctgcatttaataatttttaatcccttctgaatatgtgggatattgaacaaaatatgaaatctgaagcactttcattcatttttttccataataatcatacaattattcattgtaattaatctctatctggaagaagcaataagtatataaaaataaaatacagtgctagtatgtgcccagcattgtaatagtcactatattttgtacatcatttaaaaatgctcccgcataaaggttagaactccaatttgcttgtaaaagaaactgaggccaagaaaggcttactaacttgtttaacacccggaattmaaaccaagataaatattgttgctaagctttttcaggtatactgatagcatatagctacacttcaagaggaaatatctaatttaacaaacctgttttcataatagagaggtaggagaaatcattcttgtagtcatctatctttctgttctgcttcactcaccataattaaaaatacaacttttcaagatagagcactgatcaaatttaactattaataatccactccactgtcatttttagaaaattaaccatacaaatgaaaccaaccttagaattcttatgagtttagagaactagctatactagttattgttttatttttagataaacta

SEQ ID NO: 724904 - DNA, 1062 bp, Homo sapiens
cagagaatttaaagaagtgtgaccactctttttgcaccatcagcccccatccacccttgcacatccagctgcctttggatttaccatctagtacttaccatctagtatactttataatttaaatatttgtttttgtttattttctcacctctccactagaatgtaatctccatggagacaaagatttttgtctgttttgtctactattgtgaacattcttgaacagcacctggcacatagtaagcatcccatgaatatttactgagtgaatggacatatctccatcccttctcttggaggttttctgtctagaatgttaaagctcagttccttttggtagggagtctgggcttactcagtggcctaaggactcaccaggagctgttcttcccttgcctggaacgcttgtttaagttccattgattttatagattgaaataattagtttatgtaacaagattttatctatggctatttatgctgcttacaagaagaaagtcaaggctaaggcagagtggtagcctgtctaggcattaaaggagtgccccraaacagagccaatctgcaaagacaagcacagaaatttatttatttgtttgtttgtttattcattctggtgttcaaatattctaatatttgctaacttccatgctaattcaattagtaaaaccttaggaaccatggcatatttattaggtctgttttatgtaccagtttctagactggaaactgggaatataagatactgtcagtcctctgggtccatcatctgatagaggagcctgacaggtaaatgagtagttagttctgatgtggtgggttgggcattgagctagtgtaaggcttgcctctgcattgccctcgtatcactattgcagttatacatgcaattgcaagcagttctttctctttgttataattacaagattattttcttttcttttccataatcttgaggtcagggattctgattattatttctatattcctagaacttagcacacaatttctagctcaataaatgttgaattgttagagatatgtgctccatgggagcaaaaa

SEQ ID NO: 724905 - DNA, 1062 bp, Homo sapiens
cagagaatttaaagaagtgtgaccactctttttgcaccatcagcccccatccacccttgcacatccagctgcctttggatttaccatctagtacttaccatctagtatactttataatttaaatatttgtttttgtttattttctcacctctccactagaatgtaatctccatggagacaaagatttttgtctgttttgtctactattgtgaacattcttgaacagcacctggcacatagtaagcatcccatgaatatttactgagtgaatggacatatctccatcccttctcttggaggttttctgtctagaatgttaaagctcagttccttttggtagggagtctgggcttactcagtggcctaaggactcaccaggagctgttcttcccttgcctggaacgcttgtttaagttccattgattttatagattgaaataattagtttatgtaacaagattttatctatggctatttatgctgcttacaagaagaaagtcaaggctaaggcagagtggtagcctgtctaggcattaaaggagtgccccaaaacagagccaatctgcaaagacaagcacagaaatttatttatttgtttgtttgtttattcattctggtgttcaaatattctaatatttgctaacttccatgctaattcaattagtaaaaccttaggaaccatggcatatttattaggtctgttttatgtaccagtttctagactggaaactgggaatataagatactgtcagtcctctgggtccatcatctgatagaggagcctgacaggtaaatgagtagttagttctgatgtggtgggttgggcattgagctagtgtaaggcttgcctctgcattgccctcrtatcactattgcagttatacatgcaattgcaagcagttctttctctttgttataattacaagattattttcttttcttttccataatcttgaggtcagggattctgattattatttctatattcctagaacttagcacacaatttctagctcaataaatgttgaattgttagagatatgtgctccatgggagcaaaaa

SEQ ID NO: 724906 - DNA, 597 bp, Homo sapiens
tcgtttttataaaggttgggagggttggtggcagtaacatagatttttaaatcatagagaactggatctgcaaagcagcttttccatcttactgtgtgaccrtgggcagatgaccatcctgagcctgtttcctcacctcctcaagcaattatgataaaaatgccatatggataaaacacctaacatggtgcctggcatcaagaaagcaccttgcagggtgaggggcagaaaggggaggggagagagatagaaaagtgaggaaggaggagggggagaaaaaagaatgagagcagaaaacagtcacagacaaggagggacacacagaaacacagagacaaaagagaccgagatgtagacagagtgcaaagacaggtagagaacagagagatgatagaaagtcaagcaccttatttacaaaagctagtgacagtggtactagtagtaacggcaatggcataaaggctgtgttttatttatcataaaattatgttcatgtttatgaatgtagtagaagatgaagcatttaaatacatgaatatctttgctgtttgtttgtagtatatttgacatactcactgaaacatttcctgccttgcc

SEQ ID NO: 724907 - DNA, 578 bp, Homo sapiens
ctttctcaaagacacacagctgtgtgtggcatcttgaatctgtcttggctgttttctagagacctgggagtgrtagtaacaggattgtatgttgccttcctgttccttttcacgtatgggtaaggtactgtctatgtttctttaagactccattctgtgacctcactattcactgagatattatccaagctattttttcttttttctttatagagatggtgtctccttatgttgcccaggctggtcttgaactactgggctcaagcaattctcccaccttggcctcccaaagtgctgggatgagaaaggtgtgagccactgcacctggctcaaacttttttttttttaaatgacttgctctgtcaaccaggataagtagaaggggacggaaagactaagaaacagaaacattaaaatacaaaacaaaacccaggaagtatagaagttttggaaacgagttaggaggctgaaatacataaggccaaactgtaagaataaaacatttggggtgtgggattctttaaaaaaagtattaaacaattcttcttaatgcttcatcacatatttctagctagtag

SEQ ID NO: 724908 - DNA, 578 bp, Homo sapiens
ctttctcaaagacacacagctgtgtgtggcatcttgaatctgtcttggctgttttctagagacctgggagtgatagtaacaggattgtatgttgccttcctgttccttttcacgtatgggtaaggtactgtctatgtttctttaagactccattctgtgacctcactattcactgagatattatccaagctattttttcttttttctttatagagatggtgtctccttatgttgcccaggctggtcttgaactactgggctcaagcaattctcccaccttggcctcccaaagtgctgggatgagaaaggtgtgagccactgcacctggctcaaacttttttttttttaaatgacttgctctgtcaaccaggataagtagaaggggacrgaaagactaagaaacagaaacattaaaatacaaaacaaaacccaggaagtatagaagttttggaaacgagttaggaggctgaaatacataaggccaaactgtaagaataaaacatttggggtgtgggattctttaaaaaaagtattaaacaattcttcttaatgcttcatcacatatttctagctagtag

SEQ ID NO: 724909 - DNA, 2352 bp, Homo sapiens
tgaaaaggttttgcagaaacctagaattccagcagaacagagagaagagcccccaaaccactctttgatgccatgtttaccccacaggctggttcacattgagaaatacaagttacataacgaccgtcctgctccttggttttcatatagttcattttcaactctccatggaacctcgttgttaggatttctttgtggaccattcatatccatgaggtctttagaataaataacttagatgaattcgctgtgctgtcatgcttagaatcggaatgttcccccatgagcaacccattggcctggggcccacaaccctacatgagaggatgttttagatctattcaattttcacagaaggaattttgagagaatgctccatgcactgtcagtctgtcactccattcagctggtgttctcatgacagtgtgctgcggatggcgtgcctgccctcagatgtgagctggtttctcatgacagtgtgctgcggatggcgtgcctgccctcagatgtgagcttctgcaagttagaggttctatcctttcttactcatcccagatatccatgactctgatcattgacagagtacccctcgtaacttagtcattaattctgtattcttgaagagtttatatacgctctgtaataaaaggttatttcttctttacattttaaggcctttcatatggcatgatatcctctgacaaaaagaaatccaatccaagggtaagatcattgcatttaagttttgtccacagtgccttgcatatctaaggtgctcaataaggatttttgaaataagcaattggatatatatatagttatgcatattaccaataaataggtaaggctctggaatcagaaaaccttaaattcagtttttagtgcctcccaagatagaaatatttgacaccttgagcaaaattttagaaaagttttctctcaaccctcaccacaactaatcttagataataacataaacttcctttacataaattgctaaactcttctttgtaaatcttattttcttaatggagaaatgcctctctattttattttatttttttctcactggaactgatgccaagagaaacagatcaaatgtgactggtcaggaatgaagcagggtagccaagcgtagaatactaaaaccaagtcgagaactaatttggagaggtatggcaaggggccagctactcaaagaagagaaataaaagtataagtgagctaatgtgaaaggcagaactcaggtcaagattaataaaagagaacaatacagttgggatcactgtgggactgagatttgaagttaaggaattctagtgtcaagactttaactgacatttgggtgtctcatcttcaccaaagaagcargactgccttgataagtacagtattcctggttttaaaatgtaggtactcacagccagctggtggtattacccacttcctgcttatgtatgactgcatactttgacagcaataaatgtaagctttactactgacatttagcaaagaggaccaactgacgacattttctcgagaggatgttgaatccatagaaaaacacatccaatcatttcactttcatcctataattttatagaagatagatagatagataagctgaatgaaatcaaatgttttggtccccccactgcctgaaaagccaggatgtcaaggtcttgtgtgcttctgtgggaggaatttgggttaatgatgtaagaaatggagtgatgtcctttcagtccctgtatcatgtgtcccctcaaaaccaaacaactgacttttgtggaagagcctccaagaagccacaggcttatgtctataaagtacaacatgtctctaaagggtgtcctaaggttctcagtagaaagagttatttggctttcaagcttgtagggacaactaggctgaatgttgctgttgcttaaagaataatacagaaatgtagacagagagctgatgattctggaatttctacaggtaataatccattgggtttcaaaagagagtagctgaaagacatgttgtaacatagaaggtcttaacacatacgaagataagaaacgcatatggcatgtggcaaaatgcaaattccacatgcaaattatgctataaaactcacagccttcctaggggtctattgtagtgaagaaaaggagtatgatgttatttgtcctataactcttgatgtgggcaagccatattcacttggttgggttaaattttagcagctatgatatacagtaaatctcttggtttatttcgaaagagtattatgttaataaatacaatagtaaatgctttgaattctttagaaaaaaggacatacttaactaaattcaagttaat

SEQ ID NO: 724910 - DNA, 2352 bp, Homo sapiens
tgaaaaggttttgcagaaacctagaattccagcagaacagagagaagagcccccaaaccactctttgatgccatgtttaccccacaggctggttcacattgagaaatacaagttacataacgaccgtcctgctccttggttttcatatagttcattttcaactctccatggaacctcgttgttaggatttctttgtggaccattcatatccatgaggtctttagaataaataacttagatgaattcgctgtgctgtcatgcttagaatcggaatgttcccccatgagcaacccattggcctggggcccacaaccctacatgagaggatgttttagatctattcaattttcacagaaggaattttgagagaatgctccatgcactgtcagtctgtcactccattcagctggtgttctcatgacagtgtgctgcggatggcgtgcctgccctcagatgtgagctggtttctcatgacagtgtgctgcggatggcgtgcctgccctcagatgtgagcttctgcaagttagaggttctatcctttcttactcatcccagatatccatgactctgatcattgacagagtacccctcgtaacttagtcattaattctgtattcttgaagagtttatatacgctctgtaataaaaggttatttcttctttacattttaaggcctttcatatggcatgatatcctctgacaaaaagaaatccaatccaagggtaagatcattgcatttaagttttgtccacagtgccttgcatatctaaggtgctcaataaggatttttgaaataagcaattggatatatatatagttatgcatattaccaataaataggtaaggctctggaatcagaaaaccttaaattcagtttttagtgcctcccaagatagaaatatttgacaccttgagcaaaattttagaaaagttttctctcaaccctcaccacaactaatcttagataataacataaacttcctttacataaattgctaaactcttctttgtaaatcttattttcttaatggagaaatgcctctctattttattttatttttttctcactggaactgatgccaagagaaacagatcaaatgtgactggtcaggaatgaagcagggtagccaagcgtagaatactaaaaccaagtcgagaactaatttggagaggtatggcaaggggccagctactcaaagaagagaaataaaagtataagtgagctaatgtgaaaggcagaactcaggtcaagattaataaaagagaacaatacagttgggatcactgtgggactgagatttgaagttaaggaattctagtgtcaagactttaactgacatttgggtgtctcatcttcaccaaagaagcagractgccttgataagtacagtattcctggttttaaaatgtaggtactcacagccagctggtggtattacccacttcctgcttatgtatgactgcatactttgacagcaataaatgtaagctttactactgacatttagcaaagaggaccaactgacgacattttctcgagaggatgttgaatccatagaaaaacacatccaatcatttcactttcatcctataattttatagaagatagatagatagataagctgaatgaaatcaaatgttttggtccccccactgcctgaaaagccaggatgtcaaggtcttgtgtgcttctgtgggaggaatttgggttaatgatgtaagaaatggagtgatgtcctttcagtccctgtatcatgtgtcccctcaaaaccaaacaactgacttttgtggaagagcctccaagaagccacaggcttatgtctataaagtacaacatgtctctaaagggtgtcctaaggttctcagtagaaagagttatttggctttcaagcttgtagggacaactaggctgaatgttgctgttgcttaaagaataatacagaaatgtagacagagagctgatgattctggaatttctacaggtaataatccattgggtttcaaaagagagtagctgaaagacatgttgtaacatagaaggtcttaacacatacgaagataagaaacgcatatggcatgtggcaaaatgcaaattccacatgcaaattatgctataaaactcacagccttcctaggggtctattgtagtgaagaaaaggagtatgatgttatttgtcctataactcttgatgtgggcaagccatattcacttggttgggttaaattttagcagctatgatatacagtaaatctcttggtttatttcgaaagagtattatgttaataaatacaatagtaaatgctttgaattctttagaaaaaaggacatacttaactaaattcaagttaat

SEQ ID NO: 724911 - DNA, 2352 bp, Homo sapiens
tgaaaaggttttgcagaaacctagaattccagcagaacagagagaagagcccccaaaccactctttgatgccatgtttaccccacaggctggttcacattgagaaatacaagttacataacgaccgtcctgctccttggttttcatatagttcattttcaactctccatggaacctcgttgttaggatttctttgtggaccattcatatccatgaggtctttagaataaataacttagatgaattcgctgtgctgtcatgcttagaatcggaatgttcccccatgagcaacccattggcctggggcccacaaccctacatgagaggatgttttagatctattcaattttcacagaaggaattttgagagaatgctccatgcactgtcagtctgtcactccattcagctggtgttctcatgacagtgtgctgcggatggcgtgcctgccctcagatgtgagctggtttctcatgacagtgtgctgcggatggcgtgcctgccctcagatgtgagcttctgcaagttagaggttctatcctttcttactcatcccagatatccatgactctgatcattgacagagtacccctcgtaacttagtcattaattctgtattcttgaagagtttatatacgctctgtaataaaaggttatttcttctttacattttaaggcctttcatatggcatgatatcctctgacaaaaagaaatccaatccaagggtaagatcattgcatttaagttttgtccacagtgccttgcatatctaaggtgctcaataaggatttttgaaataagcaattggatatatatatagttatgcatattaccaataaataggtaaggctctggaatcagaaaaccttaaattcagtttttagtgcctcccaagatagaaatatttgacaccttgagcaaaattttagaaaagttttctctcaaccctcaccacaactaatcttagataataacataaacttcctttacataaattgctaaactcttctttgtaaatcttattttcttaatggagaaatgcctctctattttattttatttttttctcactggaactgatgccaagagaaacagatcaaatgtgactggtcaggaatgaagcagggtagccaagcgtagaatactaaaaccaagtcgagaactaatttggagaggtatggcaaggggccagctactcaaagaagagaaataaaagtataagtgagctaatgtgaaaggcagaactcaggtcaagattaataaaagagaacaatacagttgggatcactgtgggactgagatttgaagttaaggaattctagtgtcaagactttaactgacatttgggtgtctcatcttcaccaaagaagcaggrctgccttgataagtacagtattcctggttttaaaatgtaggtactcacagccagctggtggtattacccacttcctgcttatgtatgactgcatactttgacagcaataaatgtaagctttactactgacatttagcaaagaggaccaactgacgacattttctcgagaggatgttgaatccatagaaaaacacatccaatcatttcactttcatcctataattttatagaagatagatagatagataagctgaatgaaatcaaatgttttggtccccccactgcctgaaaagccaggatgtcaaggtcttgtgtgcttctgtgggaggaatttgggttaatgatgtaagaaatggagtgatgtcctttcagtccctgtatcatgtgtcccctcaaaaccaaacaactgacttttgtggaagagcctccaagaagccacaggcttatgtctataaagtacaacatgtctctaaagggtgtcctaaggttctcagtagaaagagttatttggctttcaagcttgtagggacaactaggctgaatgttgctgttgcttaaagaataatacagaaatgtagacagagagctgatgattctggaatttctacaggtaataatccattgggtttcaaaagagagtagctgaaagacatgttgtaacatagaaggtcttaacacatacgaagataagaaacgcatatggcatgtggcaaaatgcaaattccacatgcaaattatgctataaaactcacagccttcctaggggtctattgtagtgaagaaaaggagtatgatgttatttgtcctataactcttgatgtgggcaagccatattcacttggttgggttaaattttagcagctatgatatacagtaaatctcttggtttatttcgaaagagtattatgttaataaatacaatagtaaatgctttgaattctttagaaaaaaggacatacttaactaaattcaagttaat

SEQ ID NO: 724912 - DNA, 2352 bp, Homo sapiens
tgaaaaggttttgcagaaacctagaattccagcagaacagagagaagagcccccaaaccactctttgatgccatgtttaccccacaggctggttcacattgagaaatacaagttacataacgaccgtcctgctccttggttttcatatagttcattttcaactctccatggaacctcgttgttaggatttctttgtggaccattcatatccatgaggtctttagaataaataacttagatgaattcgctgtgctgtcatgcttagaatcggaatgttcccccatgagcaacccattggcctggggcccacaaccctacatgagaggatgttttagatctattcaattttcacagaaggaattttgagagaatgctccatgcactgtcagtctgtcactccattcagctggtgttctcatgacagtgtgctgcggatggcgtgcctgccctcagatgtgagctggtttctcatgacagtgtgctgcggatggcgtgcctgccctcagatgtgagcttctgcaagttagaggttctatcctttcttactcatcccagatatccatgactctgatcattgacagagtacccctcgtaacttagtcattaattctgtattcttgaagagtttatatacgctctgtaataaaaggttatttcttctttacattttaaggcctttcatatggcatgatatcctctgacaaaaagaaatccaatccaagggtaagatcattgcatttaagttttgtccacagtgccttgcatatctaaggtgctcaataaggatttttgaaataagcaattggatatatatatagttatgcatattaccaataaataggtaaggctctggaatcagaaaaccttaaattcagtttttagtgcctcccaagatagaaatatttgacaccttgagcaaaattttagaaaagttttctctcaaccctcaccacaactaatcttagataataacataaacttcctttacataaattgctaaactcttctttgtaaatcttattttcttaatggagaaatgcctctctattttattttatttttttctcactggaactgatgccaagagaaacagatcaaatgtgactggtcaggaatgaagcagggtagccaagcgtagaatactaaaaccaagtcgagaactaatttggagaggtatggcaaggggccagctactcaaagaagagaaataaaagtataagtgagctaatgtgaaaggcagaactcaggtcaagattaataaaagagaacaatacagttgggatcactgtgggactgagatttgaagttaaggaattctagtgtcaagactttaactgacatttgggtgtctcatcttcaccaaagaagcaggamtgccttgataagtacagtattcctggttttaaaatgtaggtactcacagccagctggtggtattacccacttcctgcttatgtatgactgcatactttgacagcaataaatgtaagctttactactgacatttagcaaagaggaccaactgacgacattttctcgagaggatgttgaatccatagaaaaacacatccaatcatttcactttcatcctataattttatagaagatagatagatagataagctgaatgaaatcaaatgttttggtccccccactgcctgaaaagccaggatgtcaaggtcttgtgtgcttctgtgggaggaatttgggttaatgatgtaagaaatggagtgatgtcctttcagtccctgtatcatgtgtcccctcaaaaccaaacaactgacttttgtggaagagcctccaagaagccacaggcttatgtctataaagtacaacatgtctctaaagggtgtcctaaggttctcagtagaaagagttatttggctttcaagcttgtagggacaactaggctgaatgttgctgttgcttaaagaataatacagaaatgtagacagagagctgatgattctggaatttctacaggtaataatccattgggtttcaaaagagagtagctgaaagacatgttgtaacatagaaggtcttaacacatacgaagataagaaacgcatatggcatgtggcaaaatgcaaattccacatgcaaattatgctataaaactcacagccttcctaggggtctattgtagtgaagaaaaggagtatgatgttatttgtcctataactcttgatgtgggcaagccatattcacttggttgggttaaattttagcagctatgatatacagtaaatctcttggtttatttcgaaagagtattatgttaataaatacaatagtaaatgctttgaattctttagaaaaaaggacatacttaactaaattcaagttaat

SEQ ID NO: 724913 - DNA, 2352 bp, Homo sapiens
tgaaaaggttttgcagaaacctagaattccagcagaacagagagaagagcccccaaaccactctttgatgccatgtttaccccacaggctggttcacattgagaaatacaagttacataacgaccgtcctgctccttggttttcatatagttcattttcaactctccatggaacctcgttgttaggatttctttgtggaccattcatatccatgaggtctttagaataaataacttagatgaattcgctgtgctgtcatgcttagaatcggaatgttcccccatgagcaacccattggcctggggcccacaaccctacatgagaggatgttttagatctattcaattttcacagaaggaattttgagagaatgctccatgcactgtcagtctgtcactccattcagctggtgttctcatgacagtgtgctgcggatggcgtgcctgccctcagatgtgagctggtttctcatgacagtgtgctgcggatggcgtgcctgccctcagatgtgagcttctgcaagttagaggttctatcctttcttactcatcccagatatccatgactctgatcattgacagagtacccctcgtaacttagtcattaattctgtattcttgaagagtttatatacgctctgtaataaaaggttatttcttctttacattttaaggcctttcatatggcatgatatcctctgacaaaaagaaatccaatccaagggtaagatcattgcatttaagttttgtccacagtgccttgcatatctaaggtgctcaataaggatttttgaaataagcaattggatatatatatagttatgcatattaccaataaataggtaaggctctggaatcagaaaaccttaaattcagtttttagtgcctcccaagatagaaatatttgacaccttgagcaaaattttagaaaagttttctctcaaccctcaccacaactaatcttagataataacataaacttcctttacataaattgctaaactcttctttgtaaatcttattttcttaatggagaaatgcctctctattttattttatttttttctcactggaactgatgccaagagaaacagatcaaatgtgactggtcaggaatgaagcagggtagccaagcgtagaatactaaaaccaagtcgagaactaatttggagaggtatggcaaggggccagctactcaaagaagagaaataaaagtataagtgagctaatgtgaaaggcagaactcaggtcaagattaataaaagagaacaatacagttgggatcactgtgggactgagatttgaagttaaggaattctagtgtcaagactttaactgacatttgggtgtctcatcttcaccaaagaagcaggacwgccttgataagtacagtattcctggttttaaaatgtaggtactcacagccagctggtggtattacccacttcctgcttatgtatgactgcatactttgacagcaataaatgtaagctttactactgacatttagcaaagaggaccaactgacgacattttctcgagaggatgttgaatccatagaaaaacacatccaatcatttcactttcatcctataattttatagaagatagatagatagataagctgaatgaaatcaaatgttttggtccccccactgcctgaaaagccaggatgtcaaggtcttgtgtgcttctgtgggaggaatttgggttaatgatgtaagaaatggagtgatgtcctttcagtccctgtatcatgtgtcccctcaaaaccaaacaactgacttttgtggaagagcctccaagaagccacaggcttatgtctataaagtacaacatgtctctaaagggtgtcctaaggttctcagtagaaagagttatttggctttcaagcttgtagggacaactaggctgaatgttgctgttgcttaaagaataatacagaaatgtagacagagagctgatgattctggaatttctacaggtaataatccattgggtttcaaaagagagtagctgaaagacatgttgtaacatagaaggtcttaacacatacgaagataagaaacgcatatggcatgtggcaaaatgcaaattccacatgcaaattatgctataaaactcacagccttcctaggggtctattgtagtgaagaaaaggagtatgatgttatttgtcctataactcttgatgtgggcaagccatattcacttggttgggttaaattttagcagctatgatatacagtaaatctcttggtttatttcgaaagagtattatgttaataaatacaatagtaaatgctttgaattctttagaaaaaaggacatacttaactaaattcaagttaat

SEQ ID NO: 724914 - DNA, 2412 bp, Homo sapiens
ttatttagtgttaggataattaggaatataattttccttttaaagtttaataactttrtggaagtcacttccagttgtctagccagttcttattcattcacatttcctcctttctaatagatcctcatttttgtatgaagttgcaatatgcccaatttaaagtactcacctgctccaaatgccttgcagatagggtttgctataaagtgtgagcaattatgtgttaatgtaagtgactttggttgtatgtaccttttggactttcacattttaccctttactctactatatcttctttctgcctataacacaaatgtgatgcctagagatggagcagccgtgttattaatgtaagaatgaaaagtcccaagctagacaaaaacttagaagaaactctggtcctgaataacttcatcaagctgttgctcaagccttgtactaccatctacatgagtttctttctacctaaatgaaaatcagtcttcatgtgtgcaaatcactctggactaatttcctttgcatataacgaaattcagtcttaactgacacaaaggagaagaaaatcattaatttacactctactctgaattgtaaatgatgatggatagaatgaatctagtaaacatttgaattgggggaactaaaagatgaaaagatacagaaaacattttcggagtagggaatttttcttacatctttactgtatttgaaaatgtggggcaccaaggaatacctgatgggggtgtgttagtgtgatttctatctcaacttcagaacactggggaatagttactacctcagtttcccttgatagccaactggctactgttatgtgattagatatgttgatctcttagtagaaaagattaaaataataattcttatatagttgaacattttatgtaaaaagatttcaatggccacattacatatgatcaaatagaattctcacatttaaaaataggatgataaataaaatacttttaaaaggaaagataattttgaccattgaacacgaatcagccctggaaaaaccaagagcacataatgttcatgcttttggcctttcttaagacttcatctacctgtatacaggattcttaccctacgttatttcaaaggtaatccctgttccaaaatcctcatcttttttccttctttgctagagtatgaaaatgctttccacattgtccacagctagtagccccttctagacatgggttaaaatcacccagcactagaagctgtgccattacaacacgtgcatttttcttaatgacggccaatgaaccataacaaaattgaaacttccctctctggtagtgatcagacaggttcaaaaagaatatttgatgagatgccaagccagcacattgctgccattataaaagcaacgcccacacccaaatcagccaggcttttcttctctgttatagaacagctgcctcccatagtgagccggatttagcgcaagatcaaaaatctcgacgccttctatgtgggttctgtgacatttcacagttgcatgggacccaggtaaaaccattaaaaaatactttgggactatttcaaggagaaaatagaaacacaaggccctgttatccagtgtcattagactttttcttatactacgtggagctgtccccttagaaacctcagtgaagtgttgggagcaagcagcctgatccttaattcattcctgcattcatgtattgagtacatatctattgagaaaatattataactaaaacattaggattaaagtgctgtactaagctgcttctgcttctggttcaaacattttgctttttttttaataaaaaaaatatttctttgaaacaaggttttactctgttgcccaggctggagtgcagtggagtgatcgtgactcactgcaggcttgacctccttggctcaagcaatcctcctacttcaacctcccgagtagctgggactatctaggtttttgttttcttttgttttgtttcgtagagatgaggttttactatattgtccaggctggtcttgaactcctgggctcaagctatcctcccacctgggcctcagaaagtgctgggattacaaatgtcagccaccaaccaggccttagtttgctgtttttattgttacttcaaagcactattgttattccaaacaccttcattgtatctattataagaaatgttctaatcaagttgaagcaagctatgattctactccattcaatttcacatttcacaatctcaatgctataagcaccaaaaatgtgctttctgttatttaatctattttagagtgaggtcttcactcttattttatgtgctaatcaacctgtagcatcttatctattctattgtgcaggtatataacatataattggtgaaataacagaatctcagtcagaatggactg

SEQ ID NO: 724915 - DNA, 2412 bp, Homo sapiens
ttatttagtgttaggataattaggaatataattttccttttaaagtttaataactttgtggaagtcacttccagttgtctagccagttcttattcattcacatttcctcctttctaatagatcctcatttttgtatgaagttgcaatatgcccaatttaaagtactcacctgctccaaatgccttgcagatagggtttgctataaagtgtgagcaattatgtgttaatgtaagtgactttggttgtatgyaccttttggactttcacattttaccctttactctactatatcttctttctgcctataacacaaatgtgatgcctagagatggagcagccgtgttattaatgtaagaatgaaaagtcccaagctagacaaaaacttagaagaaactctggtcctgaataacttcatcaagctgttgctcaagccttgtactaccatctacatgagtttctttctacctaaatgaaaatcagtcttcatgtgtgcaaatcactctggactaatttcctttgcatataacgaaattcagtcttaactgacacaaaggagaagaaaatcattaatttacactctactctgaattgtaaatgatgatggatagaatgaatctagtaaacatttgaattgggggaactaaaagatgaaaagatacagaaaacattttcggagtagggaatttttcttacatctttactgtatttgaaaatgtggggcaccaaggaatacctgatgggggtgtgttagtgtgatttctatctcaacttcagaacactggggaatagttactacctcagtttcccttgatagccaactggctactgttatgtgattagatatgttgatctcttagtagaaaagattaaaataataattcttatatagttgaacattttatgtaaaaagatttcaatggccacattacatatgatcaaatagaattctcacatttaaaaataggatgataaataaaatacttttaaaaggaaagataattttgaccattgaacacgaatcagccctggaaaaaccaagagcacataatgttcatgcttttggcctttcttaagacttcatctacctgtatacaggattcttaccctacgttatttcaaaggtaatccctgttccaaaatcctcatcttttttccttctttgctagagtatgaaaatgctttccacattgtccacagctagtagccccttctagacatgggttaaaatcacccagcactagaagctgtgccattacaacacgtgcatttttcttaatgacggccaatgaaccataacaaaattgaaacttccctctctggtagtgatcagacaggttcaaaaagaatatttgatgagatgccaagccagcacattgctgccattataaaagcaacgcccacacccaaatcagccaggcttttcttctctgttatagaacagctgcctcccatagtgagccggatttagcgcaagatcaaaaatctcgacgccttctatgtgggttctgtgacatttcacagttgcatgggacccaggtaaaaccattaaaaaatactttgggactatttcaaggagaaaatagaaacacaaggccctgttatccagtgtcattagactttttcttatactacgtggagctgtccccttagaaacctcagtgaagtgttgggagcaagcagcctgatccttaattcattcctgcattcatgtattgagtacatatctattgagaaaatattataactaaaacattaggattaaagtgctgtactaagctgcttctgcttctggttcaaacattttgctttttttttaataaaaaaaatatttctttgaaacaaggttttactctgttgcccaggctggagtgcagtggagtgatcgtgactcactgcaggcttgacctccttggctcaagcaatcctcctacttcaacctcccgagtagctgggactatctaggtttttgttttcttttgttttgtttcgtagagatgaggttttactatattgtccaggctggtcttgaactcctgggctcaagctatcctcccacctgggcctcagaaagtgctgggattacaaatgtcagccaccaaccaggccttagtttgctgtttttattgttacttcaaagcactattgttattccaaacaccttcattgtatctattataagaaatgttctaatcaagttgaagcaagctatgattctactccattcaatttcacatttcacaatctcaatgctataagcaccaaaaatgtgctttctgttatttaatctattttagagtgaggtcttcactcttattttatgtgctaatcaacctgtagcatcttatctattctattgtgcaggtatataacatataattggtgaaataacagaatctcagtcagaatggactg

SEQ ID NO: 724916 - DNA, 2412 bp, Homo sapiens
ttatttagtgttaggataattaggaatataattttccttttaaagtttaataactttgtggaagtcacttccagttgtctagccagttcttattcattcacatttcctcctttctaatagatcctcatttttgtatgaagttgcaatatgcccaatttaaagtactcacctgctccaaatgccttgcagatagggtttgctataaagtgtgagcaattatgtgttaatgtaagtgactttggttgtatgtaccttttggactttcacattttaccctttactctactatatcttctttctgcctataacacaaatgtgatgcctagagatggagcagccgtgttattaatgtaagaatgaaaagtcccaagctagacaaaaacttagaagaaactctggtcctgaataacttcatcaagctgttgctcaagccttgtactaccatctacatgagtttctttctacctaaatgaaaatcagtcttcatgtgtgcaaatcactctggactaatttcctttgcatataacgaaattcagtcttaactgacacaaaggagaagaaaatcattaatttacactctactctgaattgtaaatgatgatggatagaatgaatctagtaaacatttgaattgggggaactaaaagatgaaaagatacagaaaacattttcggagtagggaatttttcttacatctttactgtatttgaaaatgtggggcaccaaggaatacctgatgggggtgtgttagtgtgatttctatctcaacttcagaacactggggaatagttactacctcagtttcccttgatagccaactggctactgttatgtgattagatatgttgatctcttagtagaaaagattaaaataataattcttatatagttgaacattttatgtaaaaagatttcaatggccacattacatatgatcaaatagaattctcacatttaaaaataggatgataaataaaatacttttaaaaggaaagataattttgaccattgaacacgaatcagccctggaaaaaccaagagcacataatgttcatgcttttggcctttcttaagacttcatctacctgtatacaggattcttaccctacgttatttcaaaggtaatccctgttccaaaatcctcatcttttttccttctttgctagagtatgaaaatgctttccacattgtccacagctagtagccccttctagacatgggttaaaatcacccagcactagaagctgtgccattacaacacgtgcatttttcttaatgacggccaatgaaccataacaaaattgaaacttccctctctggtagtgatcagacaggttcaaaaagaatatttgatgagatgccaagccagcacattgctgccattataaaagcaacgcccacacccaaatcagccaggcttttcttctctgttatagaacagctgcctcccatagtgagccggatttagcgcaagatcaaaaatctcgacgccttctatgtgggttctgtgacatttcacagttgcatgggacccaggtaaaaccattaaaaaatactttgggactatttcaaggagaaaatagaaacacaaggccctgttatccagtgtcattagactttttcttatactacgtggagctgtccccttagaaacctcagtgaagtgttgggagcaagcagcctgatccttaattcattcctgcattcatgtattgagtacatatctattgagaaaatattataactaaaacattaggattaaagtgctgtactaagctgcttctgcttctggttcaaacattttgctttttttttaataaaaaaaatatttctttgaaacaaggttttactctgttgcccaggctggagtgcagtggagtgatcgtgactcactgcaggcttgacctccttggctcaagcaatcctcctacttcaacctcccgagtagctgggactatctaggtttttgttttcttttgttttgtttcgtagagatgaggttttactatattgtccaggctggtcttgaactcctgggctcaagctatcctcccacctgggcctcagaaagtgctgggattacaaatgtcagccaccaaccaggccttagtttgctgtttttattgttacttcaaagcactattgttattccaaacaccttcattgtatctattataagaaatgttctaatcaagttgaagcaagctatgattctactccattcaatttcacatttcacaatctcaatgctataagcaccaaaaatgtgctttctgttatttaatctattttagagtgaggtcttyactcttattttatgtgctaatcaacctgtagcatcttatctattctattgtgcaggtatataacatataattggtgaaataacagaatctcagtcagaatggactg

SEQ ID NO: 724917 - DNA, 1265 bp, Homo sapiens
aatgagtctgttcctagcctagtcaaataaaatcaatgtagtattatggaacattgttgataaaacattctcatcatgcacgtagaacatggatcagctatggtagaaagaaacacaacagtgagaaagaggtcaggaggaggagtgggtaagattctctctcattcgagctgaatcaactctctgcattaagttacaagggactggcgaagtaaagcaatgcatgttagaccaggtctgattgtgccataatcattacatgacttttttagagccatgccaactctctaggactaaatgctcaccaaatacatctgattgttctcattgtatttatttcttagtttcagtgataataagaatgaaatggtaagtcatactagaggtgagttcttactaggtcattgcagttgtgtctttcagagctgaccctgggtaaaattgtgagatgagttgagtttatctttggtaattccatctttgctttaagctagtcctttgtctctgcctacagttgtcccttactgcagcaagaagcccagtggtccctgtccagaaagagttgctgataaggaaaacagttaattcataggctaattcacactacagtgatagagattgatgtcatagtactctattcctcttaggtgtgtttgcatattttaaaagatgctggaagagctgctttatccatgagaaatagacttttaatgctaaaattttaatattgaaatctacgggtggggtatattttaggaaccccatatctgttctctgtgtctctgtgcgtgcattgctttttcattttggctcctagactggggctcagcttgagcttgcacgttgctgctgcctttaaaacaccgctcccttgtcacatgcagaggacgtgatggctgcctgtctgtgttaagtaagaaggaaatggagcccccccccscatttgcctgccacagctgtggcagcaacctggacctggcactgagagcatgtccctagcttgacctcgctcctggaagccaccttagattatgtccagccataatatgacaggttggctggtgcaacatttggagctctagttcccatcttggatactgaaagccttcatggaaaagcagtgtaaggtcaggcctgcccagtgtgttttggactgtgaaaagggcattgtcctaggatcctggaggcactgtcaaagctcaggaaatgttggctgatcctcagtctgtctcacatggttgtcttgaaggtcagatgatataata

SEQ ID NO: 724918 - DNA, 1140 bp, Homo sapiens
cacattgctacaaagaactacctgagacggggtaatttatgaagaaaaaatgtttaattgactcacagttccacaggccgtacaggaggcatggctggggaggcctcaagaaacttacagtcatagcggaagggtgaaggagaagcaagcagggtttcacgtgacagcaggagagagagagagtgaagggggaaaagctacacactttcaaacagccagatctcatgagagctcactatcatgagaagatcaaggggggaaatctgcctcatgatccaatcacctcccaccaggcccttccccaacattagagattccaattcaacatgagatctgggtggggacacacagccaaaccatatcatgcccttagcaagggaggctggaagagcaaatatcaggccaagataagctggcagaccatgattggttcacaccaaccttgattcagcccctggagcagggcattctgcttttatttagaatcaggctcaaaattgggcttttggtatcaatgaagagggaaaatggccctggagaaggcaccaagagggagggtctgccacagatgtgtcagaatcttgctgtcaaaaggcattctgggagagtgaattctgggcatgttcctggcctgtgccaccatcaaggaagtaggggattccacgagagcgggataggggcatctgactggtcagggaggctggcaatacacctctagggaaggtaaagccatgctgggaccaaacgagtgaattagaattagttaggcagagaatgaaggtgaatatgtcatacagggtcaacagcacactatgggtctgctggtgagacagagcatcaggtgtgaaggaggctcagyacacacagcatatcgaggttgaacaggggccttgagaactgaggcagccgaggtgggccagggccaggccatgaagagccttgtaggctgtgttaaggggtttgggtttagtcctgagagcaatggaaagtcatggaagaagtggaagcagaggaatgacgtatcaggttgtatgttttaattatgaaaatctaatttcttgcgataggtaatataagtatcctccaaatattcatatcctttctccgaaagaaacaagtattgctcgttttatttatagc

SEQ ID NO: 724919 - DNA, 1904 bp, Homo sapiens
ccccattcatttggatggatctaatgattttactttcaaacttaatgcccctgagattccctaataatctcacattctatcagaaatgcccccaccatcaaaacgatgtcttatgaattcatttctttgatttgtagagtggcagggtacctaaagttaacatttgtcacagtgttgcataacaccttcattaggccaattacagagagtggcttgagtgggcaacctgtgggcagtcatggtcccgtgtatcttcccaccggcactgctgggaccagagtgtgggtgacagaacaaaaggattccatccaaatgtgttagcaggccccttcaggtaggctgtggcaggagagaagaggaaggatggttcaacagattattaagagaatgtttcaacattaaaaatatggggcaattatatgaacactacatgctactaaaagtaaaatataaaatagaaatgttctgaggaagaaaaacacattcaaatgcaaatgaagagaaccaaaatgagaaaataatgagccaaatagcaaaagttaaaacttgggtatgtttgtctttcaataaatctcttctccatttgaaaaacaactaaatgtctctattccattatattagatttaaaaattcttagagtttaaggagtagtttttttaataaagtcatatacacatccaagcataataatttactattcactacagtgatttcagcatagtgtgttatattcagtatatatgtaaatgcctcaagaacatgatcgtaatgctgattaaactcctcagtaaaatattctctcaatacaaactttgcttttctatcgttcggattttgtttaggaagaaaatttcaacaagcctgccacatagacagacttcgaagacaaagacttttttgaaatagaaagttacagagtttctcttttaaaagttccttgtgtttatacatctttgggtgttgctcttccttcattatcagagagagcagtgcctcaagtctagtgtcagaggcatctgtctgcagccgaagcactttgtcaaagtcaggagggcttaataaggctcgattttcactgaatgcatttgttaggctgttgaatgttaaatcgcaagctgaatcattgtgcaattgctttcttttctgtcttttttttctttttctggccaagtcagaaatggctctgcagagacaagctctgagttatccattagtggattaatgaatgacaatttgtactaaaactaatctcttttttcctttcaaatgaagctcatcttcctcaatgtgttttttccacgaggtgcatgaaattatcaacatgttaccaagaagatgaattctgtgtgtgacccatcagcatcgtcgatacgtagcagtgttatggcagagctccagcataaagccacagcatgacaccagggttggagaggacctaatacctgcagtcttgggcagccaggggatttgttgctctacaccaatttgctcaaatatagaacacatacatttaccgtttcccatagatatatcagcagctcctttcccagggatggttgaaaacctttggctctgttttgctgtgtctgctttctaaaccttctacccttctttaacttgctgactatccatttggatgctggctgactgatttctcgatgaacctcctcttcaaattgggctttcagaaattgaatatactctctgtggtgggtagtatattgtccacrggcatctgcaagtgaggtagaaggcagcatattgaatatactctctgtgatgggtagtatattgtccacaggcatctgcaagggagggagaaggtagcatattagatatactctctgtggtgggtagtattgtccacaggtatccacaagtgtgggagaaagcagcatgctgaa

SEQ ID NO: 724920 - DNA, 3430 bp, Homo sapiens
tggctcttcttagtcttctattcattacatagggatcctgttaaaagacaggtctggtaatatcagtcctttgtaaacatgtccaatggcttctcaccacaatcagtaaaaaccaaaaaccctccatctggtggcccccagccccttcctcctccacctcacatgtgcttcctttgctcaccctctcttgactgcttgctgctcttcaaacatgttaggttatgctccttcctctaggcctctgtctgcaacatcctttctccaacatctttgtgggtggctctctcacttttacaggtcttgctcatgggccttctggcaagcccttccctgatcaccatgcttgcatggcaggctggcactctgtctgccctgtttagttttcttcatgagaacagaaagtcctgtttgtcttctttactgctttatgaccagggcctagaagcacttggcacaactaggcattcagtacagatttattaattgaatgactaaatagcagttgtgaatcagaacacaatggaatctatatctccaaaactttgtgatgaataaaactggctaaaatatgagaattttatgtamcttagtcacatatcataagattttctaagtagaattcatacttggttgtatgtcctaagatctttttagggaggtttcctctttctaaggggattcaaagatatcagtgaaacctgaaaattgtcttgggttaagtagtgcattgtggagtaccaaatggcatgaaagaacaaaactgctgtcattgtgactgccatagtcaatgtcaatgttggatatgactgcatgagctgacagcccctggagcatgtgaaatatatgaaatgcacactggacataacagagcatttttgcagggagctggaccaactcttttatatgactaagatgctatttgcaatttatataaaggaaaaaagcaaatatgctccatgcagtgcctaaaagagccctagtggcttccgggtagaaagccatcccacttctcttcagcagagcatgaaatcaacctactaccttttatcaggttacttacataaaggaattgtgcctattaataaaacatcatgcatcttatttctccaagagcaatgataaccaaactctcctttcccgttccctcttccttccttctctggggtcactttttgctgccctgtgttctgttcagcatgcattggccatgaggatcagattgttagtccagatgactttgaagtagtttttcttatggtaaggttttctcctaagtctgtagcatagaatccttgtttttgggttgatccatgcttaacctgaagatgatagaatgcaaattctgctttatatttgtgtatataaatattgcatcagtcacatgtccattttggtggcaacatcgtctgtggttttcttagctgccctgggattgaatttgcttaatcatgttcccttttctttcaggttgtgcttggcttcttgctgcccacacctactccatgatttcatgctaatttctgcccttcttctcagttagtgaaagcttccccgcactcattatcagcacacttgaatgtccacttagtgtcagacatacaatttttaaagtgagaatttcgtccaggacttttacaaagcctctcatgtggccactgactgcagttaaaaaactagcctgttagaatggtcaccttgacatcatagtccaaaagtgtcccaataatggatgtgccaaaaaattctgaaaccatcataggagttaaaaaatgagaacaccagcccacaaagaatggtatcacccaaacatttggaccaagtccacagtttttatatttttgtgccacatagcatagacagcctaatatatttaaagtaacacttaaaatgtactttagggattcaaattttagctgcttgtttctatttgctaatacagaacataaattttgaaaaaataaacttttaattgaaaattttacaaaaagtaaaataaaaaactgcttatatttccatccaagggaaagaagatacacatagtaaatactttaaatgtatgtatattctttcacccacttttaggatttatcctaagtataactagctgttttataaagatgttcatcatcattatttagagtaagaaaaaatgaacctaaatgttgacagataaaattcacggagtgagctatggtgcatgcacacagtggggaattatgcaggactgaacactatgtttaaaagcatttttaatggcatgtcaaacacttattctaatatggaaaatacagtgacttcgtggatatacaaaaacatcctcatttttgtgtaatcgtgtatcatatatgatcctaagtacgtaatactaaacatgagaaaaaatgcttgctaaaaacagaccaaaatgtagagggctgccactgtgtggtgtgatcggctgactttttgccttttaatttatattttgttggcacagaacattgttctcatgtgcccgaagagatttaaagatgatcttgagatgattagcctcctctcagagtcctgccggggtagataacagggaagattggggcaggtcagaggtgactctgggacgtttgtgcttggtgccctgctgcaagggacagcagctctgcagctccagcccactgtttgtcacaggtccttggtgactgtcttaccagttattttcaaattcaagataaaatggagatacagactttcacataaaactttctacatttaactaccagcaattacattttttgtcataaaacaaagggtaggtcaaacaaaacgtcttaagagtaaatctgtctacaatgtgttcaggaaacgaacacaggtcaggtttatgtggaagatatccagggcgtagcatatctgctggaagcatttcagtcatgagcacagctgggtattggccgtgaacctggtgtgcattgaatacacatccccgtggcccctacagtacattccctgtggatagtttattaggtttcctttattcccttcatctattcttccctttcctttcttccttcctctttttttgcctccctctctctcttcctgtctttattaaatatgtgggatgcagatttgatgaatatgtcaatcaaagatcaccaagaagtcttaaaacaggtaaaccacagaaaacagtcaggatcagaataagaacagtttagtggttctcaagctttttgttctcagaacttctttataatctaaaatgtgttgcgccccctgaaaagctttcacttttatgggataaaaataaatatttataaaatatatagtaaaaaatataaatatataaataaatttatgatttgtttatataaatatgtatataaaaccatatttatcatattaagatttgaaatggacaaatatttaaaatatttattagttaattttaaat

SEQ ID NO: 724921 - DNA, 3430 bp, Homo sapiens
tggctcttcttagtcttctattcattacatagggatcctgttaaaagacaggtctggtaatatcagtcctttgtaaacatgtccaatggcttctcaccacaatcagtaaaaaccaaaaaccctccatctggtggcccccagccccttcctcctccacctcacatgtgcttcctttgctcaccctctcttgactgcttgctgctcttcaaacatgttaggttatgctccttcctctaggcctctgtctgcaacatcctttctccaacatctttgtgggtggctctctcacttttacaggtcttgctcatgggccttctggcaagcccttccctgatcaccatgcttgcatggcaggctggcactctgtctgccctgtttagttttcttcatgagaacagaaagtcctgtttgtcttctttactgctttatgaccagggcctagaagcacttggcacaactaggcattcagtacagatttattaattgaatgactaaatagcagttgtgaatcagaacacaatggaatctatatctccaaaactttgtgatgaataaaactggctaaaatatgagaattttatgtaacttagtcacatatcataagattttctaagtagaattcatacttggttgtatgtcctaagatctttttagggaggtttcctctttctaaggggattcaaagatatcagtgaaacctgaaaattgtcttgggttaagtagtgcattgtggagtaccaaatggcatgaaagaacaaaactgctgtcattgtgactgccatagtcaatgtcaatgttggatatgactgcatgagctgacagcccctggagcatgtgaaatatatgaaatgcacactggacataacagagcatttttgcagggagctggaccaactcttttatatgactaagatgctatttgcaatttatataaaggaaaaaagcaaatatgctccatgcagtgcctaaaagagccctagtggcttccgggtagaaagccatcccacttctcttcagcagagcatgaaatcaacctactaccttttatcaggttacttacataaaggaattgtgcctattaataaaacatcatgcatcttatttctccaagagcaatgataaccaaactctcctttcccgttccctcttccttccttctctggggtcactttttgctgccctgtgttctgttcagcatgcattggccatgaggatcagattgttagtccagatgactttgaagtagtttttcttatggtaaggttttctcctaagtctgtagcatagaatccttgtttttgggttgatccatgcttaacctgaagatgatagaatgcaaattctgctttatatttgtgtatataaatattgcatcagtcacatgtccattttggtggcaacatcgtctgtggttttcttagctgccctgggattgaatttgcttaatcatgttcccttttctttcaggttgtgcttggcttcttgctgcccacacctactccatgatttcatgctaatttctgcccttcttctcagttagtgaaagcttccccgcactcattatcagcacacttgaatgtccacttagtgtcagacatacaatttttaaagtgagaatttcgtccaggacttttacaaagcctctcatgtggccactgactgcagttaaaaaactagcctgttagaatggtcaccttgacatcatagtccaaaagtgtcccaataatggatgtgccaaaaaattctgaaaccatcataggagttaaaaaatgagaacaccagcccacaaagaatggtatcacccaaacatttggaccaagtccacagtttttatatttttgtgccacatagcatagacagcctaatatatttaaagtaacacttaaaatgtactttagggattcaaattttagctgcttgtttctatttgctaatacagaacataaattttgaaaaaataaacttttaattgaaaattttacaaaaagtaaaataaaaaactgcttatatttccatccaagggaaagaagatacacatagtaaatactttaaatgtatgtatattctttcacccacttttaggatttatcctaagtataactagctgttttataaagatgttcatcatcattatttagagtaagaaaaaatgaacctaaatgttgacagataaaattcacggagtgagctatggtgcatgcacacagtggggaattatgcaggactgaacactatgtttaaaagcatttttaatggcatgtcaaacacttattctaatatggaaaatacagtgacttcgtggatatacaaaaacatcctcatttttgtgtaatcgtgtatcatatatgatcctaagtacgtaatastaaacatgagaaaaaatgcttgctaaaaacagaccaaaatgtagagggctgccactgtgtggtgtgatcggctgactttttgccttttaatttatattttgttggcacagaacattgttctcatgtgcccgaagagatttaaagatgatcttgagatgattagcctcctctcagagtcctgccggggtagataacagggaagattggggcaggtcagaggtgactctgggacgtttgtgcttggtgccctgctgcaagggacagcagctctgcagctccagcccactgtttgtcacaggtccttggtgactgtcttaccagttattttcaaattcaagataaaatggagatacagactttcacataaaactttctacatttaactaccagcaattacattttttgtcataaaacaaagggtaggtcaaacaaaacgtcttaagagtaaatctgtctacaatgtgttcaggaaacgaacacaggtcaggtttatgtggaagatatccagggcgtagcatatctgctggaagcatttcagtcatgagcacagctgggtattggccgtgaacctggtgtgcattgaatacacatccccgtggcccctacagtacattccctgtggatagtttattaggtttcctttattcccttcatctattcttccctttcctttcttccttcctctttttttgcctccctctctctcttcctgtctttattaaatatgtgggatgcagatttgatgaatatgtcaatcaaagatcaccaagaagtcttaaaacaggtaaaccacagaaaacagtcaggatcagaataagaacagtttagtggttctcaagctttttgttctcagaacttctttataatctaaaatgtgttgcgccccctgaaaagctttcacttttatgggataaaaataaatatttataaaatatatagtaaaaaatataaatatataaataaatttatgatttgtttatataaatatgtatataaaaccatatttatcatattaagatttgaaatggacaaatatttaaaatatttattagttaattttaaat

SEQ ID NO: 724922 - DNA, 3180 bp, Homo sapiens
  misc_feature 2168, 2169, 2170, 2171, 2172, 2173, 2174, 2175, 2176, 2177,2178, 2179, 2180, 2181, 2182, 2183, 2184, 2185, 2186, 2187,2188, 2189, 2190, 2191, 2192, 2193, 2194, 2195, 2196, 2197,2198, 2199, 2200, 2201, 2202, 2203, 2204, 2205, 2206: n = A,T,C or G
  misc_feature 2207, 2208, 2209, 2210, 2211, 2212, 2213, 2214, 2215, 2216,2217, 2218, 2219, 2220, 2221, 2222, 2223, 2224, 2225, 2226,2227, 2228, 2229, 2230, 2231, 2232, 2233, 2234, 2235, 2236,2237, 2238, 2239, 2240, 2241, 2242, 2243, 2244, 2245: n = A,T,C or G
  misc_feature 2246, 2247, 2248, 2249, 2250, 2251, 2252, 2253, 2254, 2255,2256, 2257, 2258, 2259, 2260, 2261, 2262, 2263, 2264, 2265,2266, 2267: n = A,T,C or G
aatggcgaataacatattagtattattataaaagtcattttggcctcctgttgccactgaaaaagtctcaggatgtcccaggggactttggcccacactttgagaatcaatgttcaggctcctttctgagctgattatgtagctgagcacgttgaacgtcatgtgattgagaacctgccccttccagccttcatctcttccattagcttccctaaaccattcattttttagggcattattttctatcaaatacaaacaccagtggaagagagaacacatgaagccattagtagtttaatgccttaatgtgaataaatttacttcatttcaatttgagagtccatggggtcacaaaggagatgaaagagaaagtacaagagccagacataaggttggaaagaaccctgtccccagtgaaaggccaattttttctttcacagcatcatcttggaacaacctgctttctggattcttagctcacaagtttgaaaaggagccattccctgatctattttaattgcttatcttcaaaaactatctgaactaaggtaccctgtggctactaccttccaatttaggactcaggtttccaggaaaagaaaagagttacaactactaataaaagtcagtcaaagtaactgctcctctttgaaagtctcagctcttattttagatatgggggttcacatgcaggtgtgttacatgggtgtattacacccagctagtgagtattgtacccctgggtagtttttcaatgcatgcccctcccttctttgccccccgcagtccacagcgcctgttgttcccatgtgyacgtccatgtgtgctcaatgcatagcttggagctcccacctataactgagaacatgcagtgtttaaatcccactaatttctatgaaaaagtatttctgttgataaccctgcaggaagctctttattaatgtcttcatcctttaaacctacttagccctatgctgctttagtcacctgtacttttttaaaaaactatttttttctctcattctgacttacttatccttacatgcattgctatttcttcattcctaaggaagtacgcattcgatttaagcatctgtgctaagacatccttggaaattaaattctagtcttttttaatggggcaaaatggaaatataatctcaggtaatgctttccagttcagcttactgctggtttttgcagatggaattataaacatacttaatcagagggaaattccaataaactttagccacagtatattcgtgcctttgcatgggaagagttgatctctcctcaagctagctgcagcctgcgtcttctgagggaagagctgtcttcacttgcgtgggatgaatttgagagatcactggccttgccgtctgagagtgcggtccctgagctgggaggattctgccgagattaggtcatgcaatcagcctgaggtgccaccatgggggtgagctcaaattatagttttgggaccatgcctgagtttagtcagcaaaagtaattcacaccagagggggaatgtgcaagaggtcaataacagaatgagaaatcaggggcagggaaaatgcaggttgtgaaagacgatgaagtgatgattagaggcaggctagggtggcctaccaatggtgaagtcctgggagtgaagaagacgtttgcttcataaataaagaaagacttctgtgctgcaggagaatcaactgttgagaggggtgaatggatgcagagtagtttccctgttaccacgtccaaacagatgtttatttgctggtaactgccatttcaaaaataccaccggaatactcattatttaaatgtttttgttacaccacaactttggaaaacatctctaagccaggcatataagccaaggttacatagtatgtcaggaaaggtataaccattaaattaattaactgtgttttgtctatgatttttaagaaaaaaatctatattttctgcgagtagtgagcaatacttatcaattggttagtcacttgtgtctgcgagtttcatcaccagcatgatcggaaaggtatctcccctcagcttcatttgcaaggaggcctgagtcgctctcagcctccccatttttgtgctgcagcttctggggagcccctggcccacaaaacccagaacatcccctgccgacagggtgnnnnnnnnnnnnnnnnnnnnnnnnnnnnnnnnnnnnnnnnnnnnnnnnnnnnnnnnnnnnnnnnnnnnnnnnnnnnnnnnnnnnnnnnnnnnnnnnnnnntatagcagtgtgtcagtgtgctgtgtgacgtgttttcatgtgtatatgactatttgcatgttatagcagtgtgtcagtgtgctgagggaggtgttttagtgtatatgactatttgcatgtcttctgcacactagatggagtgcagagtgtgttgcctgtttttctccaccgctccatcctcagtgcctgctacagtgttggacacacagtaggggttcagtaaatgctaatgaacagttgattaaatgagcaaaaacctttattgaatacctaccatgttccagacatggctaactgatgagaatttaccaattacatgcttgctgccttcagggagctcaacctcacaagacagaccgtcatgtagagacaactgctacacaacatgggaagaactgctagagatgtaaagatgtaaagacccaaaatgaagaagccagaacacatgaacacaaaaccagccaaccaacaaacacaagcagcatggagcatagagtctggggaccaactgcatggtgctgaggaatgcaggtggaggcagagtggaaatcacctgagtttccatcaggcagagttgcacttgaatttgagttctggcacttgctgagcctctctgattctgtcttctgtaaaataggagtaataatatttatttatatctaccgtacaggcaattgtgagatttacttaagacatactgtcttagtccatttttctgttgcttataacagaatacctgaaactaggtgacttatttttaaaaagcttatttcttagagttacgaaggctgagaagtccaaggatgggggtctgcagctggtgagggccttcttcctgacgggaaatcagaagagccctaaggtggttcagagcaccacatggcaaggggccgaggatgctagcgtgttagct

SEQ ID NO: 724923 - DNA, 3180 bp, Homo sapiens
  misc_feature 2168, 2169, 2170, 2171, 2172, 2173, 2174, 2175, 2176, 2177,2178, 2179, 2180, 2181, 2182, 2183, 2184, 2185, 2186, 2187,2188, 2189, 2190, 2191, 2192, 2193, 2194, 2195, 2196, 2197,2198, 2199, 2200, 2201, 2202, 2203, 2204, 2205, 2206: n = A,T,C or G
  misc_feature 2207, 2208, 2209, 2210, 2211, 2212, 2213, 2214, 2215, 2216,2217, 2218, 2219, 2220, 2221, 2222, 2223, 2224, 2225, 2226,2227, 2228, 2229, 2230, 2231, 2232, 2233, 2234, 2235, 2236,2237, 2238, 2239, 2240, 2241, 2242, 2243, 2244, 2245: n = A,T,C or G
  misc_feature 2246, 2247, 2248, 2249, 2250, 2251, 2252, 2253, 2254, 2255,2256, 2257, 2258, 2259, 2260, 2261, 2262, 2263, 2264, 2265,2266, 2267: n = A,T,C or G
aatggcgaataacatattagtattattataaaagtcattttggcctcctgttgccactgaaaaagtctcaggatgtcccaggggactttggcccacactttgagaatcaatgttcaggctcctttctgagctgattatgtagctgagcacgttgaacgtcatgtgattgagaacctgccccttccagccttcatctcttccattagcttccctaaaccattcattttttagggcattattttctatcaaatacaaacaccagtggaagagagaacacatgaagccattagtagtttaatgccttaatgtgaataaatttacttcatttcaatttgagagtccatggggtcacaaaggagatgaaagagaaagtacaagagccagacataaggttggaaagaaccctgtccccagtgaaaggccaattttttctttcacagcatcatcttggaacaacctgctttctggattcttagctcacaagtttgaaaaggagccattccctgatctattttaattgcttatcttcaaaaactatctgaactaaggtaccctgtggctactaccttccaatttaggactcaggtttccaggaaaagaaaagagttacaactactaataaaagtcagtcaaagtaactgctcctctttgaaagtctcagctcttattttagatatgggggttcacatgcaggtgtgttacatgggtgtattacacccagctagtgagtattgtacccctgggtagtttttcaatgcatgcccctcccttctttgccccccgcagtccacagcgcctgttgttcccatgtgcacgtccatgtgtgctcaatgcatagcttggagctcccacctataactgagaacatgcagtgtttaaatcccactaatttctatgaaaaagtatttctgttgataaccctgcaggaagctctttattaatgtcttcatcctttaaacctacttagccctatgctgctttagtcacctgtacttttttaaaaaactatttttttctctcattctgacttacttatccttacatgcattgctatttcttcattcctaaggaagtacgcattcgatttaagcatctgtgctaagacatccttggaaattaaattctagtcttttttaatggggcaaaatggaaatataatctcaggtaatgctttccagttcagcttactgctggtttttgcagatggaattataaacatacttaatcagagggaaattccaataaactttagccacagtatattcgtgcctttgcatgggaagagttgatctctcctcaagctagctgcagcctgcgtcttctgagggaagagctgtcttcacttgcgtgggatgaatttgagagatcactggccttgccgtctgagagtgcggtccctgagctgggaggattctgccgagattaggtcatgcaatcagcctgaggtgccaccatgggggtgagctcaaattatagttttgggaccatgcctgagtttagtcagcaaaagtaattcacaccagagggggaatgtgcaagaggtcaataacagaatgagaaatcaggggcagggaaaatgyaggttgtgaaagacgatgaagtgatgattagaggcaggctagggtggcctaccaatggtgaagtcctgggagtgaagaagacgtttgcttcataaataaagaaagacttctgtgctgcaggagaatcaactgttgagaggggtgaatggatgcagagtagtttccctgttaccacgtccaaacagatgtttatttgctggtaactgccatttcaaaaataccaccggaatactcattatttaaatgtttttgttacaccacaactttggaaaacatctctaagccaggcatataagccaaggttacatagtatgtcaggaaaggtataaccattaaattaattaactgtgttttgtctatgatttttaagaaaaaaatctatattttctgcgagtagtgagcaatacttatcaattggttagtcacttgtgtctgcgagtttcatcaccagcatgatcggaaaggtatctcccctcagcttcatttgcaaggaggcctgagtcgctctcagcctccccatttttgtgctgcagcttctggggagcccctggcccacaaaacccagaacatcccctgccgacagggtgnnnnnnnnnnnnnnnnnnnnnnnnnnnnnnnnnnnnnnnnnnnnnnnnnnnnnnnnnnnnnnnnnnnnnnnnnnnnnnnnnnnnnnnnnnnnnnnnnnnntatagcagtgtgtcagtgtgctgtgtgacgtgttttcatgtgtatatgactatttgcatgttatagcagtgtgtcagtgtgctgagggaggtgttttagtgtatatgactatttgcatgtcttctgcacactagatggagtgcagagtgtgttgcctgtttttctccaccgctccatcctcagtgcctgctacagtgttggacacacagtaggggttcagtaaatgctaatgaacagttgattaaatgagcaaaaacctttattgaatacctaccatgttccagacatggctaactgatgagaatttaccaattacatgcttgctgccttcagggagctcaacctcacaagacagaccgtcatgtagagacaactgctacacaacatgggaagaactgctagagatgtaaagatgtaaagacccaaaatgaagaagccagaacacatgaacacaaaaccagccaaccaacaaacacaagcagcatggagcatagagtctggggaccaactgcatggtgctgaggaatgcaggtggaggcagagtggaaatcacctgagtttccatcaggcagagttgcacttgaatttgagttctggcacttgctgagcctctctgattctgtcttctgtaaaataggagtaataatatttatttatatctaccgtacaggcaattgtgagatttacttaagacatactgtcttagtccatttttctgttgcttataacagaatacctgaaactaggtgacttatttttaaaaagcttatttcttagagttacgaaggctgagaagtccaaggatgggggtctgcagctggtgagggccttcttcctgacgggaaatcagaagagccctaaggtggttcagagcaccacatggcaaggggccgaggatgctagcgtgttagct

SEQ ID NO: 724924 - DNA, 1427 bp, Homo sapiens
tataaaaatattaacaacaaataaaatttgtatgctcttcattcgttggtccatcttttgtcagtttaattcacaaattaagctgcagaacctaagaggatggaggaaaagttttcctttcttacaagatcatgcagcatctgcttcacttactgaggagccccgagccaccatgtataaaatctgaatacccgaagacccccgtactgtgaggaagcccgaccacatggagaggccacatgaaggttctcaaatcagaaccccagctgaggtcccagcctacaaccagtatcaaccaccagacatgtgagtaatgatgtttccagttgattccaaccaacagcctttgggtcacctccagcctttgratctttgcatctgaaatgccacgcatgacagagcagatacaagcatttctgctgtgtcctgtccaagtctctgactgatagaatctgggcttgttctaggcacctgagtcttgaggttgtttgttacacagccttagtaacttgaacaacggttatgcaacacttgagctagaccttgaaagatgaatggggatttttgtctagcaaaactgtttggaaaaggcttaatattttaggagaaaagttaaaaggtaagtgtggttaacacatgggttgtgggagagaatcaggagatgagatgaaaaaagttgatgtaagaaagtgtgctgtatggtttggtgaaaattataatatatttgttcatcagcataggcaattttcttccagaccactggctttgaaatgatgtatttttaaaattgcaaagtttataccatagaatttctggagccttctgaaatttcaattggagataaaacaggacttcaaaatgtaacttctcttaaattatgagctatggtttaactgatgagtaatttttagttttattgttggttaaaaacacactgtcattcccatgagtgctcgcatgcagttttagcatgtgtgtgtatgtctcttttattttttgttttgttttgttttgttttgttttgttttgtttgcggtgagcaggttggtatcagagttatgaatgagaagcattcttatcagaatatactggatactaatacattttgcatgtaattttctacagaggtaatgattttaatcaactttcaagatgaagcaccacatttgtcaaggcagaagacccaaatgtgcaattttttcttaggggaaaactggctataatgaatgtgctaaaatatgttagttatctactaacctcaatacgcaagaaagcactagatcatcagtttgcctggtaagggaaaaaacagcggctgcagcctgcccagctaaagaagaaagtggaatcagcagaacaagtggcctgtgaagatgccagcttgtgagaaatgcctggctgactgtgaacagggatattattaaatg

SEQ ID NO: 724925 - DNA, 1427 bp, Homo sapiens
tataaaaatattaacaacaaataaaatttgtatgctcttcattcgttggtccatcttttgtcagtttaattcacaaattaagctgcagaacctaagaggatggaggaaaagttttcctttcttacaagatcatgcagcatctgcttcacttactgaggagccccgagccaccatgtataaaatctgaatacccgaagacccccgtactgtgaggaagcccgaccacatggagaggccacatgaaggttctcaaatcagaaccccagctgaggtcccagcctacaaccagtatcaaccaccagacatgtgagtaatgatgtttccagttgattccaaccaacagcctttgggtcacctccagcctttgaatctttgcatctgaaatgccackcatgacagagcagatacaagcatttctgctgtgtcctgtccaagtctctgactgatagaatctgggcttgttctaggcacctgagtcttgaggttgtttgttacacagccttagtaacttgaacaacggttatgcaacacttgagctagaccttgaaagatgaatggggatttttgtctagcaaaactgtttggaaaaggcttaatattttaggagaaaagttaaaaggtaagtgtggttaacacatgggttgtgggagagaatcaggagatgagatgaaaaaagttgatgtaagaaagtgtgctgtatggtttggtgaaaattataatatatttgttcatcagcataggcaattttcttccagaccactggctttgaaatgatgtatttttaaaattgcaaagtttataccatagaatttctggagccttctgaaatttcaattggagataaaacaggacttcaaaatgtaacttctcttaaattatgagctatggtttaactgatgagtaatttttagttttattgttggttaaaaacacactgtcattcccatgagtgctcgcatgcagttttagcatgtgtgtgtatgtctcttttattttttgttttgttttgttttgttttgttttgttttgtttgcggtgagcaggttggtatcagagttatgaatgagaagcattcttatcagaatatactggatactaatacattttgcatgtaattttctacagaggtaatgattttaatcaactttcaagatgaagcaccacatttgtcaaggcagaagacccaaatgtgcaattttttcttaggggaaaactggctataatgaatgtgctaaaatatgttagttatctactaacctcaatacgcaagaaagcactagatcatcagtttgcctggtaagggaaaaaacagcggctgcagcctgcccagctaaagaagaaagtggaatcagcagaacaagtggcctgtgaagatgccagcttgtgagaaatgcctggctgactgtgaacagggatattattaaatg

SEQ ID NO: 724926 - DNA, 1427 bp, Homo sapiens
tataaaaatattaacaacaaataaaatttgtatgctcttcattcgttggtccatcttttgtcagtttaattcacaaattaagctgcagaacctaagaggatggaggaaaagttttcctttcttacaagatcatgcagcatctgcttcacttactgaggagccccgagccaccatgtataaaatctgaatacccgaagacccccgtactgtgaggaagcccgaccacatggagaggccacatgaaggttctcaaatcagaaccccagctgaggtcccagcctacaaccagtatcaaccaccagacatgtgagtaatgatgtttccagttgattccaaccaacagcctttgggtcacctccagcctttgaatctttgcatctgaaatgccacgcatgacagagcagatacaagcatttctgctgtgtcctgtccaagtctctgactgatagaatctgggcttgttctaggcacctgagtcttgaggttgtttgttacacagccttagtaacttgaacaacggttatgcaacacttgagctagaccttgaaagatgaatggggatttttgtctagcaaaactgtttggaaaaggcttaatattttaggagaaaagttaaaaggtaagtgtggttaacacatgggttgtgggagagaatcaggagatgagatgaaaaaagttgatgtaagaaagtgtgctgtatggtttggtgaaaattataatatatttgttcatcagcataggcaattttcttccagaccactggctttgaaatgatgtatttttaaaattgcaaagtttataccatagaatttctggagccttctgaaatttcaattggagataaaacaggacttcaaaatgtaacttctcttaaattatgagctatggtttaactgatgagtaatttttagttttattgttggttaaaaacacactgtcattcccatgagtgctcgcatgcagttttagcatgtgtgtgtatgtctcttttattttttgttttgttttgttttgttttgttttgttttgtttgyggtgagcaggttggtatcagagttatgaatgagaagcattcttatcagaatatactggatactaatacattttgcatgtaattttctacagaggtaatgattttaatcaactttcaagatgaagcaccacatttgtcaaggcagaagacccaaatgtgcaattttttcttaggggaaaactggctataatgaatgtgctaaaatatgttagttatctactaacctcaatacgcaagaaagcactagatcatcagtttgcctggtaagggaaaaaacagcggctgcagcctgcccagctaaagaagaaagtggaatcagcagaacaagtggcctgtgaagatgccagcttgtgagaaatgcctggctgactgtgaacagggatattattaaatg

SEQ ID NO: 724927 - DNA, 1427 bp, Homo sapiens
tataaaaatattaacaacaaataaaatttgtatgctcttcattcgttggtccatcttttgtcagtttaattcacaaattaagctgcagaacctaagaggatggaggaaaagttttcctttcttacaagatcatgcagcatctgcttcacttactgaggagccccgagccaccatgtataaaatctgaatacccgaagacccccgtactgtgaggaagcccgaccacatggagaggccacatgaaggttctcaaatcagaaccccagctgaggtcccagcctacaaccagtatcaaccaccagacatgtgagtaatgatgtttccagttgattccaaccaacagcctttgggtcacctccagcctttgaatctttgcatctgaaatgccacgcatgacagagcagatacaagcatttctgctgtgtcctgtccaagtctctgactgatagaatctgggcttgttctaggcacctgagtcttgaggttgtttgttacacagccttagtaacttgaacaacggttatgcaacacttgagctagaccttgaaagatgaatggggatttttgtctagcaaaactgtttggaaaaggcttaatattttaggagaaaagttaaaaggtaagtgtggttaacacatgggttgtgggagagaatcaggagatgagatgaaaaaagttgatgtaagaaagtgtgctgtatggtttggtgaaaattataatatatttgttcatcagcataggcaattttcttccagaccactggctttgaaatgatgtatttttaaaattgcaaagtttataccatagaatttctggagccttctgaaatttcaattggagataaaacaggacttcaaaatgtaacttctcttaaattatgagctatggtttaactgatgagtaatttttagttttattgttggttaaaaacacactgtcattcccatgagtgctcgcatgcagttttagcatgtgtgtgtatgtctcttttattttttgttttgttttgttttgttttgttttgttttgtttgcggtgagcaggttggtatcagagttatgaatgagaagcattcttatcagaatatactggatactaatacattttgcatgtaattttctacagaggtaatgattttaatcaactttcaagatgaagcaccacatttgtcaaggcagaagacccaaatgtrcaattttttcttaggggaaaactggctataatgaatgtgctaaaatatgttagttatctactaacctcaatacgcaagaaagcactagatcatcagtttgcctggtaagggaaaaaacagcggctgcagcctgcccagctaaagaagaaagtggaatcagcagaacaagtggcctgtgaagatgccagcttgtgagaaatgcctggctgactgtgaacagggatattattaaatg

SEQ ID NO: 724928 - DNA, 618 bp, Homo sapiens
attgacataaatggatcctggctgtgctcatggctagctgcgcctttcacctgtgaaatttcgttacgggagtttgtgaagtagccatttctcggaggcaaagacagaattgtcccagaaatacagaacacttgttattagacgggcttttacaatttaattcttggaatgttgctctccattgaagaatagttaatcattggtagaracatgtcagtcgcacactgcagcttatatacagtcatgtgtagcttaatgaccaggatttgctctgagaagtgtgtctttaggtgatttcatcattgtgcaaacatcatagagtgtccttgcctaaaccaggatggtagagcctctcacacacctaatctgtatgataaagtctattgctcctaagctacaagcagcagggtactgtactgaatactgtaggcagttgtaacacaatggtaagtatttgtgtatctaaacatagaaaaggtacaataaaaatacagtactataatcttatgagaccactgttgtacatgtggtctgtcatcgactgagacgtcatggggcacatgaccatattacatgttttagaatcaagattagactctaagctttccaacaacccta

SEQ ID NO: 724929 - DNA, 657 bp, Homo sapiens
tgtctacggtgaggggaggtgggaagagggagagggcaaggaaggagaaggaagcaaagacacttaagaaacatcacttgctttgaagttagtgcaaaactaatattttgggtaaaaagcttttcctttgccagagcaaatatttgattgcttcaattcttctaaaatattctgttttcttcttgtttcagcatctagtaaattttgggcagtcctatttagcaaaagagaatgaatccaatcagcatgtctcagaaggtacagcaatagggttggaggaaaaataatgtatgagaaaagtgaactgcagtgtgcttttaactcatttataacagttaatcaaactaaatatctgactggcaaattaaccactttgaagatattttgtcaygagagtgatggtggcgaaaggtacaggtgataccttgtatgtgccagtcagccatttatcttactggccagccagaaaatggctttcattagttatatagctttatggaactaaactcatttctttgaggtgtgatggcacaataaagagaatattcccatgcgactgaggccaatcttctgttttgcccaataggccactttccgagtgatagcattttcaaaatttgaggtttgtagggccagtcgctgaggccgatgactgca

SEQ ID NO: 724930 - DNA, 657 bp, Homo sapiens
tgtctacggtgaggggaggtgggaagagggagagggcaaggaaggagaaggaagcaaagacacttaagaaacatcacttgctttgaagttagtgcaaaactaatattttgggtaaaaagcttttcctttgccagagcaaatatttgattgcttcaattcttctaaaatattctgttttcttcttgtttcagcatctagtaaattttgggcagtcctatttagcaaaagagaatgaatccaatcagcatgtctcagaaggtacagcaatagggttggaggaaaaataatgtatgagaaaagtgaactgcagtgtgcttttaactcatttataacagttaatcaaactaaatatctgactggcaaattaaccactttgaagatattttgtcatgagagtgatggtggcgaaaggtacaggtgataccttgtatgtgccagtcagccatttatcttactggccagccagaaaatggctttcattagttatatagytttatggaactaaactcatttctttgaggtgtgatggcacaataaagagaatattcccatgcgactgaggccaatcttctgttttgcccaataggccactttccgagtgatagcattttcaaaatttgaggtttgtagggccagtcgctgaggccgatgactgca

SEQ ID NO: 724931 - DNA, 622 bp, Homo sapiens
aaaaattaaatggggaatgaagaaaataaaggagaaaatgagaaaagaaatagggaagggagaaaggtaaaaaataaatggcatgccaatcattaactctaaaatccaggtggagagatatatcaaaccaggcaggcaggccaaattagtcagagcaatgtttgctggccactataacaagcaacccaaaatctcagtggcttaaaataaarcttacgtctttctcattcgaagtcattgtcccttcagtggccctacttggttggtctcctccgagtggtaactcagagataggagctgcttccatactataactctgccacctggaacatgtgggttcctggattcccacaggaggaaagaagagagtagtgtcttatggtcaactctggaagtggccagcgttccatctacacagcactggtcagaacacggtcataggctcccaacatcacccataagggagtctgggaaatgtagtcttttcaggtttccaacaagtgggggccacgcgatgaggaaaacaaggagttcaattctggacaaatcaatcggaatcgaccactcttgtcacacaggagcacacaatctgtgtgagcagacagaaaaggctccatgaaaa

SEQ ID NO: 724932 - DNA, 986 bp, Homo sapiens
atataccttttaagagactgaaaaaagtagaaaataacaaaagtgtgatcaacttgttctatcataattcagtaacaacaatagatagcaagatatgttcataattatactaatcttccctgcctttcatgatttctcagtcagtggcttccctgggtcatgggacagactctggccaatgggatgagtgggcatgacatttgctacatcaaagcaaaagttttaaatgctattatttaatctggaggcttattcacttccgctctcaactgtgagaacagcatgttccatgcagtggcaattcctcctgcttggattctgaaatgctaaaacatgtggatccctgcctgcaaacccacaggacccaggacaactgccctcatagagcaggagcaaaaaataaacatgtgttaattgtaagcccctgagaatttgagaatcattttcctctaggtagcctaacctagaggaaaacgactactaacagagttgtcaggggagcataagagtctctagacagaggagcctcttgaggaaatcctgagatttaagaaggcatacatttctttggaatgttatgtatgaaaggaatgaagaagagataggattaataaaagaagtaaagaaatttagcatttaggtgtgccttgattgttttatttttgtaactragttattcttttatttacgttggtgatagctcaaatatcaattaattttctagagttccctacaacacttgaattacatattctcctgtggttgagatgataatgcattttcacttccaaaaaggtactttatctgttatatgttaaacttacattccttaattatacaatgtcacttattttgtattatggagaagcaatgctttcaaattcacactgccatgatgtttttctaaacaggacttgcttctgttctgttgtaatcttagataaacagatataacttagaataagtagaaagtatacctaactttg

SEQ ID NO: 724933 - DNA, 605 bp, Homo sapiens
ttctcttgcctgtcaccatgtaagacgtgcatttcactttctgccatgatggaggtgcctccccagctatgtggaactgtgagtccattaawcctcttgttttaaaacaaattacccagtctcaggtatgtctttatcaacaatgtgaaaatggactaatacagtgctgtttgaccaatacttccatgtttctgctttccagacacatggaacagtggtacttgctatacttttgaaattagatgtgaccacattgcttgctttgcttaataaaatataagtgaaatgtgtcatatcaatgtggaagctttaagagactatgtattactctctgtgtgtcttcctcagtaccatattgattgtaaaagtgcttttcaaggcagagcctccatcagccaggtgtcctgagtgagtgtgagttagaacactgggcatgtagtgattttgagaaataaatctgattttaacttaggtgcttgctgtgtttcttttgctgggcagaagccatttagtttaattaagtcccatctattgatctttgtttgtggtgcatttgcttttgggttcttggtcatgaaatcttgtaaattttgacaaatgtttaa

SEQ ID NO: 724934 - DNA, 605 bp, Homo sapiens
ttctcttgcctgtcaccatgtaagacgtgcatttcactttctgccatgatggaggtgcctccccagctatgtggaactgtgagtccattaaacctcttgttttaaaacaaattacccagtctcaggtatgtctttatcaacaatgtgaaaatggactaatacagtgctgtttgaccaatacttccatgtttctgctttccagacacatggaacagtggtacttgctatacttttgaaattagatgtgaccacattgcttgctttgcttaataaaatataagtgamatgtgtcatatcaatgtggaagctttaagagactatgtattactctctgtgtgtcttcctcagtaccatattgattgtaaaagtgcttttcaaggcagagcctccatcagccaggtgtcctgagtgagtgtgagttagaacactgggcatgtagtgattttgagaaataaatctgattttaacttaggtgcttgctgtgtttcttttgctgggcagaagccatttagtttaattaagtcccatctattgatctttgtttgtggtgcatttgcttttgggttcttggtcatgaaatcttgtaaattttgacaaatgtttaa

SEQ ID NO: 724935 - DNA, 597 bp, Homo sapiens
acatatttattttgtgtagtgtgaacataatgaattaatttgcatttacatgtacaccacatgtatgtctaaaatacttttatggaatgtatcattttttttccttaacaaacacttaagaatcttaccagaaaatattttcaagaggagtgaaatctgttctttatgtgcgcatgttcactagaaacatttttctgaacactttacatgttttttgaagtcttgctttacagatcaaagcatttctacattttaagttttagtgacttttcattttattattttgaaaaagttatcagagaatgtcattaaacttatatttcctatcaggttgagatattttgaatttggactctatcttctgtttatgaaatgtctcttttttcattaattgtactaagcagcccgatgagggkagcagcattgcattttttgaccacaaatatatgaatgctctacttttgactgtaagaaaaataattgattgaaatctggattttattttaaccacaaatatagccacctttgtgttttgtagaaaactttttgtaagtatataaccttttcattttcagttaaaaatggaaaaatagtaac

SEQ ID NO: 724936 - DNA, 608 bp, Homo sapiens
aatggactaaaaatgcctgctaaatattaacgatttttgcttttagatggagtaatttttgaaatggactaaaaatacctgctaaatattgatgacaaaatgtacagttagaactgacttaaatgattataaacagaagtgactttacataaaccagtgaagcttatgtctaaagacttttatttgcataggcctctaaggccccctagcaatttttttttttttttttgagatggagtttcactsttgttgcccaggctggagtgcaatggcgccatctcagcccattgcaacctctgccttccaggttcaagcgattctccggcctcagcctcctaagtagctgggattacaggcgtgcaccaccacgcccagctaattttgtattcttagtagacacagggtttcaccatgttggtcaggctggtctcaaactcctggcctcaagtgatccacccgccttggcctcccaaagtgctgggattacaggcatgagccaccgcgcccagccacccctagtaattttgtactcataattttatattcttttttgtaaacaagggccctcaaattgtgggaaagaaagttctgaattataagtcagaaga

SEQ ID NO: 724937 - DNA, 2097 bp, Homo sapiens
gagttaaactatctccaaggtctctggcgactctgacattgtagttctttcagtacactcataatatacaataaattgtgaacaaacaagtaccacctatgagcccaattacgaagagaaaatgtaactaaaataaaaaataatggccacgtgcggtggctcacgcttgtaatactagcactttggtaggccgaggcgggtgaatcaagtcaggagttcgagaccaacctggccaacatggtgaaaccccgtctctaataaaaatacaaaaaaaattagctgggcgtggtggcgggcgcctgtaatccagctactcaggaggcctgaggcagaagaatcgcttgaacctgggaggcggaggttgcagtgagccaagatcgcgccactgcactccagcctgtgccacagagtgagactttgtctcaaaaaacaacacaaaactcattagagaaactcagcaagttacaaaaaaataataattaaaagggtctttaacgctgagcccttaaagtctttttttttcttttttttttaagacagtcttgatctgtcactcaggctggagcacaatggcgcgatctcagctcactgcaacctccacctgccgggttcaagcaattctcttgcctcagcctcctgagtagctgggactacaggcgcgcgccaccatgcccagttaattttttgtattttcagtagaggcggggtttcaccttgctggccaggctggtctcgaactcctgatctcgtgatccgcccgccttggcctcccaaagtgctgggattacaggcgtgagccaccgcgctcagactttaaagtccattttaagtctagacttctatgaaggtagactgccgagatgtaaaagaaataaaattagttatttagcttttagatcggattacattttctgctttgattattctaaagcctccagtaaggcgtaaagggaaagctctaagtagcgcatcctgggaaatgagcagatcagggaaggggtgttagacctggtattatgtctaaagacgattttcatttaaaggaggatcttcccccgggcagctcaaggtcacatcgtaaataccttatagtctaattcagtgtcccaaaacaggacccygactccccagatccgggttgggggtggctcagggcctaaagttcctaccctcgcccaggtgacaccatctccaggaaggtctgcacccgacccggcgaagcgctgtcccgcttcgcaccccccactgctccaggtacgtgcggcggcctcctcgggagaccccgccactttcctggagcgtagcctgccaccccccgtccgggaaccccggattctcacggcagagaacagacaccatacttaagcacaggctctcgcatccgacatcagtacaaggctgggggttgttgggggacggttgagccttgggagggagggtcagggtctggacaggagccgcggccgccagatgggaaagaacacgtgggagcagtaatgtcaagtgacacttaaacccttagacgccgattcgttataacgcgaggaaatctagaagaaaaagcaggtaccatcagcgaattctaaaatctcctaaggattaacttcggttattttctgcttagacaacgctttctattcccgacttcctctccaataatgacccgaatctgtcgaaacttcttggaagcctaatttacctaatcccacgtccctaacggtcttcggaagcgaagcagtgtcaacagtccctggtaaacacaagtagtattacaagtcgggagctcttcaagtcttggatgagactgtagagcggtcttgtgcggcaatgtgctaccttaaaataaataaataaataaacccctgttatgtccggagtttgtttccacccggagaggaatggaagagcaccagagagcgcttagctttctggttggatgttttgggtgagtttcttggcgcgcatgcgtgttgtgtctcaagggcgggtttgaagggaagtgggtgttgacctgcgggcaactgacgctgttgtcagattacacccacgacggtgcgggtctcgggcgttctggagatacgtaggggtgaatttatg

SEQ ID NO: 724938 - DNA, 1074 bp, Homo sapiens
tttattgcccatttggctatcaacagaattgttgtgttctctgtagttcctgaggcgtctatgctccgattgctgattgtgctgcctcttgctattgtcggattatttcttcttgggtttcatagtttgggcttgtgaactcatcagcagagctttggcctttggaatcctgttgggagtgaggttgaaggttcgtccccacaacattgttctatgactgcttttgtgtggtgtcctggggctggcctgggactaatctgtatgcttatcagcttgtgggattcttagcccatgttggtagattaattccaactccaagcacaagttatttgtagtctggggttttataatcttgggtttttgttttatttttcctcctagagccccggcctaggcaggcgagaaccccagtctcagtgagagaatcctgaagctgctgtcctttgagggatctggctctctggagccattttggtttggactccccaccgagaataggaccatggccttattgcctattgctatgtgtgagtatggaaaccccagccgaggggccaccaacctgacatccccttstggcaacctctcagggcacacatgaatcggcacatgcaatttcatttgtctcttatgtttgttttttgaattttctctttctttcttgcaagctcacctgtcatataacggcttttttagttacttttaaacttaccatctgtaggtacttatagcgaaataattttcaggttacaggttatctggatccttctggaacatgaagtgtgaagcccttttacactgttttcagggggtggagccccctgcagactcctagctcatctatggttttaagatggcattcccaggagtttctgggaccctggctctactggggaaaccatccaggatgcttactgagagcctgtctcatcttgttcattgaatgtttttgggccccatttatccttttgaactgtaacaactaaaatcctgccctctcttccaataacctcttttcaaacaatgaaccccaagtatgtctttttttccgtttgtgagctgccattaagatgt

SEQ ID NO: 724939 - DNA, 1534 bp, Homo sapiens
cactgcctttatgagctgtaacattcactgcaaaggtctgcagtttgactcctgaagccagcaagactacgaacccaccgggaggaaggaacaaccccagacgcgctgccttaagagctgtcacactcaccgggaaggtctgtagagtcactcctgaagttagtgagaccacaaacccaccaggaggaggaaactccgaacacagctgaacattagaaggaacatagtccagacatgccacctttaagaattgtaacactcaccgtgagggtcggcggcttcattaagtcagtgagaccaagaacacaccaattccgaacacacttacagaatttctgtgtgactgggtggggatggtcattgctattttacacatgaaaaacgaagacttgtggaggataaacaacctgctagagtcgcacaattcagtccagtgctgctaccgtcccggtttcgttacgaggagtccccgcatggaaagcaaggctctccttctctcctaagaacccccatctaccttcagggccagtcctgccctcccttgggaagaagctgcttcggcatgtttctgagctcctcatcgtgtgaaaagcatccactagcgctggctggatggaggctgaggctcgttttcacctgcatgagaggatagctgcctccaaggaccgggaggatgcgtgctgcacgtggtgcctgggccacaggcacgctgaggcagctcccagtttctacttcactcccagcaaacacgggcaaaagccctatcacagtgtattttcttcttcccctgcctcccatatgctcaacatacctaccttttgtcktgttttagaggaaaataagattgtataacccaagactacttgttagagtctgccttccagagctcttccaagccaaccttggtgaatgggagtgacaagataccaagtgaataatgttaccaaagtcctaaagggaagaggggactctccacagtcttcccttagtgagttatcaagttcatcaccagctcactgctcttctggaaaatcagcaaaattgctgtaaatgtactttaaaatacttaaaatgtctttctaagcaataaaatatcactacttagaaagtaagtgtctttgtgctgttattgagaagtaaataaacaggcagtttgatagaaataagatttacacataggtagtaactagacctcacatttgggtattgcttttttcctacttccttttcatcatagatactaggattatagatttaatttattatacctaaaataagccttgcaacaggaaatattcattaaggatttaaatgccttcatatgctttcctactgttcacctgcttgatctgaggccacgcctttctatttcagaaagaaggaataaaaaaaccacttaccctctaagatatttaatttaagatcatttgaattgtattagttttagaaaggggacttttactctgtttccaaaaaccgagtgagtgcagagaatgtgtccactgagtgagatcacacagaagggagagactgg

SEQ ID NO: 724940 - DNA, 1534 bp, Homo sapiens
cactgcctttatgagctgtaacattcactgcaaaggtctgcagtttgactcctgaagccagcaagactacgaacccaccgggaggaaggaacaaccccagacgcgctgccttaagagctgtcacactcaccgggaaggtctgtagagtcactcctgaagttagtgagaccacaaacccaccaggaggaggaaactccgaacacagctgaacattagaaggaacatagtccagacatgccacctttaagaattgtaacactcaccgtgagggtcggcggcttcattaagtcagtgagaccaagaacacaccaattccgaacacacttacagaatttctgtgtgactgggtggggatggtcattgctattttacacatgaaaaacgaagacttgtggaggataaacaacctgctagagtcgcacaattcagtccagtgctgctaccgtcccggtttcgttacgaggagtccccgcatggaaagcaaggctctccttctctcctaagaacccccatctaccttcagggccagtcctgccctcccttgggaagaagctgcttcggcatgtttctgagctcctcatcgtgtgaaaagcatccactagcgctggctggatggaggctgaggctcgttttcacctgcatgagaggatagctgcctccaaggaccgggaggatgcgtgctgcacgtggtgcctgggccacaggcacgctgaggcagctcccagtttctacttcactcccagcaaacacgggcaaaagccctatcacagtgtattttcttcttcccctgcctcccatatgctcaacatacctaccttttgtcttgttttagaggaaaataagattgtataacccaagactacttgttagagtctgccttccagagctcttccaagccaaccttggtgaatgggagtgacaagataccaagtgaataatgttaccaaagtcctaaagggaagaggggactctccacagtcttcccttagtgagttatcaagttcatcaccagctcactgctcttctggaaaatcagcaaaattgctgtaaatgtactttaaaatacttaaaatgtctttctaagcaataaaatatcactacttagaaagtaagtgtctttgtgctgttattgagaagtaaataaayaggcagtttgatagaaataagatttacacataggtagtaactagacctcacatttgggtattgcttttttcctacttccttttcatcatagatactaggattatagatttaatttattatacctaaaataagccttgcaacaggaaatattcattaaggatttaaatgccttcatatgctttcctactgttcacctgcttgatctgaggccacgcctttctatttcagaaagaaggaataaaaaaaccacttaccctctaagatatttaatttaagatcatttgaattgtattagttttagaaaggggacttttactctgtttccaaaaaccgagtgagtgcagagaatgtgtccactgagtgagatcacacagaagggagagactgg

SEQ ID NO: 724941 - DNA, 1733 bp, Homo sapiens
atccttctgcctcagccttccaaagggttgggattatagacatagacgtgagccgccgtctgacgcctttcaaatactttttttttctttttcgagacagagtgtcactctattgctcaggctggagtgcagtggcaagatctcagctcactgtaacctccgcctcctgggttcaagtgattctcctgcctcagcctcccaagtagctggaattacaggcgtgtgtcactatgcccagctaatttttgtatttttcgtagagatggggttttgccaagttggccaagctagtctcaaactcttgacctcaggtgatctgcctgtctcgacctcacaaagtgctgagattacaggcatgagccaccatgcccggcccctttcaaatattctaatctgaaattgtctaccctaaaattgccagtaacttttaaagtttcctaaacacagtagattcaaaggcctaatgggatgaagtcattgaggaggaaggaactcaaagtgtatggacatgggtgccattgagcagggcaggcatgtaacttgcgaaacacctcttccctcttgggrtatttggaagattactttgaatggtattgcattcttcttatagcagatgactgttttcaggcatgctttttaaattttacaatcttaaatattccagcagcctctcagccccatctctctacttatgtcttgcccttgagaaatgatgggtgggaagaatatcagtaatgcccttagtgaactgggaagacagcaggagtccctagcaggaaacagaaggaaacccagcaaaatactcaaacccatggggaggtgttgccctttggggcagactttgaaggcaggttactccccttagtaggatgtcattgggcacatttctgtttctgtgcaaggactgttccttgctcatacacaggaccctttttggggcctagtgcttttcagatttaatcctttgttgtagaagttgaggttaaatataataaaaggagagctttagaatggagaaattgtgtacccaacattttccctgagtcttctggaatgtttcaggatccatatctgtactaaaacaaattctgtaagctcccaaacttaaagggacagagcaggcacattttaaggccaaggtgtaagccagccataaatgtattgaccaacatttttcatttcactattgattctttattttcaaggatttttatctttatgtatgtatttatttatttcttttttgagtctcacgctgtggcctgggctgggccacggctcactgcagccttgaactcccaggctcaataaatcctctcacctcagcctcctgagtagctggaactacagatatgcccaccatgcccaggtaatttttttattttttggagagacagggtctcactatgttgcccaggctggtcttgaactcctgggctcaagcaatcctcctgccttagccacccaaagttctgggattataggtgtgaaccactacacccagctttatcttattttagatctgctgtaaaaactgaggtaacaaccagcaacaaaataaaatcccagtctgctttgtcgtcttttatatttgacttctgtttaggtcaggaaaacaacagtgcaagacattgtgtgtattatgtgaagctggaaccacatttcataggaccataaaatctcatctcagatctaagcactcatattcattcactcagttaacacatttgctc

SEQ ID NO: 724942 - DNA, 980 bp, Homo sapiens
ttgagaccagcctggctaacatggtgaaacccatctctacyaaaaatacaaaacttagccagacgtggtggcatgcatctataatcccagctacttgcgaggctgaggcaggagattcgcctgaacgcgggaggcagaggttgcagcaagccaagattgcgccactgtacttgagcctgggcaatacagtgagactctgtctcaaaaaaataaaaataaaaataaatactatgaatctacttctgtttaaaacaaaaatgtataaatgtgattatatagattagactatttattcagagaaaaaatgtggaggtagacatcaaagtagttatttctgggaactgattatgtgggacataaaaattttgtttaaaaatatgtggagctatttataattttaaaatgttaagaaaacaaaatagctttttgtttagtcagataaaaaaagaaatccattgtttagtcagtgcttctgttgtattacaaagaaacattaaaaaaaagatcacatttttaaccacaccttggaagagtacaccttaaaaaatattttcaggcttgtccataactgtgagaaaacaaagttctcaatgtacaaaattctgatgagtcacataaaattttatataaaagccaagctgaaaaacttacgctgtgtattcataaggaagaactgattccactgaatcaagtctgttcacaaatagttctatttcggcctgaaaataaggaaacacaaaattagaatataaacaacaggacacaaagccttaagtcatgcttagaattaaaaaagaatttgacatgtctgaaatgtaaaatgttataattccagtcaactttaaacaattctcttacaaatccattcactgactggatttatatacatttaaaatataccaaagtaaggccaggaatggtggctcacacctgtaatgccagccccttaggaggctgaggtgggagatcacttgaggcca

SEQ ID NO: 724943 - DNA, 621 bp, Homo sapiens
catataggtctaaatgttgacatctaaacatctagttataatttaaagcaatacttttagtaggtattactaggaattcttttttttttttttttttggttgcataatcttactctgatttcccctagactttagtaaatctgaaactctccaaatctcaggactaaccaaagttagataatttagaaattgcagttrttgactcaatggaaggacaagctttgaatgggatttttttttgttcttaatgtgctgtcagcagatgtttacttaaagagattttttaatctcctctaggaagatgataagatcagatgggcgtctagatgggactatattctggagtctatgcctcatacccacattcagtggtttaggtaagagtacagagttagcctgcttttgctttctacttttctaccctctgtccctttgaacatctcatttactctcaaatcctctctactttattcaaaagtctggccttgggttcaaatcctggctttcagccactgattgtgagtcacagcaggtcccttaatttctcagcgtctgtttctttatctagaaatacccaccttatgggattgttgtgaggattaaaggacatcatgggacaga

SEQ ID NO: 724944 - DNA, 404 bp, Homo sapiens
taaaattgtacatttaggagagaaatttaaaaggaagactgtagagttctaartaaaaccacttctataaaacatttcatagtacaggattgtaatcagtcttgctttctctaagtgacataggattctgcaacttccttaaaatgtttcatgttgtcaaaattttgcatgcttgaaataacctaggtggggacagtttgaaagtgggaatgtgaagcaagtaaaccttgaagttctttctagtcacatcagtgataatctagagtcatctgtctctatttaaggcaaatttctgggaggagatggacttaactcttttggatggtgaataaagatgtttagagtgggaaaaaaaaggcaaccaaaacacacacacacacacacacacacacacacacacacac

SEQ ID NO: 724945 - DNA, 2363 bp, Homo sapiens
tgtgtgtagggtggtgttcttgcataatgtctttgagaaaacctacattaaaacatctgggcgtggtggtgcttgcctgtaatcctggtgctttgggtggttgaagagggtggatcacctgaggtcaggagtttgagaccagcctgggccatgtgacaaaacccagtctctaccaaaaaatcagccaggtgtggtggtgcatgcctgtagtcctagctacttgggaggctcaagtgggaggcttgcttgagcccaggaggtggaggttgcagtgagccgagatctcaccagtgtactccagcctgggtgatagagtgagaccctgtctcaaaataaaagtaaaagcaaataaaagtaaaatacactggcaaacaagatcttcgttatagtttgyttaatttaaactccttcagtcacagactacttgtggagaaatgcttcccaaatggtagctagagtcagtctgccagtggctcctggttaaaacttgagaatgagagcacgagactctcctgtgtttgcttggatccacaaagtaaatgctgcagtgacaattcatgtagcacttctgagatctggccatatttaactatatacatttattgactgtacttataggaccatacatgccagcaaatcaagccgtttagaagtatgctgtttctggagttcttcaaaaattaccacgtttctctccttctctcttgttcccctaaaacccattctgactgctgcctacagaacaatccggcatagcacttccatctagctcacagaccagaagcttcagggagaggcaaaatggcatgaggaaaagagtgtggactttgggaactgacaaaatgggttcaaattccagctgtttggttgaatagctgttgaactgtcttcacttgtaagtggaggttactatcctttcttcacaaggttaccgtgaagattacttaacataatgtgtataaagtacttaccacactgcctgacacataacctgatttatgaattgcatttgtgctgctgaaatactattgtaagtaatatactcctttaaaattttcaagatagtgacagatagattcctgagcattccaagtggctgtgataaaacagtagggaaacagattatttacagtcacagataaactgttacaatgcagtgctttattgaactgtgcttagaaaagaaatcctctctactcaccttcagaattcctcaaggccacaaatccatcctcggccagctttggagaatccttcagctactgttgcattcacaggctcagctgggaaatagtgaaaatatttcactccatggtcctcatttgtatctcctaagaatctcctttcagagtggtatgtagtaaatagaagaggagtgctggttacaatggacataagttatcgattttattcctgcctgaagcaggttgggagctactgggaatgagaagattggttaaattttatgaattcatcagtgcagagtcagaactcaaattctgttaacaatattaatctattccagctcattacagttgtcttgcagacttgtgcatgtacaaaatataggatttataggatccacaactttattaatgaaaggagactcaaagatcttcaaccccttaatttcataaatgaggatgctgagaccagaaagtttaactgacttgccaattggcacatacagtagttaatggtagtattgcagtttaattaaggaaaaatgaccaaattgttttctccatctaatttggtgtgaatcttcattagcgaatcaaataatatttagtcgtcagccataagaattcatcatattgcaaagaacaacagaaaccccaaacaaaatgcattgtataacttgtttgcattaaaagctgttgctgatgtaaaggactttatgagatggatggaataccagatgtgtttccagttgcttggcctcctccaaacaagagtggctcatgtaccctctcttattaattgattggtccttggtggtagctgattttggagtgactcatgcatatactggacattgctctataatttgggcagtatgactcaaaattaggaattggtctgatcaaaatttatcttacaggaaagtttttgttttagtgaaataaaaagtgcaaaaattgtataaatcataagtatatgcctcagtaaatgttcagaattgaacacatccatgtaactaccacccagataaaatattaaaacattaccatccccaaagtcagccccttgtatccctttccagctggtcattgtcactctctcaatgtaactgttactttgatttcatatcaattgatgttaactgtttttgagtcttttgaatggactcaaattgtgtg

SEQ ID NO: 724946 - DNA, 950 bp, Homo sapiens
tgaagattactattaagtattaagtcatatattttctgtgggaaacaaaggaaataattattgacctaaatttccaccttttcttgtgtacaatgatttcaagttgctccttatcaaacccaaaatggattaactttctacaacatggatcagtgagtgtttagctcctgcatagcctggaaaaaaatagtgctgaagagttgggaaaaataaaagaatgtataggaataataaaaatccaagttaagtttttaaagtgtgaccattccaatgaaaacaagaaagagcaagcaaccttaattttttctttggcagccagaaaaatgtgcacactgctaaacaagtaaactaagtaattaggttttgttttttctttcttttttttttttttttttttttttttgagacggagtctcactctgttgcccaggctagagtgcagtgacgtgatctcggctcactgcaagctccacctcccgggttcacaccattctcctgcctcagtctccggagcagctgggactacaggcacccgccaccacgcctggctaattttttgtatttttagtagaggcggggtttcaccatgttagccaggatggtstcggtctcctgactttgtgatccgcccacctgggcctcccaaagtgctgggattacagacgaaacccaccgcacccagcccggttttgtctttttctaagaatctacattcattctcttcatatatttgtaatttaaatatttagttaaaactttgtgcttatatgtaattttatcttcctctgaaaaccttgagcatggtattggtttctagtggaatgtatgtttccaaaaaaaagtgaggcagaaaaaatgatctttagatttttacttcatccaagaaaggttatcaaagcacataaaagcatgacgtagtgtttgccttgttattacaaggtataacaaaa

SEQ ID NO: 724947 - DNA, 1650 bp, Homo sapiens
ttgagacggagtcttgctctgttgccaggctggagtgcagtggtgtgatctccgctcactgcaacctctgccccctgggttcaagcaattctcttgcctcagcctcccgagtagctgaggcatgcactaccacacccagctaatttctgtatttttagtagagatgaagttttaccttgttggccaggatggtctcattctcctgaactcgtgatccgcctgccttggccacccaaagtgctggattacaggcgtgaaccactgctcccagccctaattgcaattattaatcacatgtaaaaaataccttcaaagcaacatttagactaatgtttgaccaaataactggacaccatagcctagccaagttggcatctaacattagctatgttaggaagattcatatatttatcaccttctttaagaagaggcagctgactactaccctaatgcatgtaaaattgcctctgtttcatatctcatacctgaattatmaataaattgatttcattattatctgcactctacaaagatattaattccttgaaagtaagggcttaaaattgtaatttttatatctttagtgcattatttgaggccaagcacctacatagtctgcaagcgttgattgaatgaatgacacaattttaaaaacacgatatgttgttactggatgtgcattaatttcttataaacgaatacaaaatttgacaatatttaaaaagaataaaaggatttgagtgattaatattaagcataattttcaagtggaataattacatgttcaataatgaaatttccaaaatttaagagccatcctgaatatgtatgtaatatgtcattaataacaatataccacttacagtattgcaaattataagcatccccaggtgtcatttatatgacattggcaaattctaccacatcagtaaaaacagatggtaattacagagtgaatgaagcagattgttactatgccaccatgtagattgaacatgtctgctgtttatgaaattcgtcatctaatgactcagatgaattgcattcacactggcaatgagatatttgaatcagcattttgaaacaatgagggtcatacagttagaaatgcttgattagcaggacaaggactcatttcagtggtgttagacaaaaacactttcagtgagcaagcttacatgtggctaggcaaaaactaggcaaactttgcagaggtcaaaaactcaataaccacaagttttcttccactgtaagccagaataaaaagtaatcagtttttcgtatgtgcgtgtgtgtgtggtacttttgtgtgtgtgattctcacaccaatttgtagaatggttcaattaaaaataccaaattatttataactttatcataactattatggaaaagcacacatatatacttttaaaaatatcaccttatcttttatattatttaaaaatattaaagaccaaaacagtaatttaaatccattgaatttcatctgttccatcatcctttttatttctcaagtgttattaaatatttctgtcagttatgttaataagatataattttaaaataaaattttgtgtatattttgtgatttttatttatatgtatttagcataaatgcacattcaaaaacaaaattttagaaaggta

SEQ ID NO: 724948 - DNA, 668 bp, Homo sapiens
aagtcattaaaaaataatagtcattcatttagccaaagtggtaaaaaaaattaaaaaagcaaaaacttttattctttgataggagactcaattttccaatcgaaagagctgaggaaaatagcctgagacagactgttttcttctctcccttgtctctcttttgttctctctctcttttttttttttttttttttacggtttactcaaaatgtgaataaaaatcttctactatcacaattgtgccacatgaaaattcttgtttaaaagagaaaaccattctaaaactaatgtaataaactctaataagccaatctcagtcattattttgaccacacaagagttccaaaaaccttttattatctcttacaaaattttattctattttatttctctttccaactttctctttccaactctttatttaattttatctatatcttttcatttctttaattcaaagcaatattaaagtaaatttgaaactagacaaaattatttttttcaaaaacacacattttcatgcctytacaactttcattaaaaagtgtaacttgctttttaatatacactttatatatggaatattttatatctagtagttttaatcatacatattaactacaattttaactcttaggaagcctaatttttagtgaaaacataggaag

SEQ ID NO: 724949 - DNA, 3317 bp, Homo sapiens
  misc_feature 503, 504, 505, 506, 507, 508, 509, 510, 511, 512, 513, 514,515, 516, 517, 518, 519, 520, 521, 522, 523, 524, 525, 526,527, 528, 529, 530, 531, 532, 533, 534, 535, 536, 537, 538,539, 540, 541, 542, 543, 544, 545, 546, 547, 548, 549: n = A,T,C or G
  misc_feature 550, 551, 552, 553, 554, 555, 556, 557, 558, 559, 560, 561,562, 563, 564, 565, 566, 567, 568, 569, 570, 571, 572, 573,574, 575, 576, 577, 578, 579, 580, 581, 582, 583, 584, 585,586, 587, 588, 589, 590, 591, 592, 593, 594, 595, 596: n = A,T,C or G
  misc_feature 597, 598, 599, 600, 601, 602, 2614, 2615, 2616, 2617, 2618,2619, 2620, 2621, 2622, 2623, 2624, 2625, 2626, 2627, 2628,2629, 2630, 2631, 2632, 2633, 2634, 2635, 2636, 2637, 2638,2639, 2640, 2641, 2642, 2643, 2644, 2645, 2646, 2647: n = A,T,C or G
  misc_feature 2648, 2649, 2650, 2651, 2652, 2653, 2654, 2655, 2656, 2657,2658, 2659, 2660, 2661, 2662, 2663, 2664, 2665, 2666, 2667,2668, 2669, 2670, 2671, 2672, 2673, 2674, 2675, 2676, 2677,2678, 2679, 2680, 2681, 2682, 2683, 2684, 2685, 2686: n = A,T,C or G
  misc_feature 2687, 2688, 2689, 2690, 2691, 2692, 2693, 2694, 2695, 2696,2697, 2698, 2699, 2700, 2701, 2702, 2703, 2704, 2705, 2706,2707, 2708, 2709, 2710, 2711, 2712, 2713: n = A,T,C or G
atatatacatttaaaatttattataaaatttagaacatgatttttataattgttatttttccttatcatagacaatgtaaagtttcaccccccatcatataaaaagaaagaaaatagcaaatacaaatcaatagtggtatcctcggcacctacattatctgtgacagctgacaaccaagctccagatagtttcacagaagaggtcatatatcacattagtttggtagaatgattgggtgaggaagttgatgctgaaatttatctgttttgtcctgtcttctttcactagatcataagcccttcgaggacaaggataacaaggagtattctttttcatttcctatcatccatgagtaatgtagtgactgggatataaaaggtgtgtaagacaagtttgttaaatgaaactattgaactaagaataggcaagaggttgtaacaggaaggaatctgaccgacatacgaagggtaccgaggtcgaattcgtatcaaataaggatttnnnnnnnnnnnnnnnnnnnnnnnnnnnnnnnnnnnnnnnnnnnnnnnnnnnnnnnnnnnnnnnnnnnnnnnnnnnnnnnnnnnnnnnnnnnnnnnnnnnnacaaccttgcacatgtattacgaattcgcagctcggtcaccccatcattcagtgccacagaaaataaagtaaataaaataaggagccaactagtttttgtaattgaagatgtgtgtctttttatatattaattggacatgtgtgtttcctagtctttgaaatgtatgtttgtatttctcctccattttttccccagatttttataccacttttattgacttgggatgattctttatgtatttttatatgaatcctttgatggttatatctgtttaaattgctttcccagtttataacctttatatttactatctttaagagtgctttattttaatatggtcaaatatatcaaactttttttttttacatcttacttatcaaatccttccctacatcaggtctaaaaattattcacctacatttcctgagagttttaaaatattatctttgccaagcaacacttgaatccatctggatttgaatgtatatatttctacatttctatttatgtatgtacatatcttgggagtaaaatgatgaagaataaaactaatcgaatatattagtatttaattcaaatagtatttcagaagtaaataagttaatatgaggtaaaaagaggcttgcataatcaatcaaaataagaatggcaaaggtcagattaaaaccaaatgatatttataagaaataacaaaaaggaaacatttggttctttatacaatttttatctcagaaccatattttctgcacatttggaagaatatcaactagctttagcgtcattacaaaaaaagaaataaacaggctttaagaatgaactgtgctggctccaaactgaagttacaatgccactaatgacatataaataaatggtggagggaaagactaatttgggaaagaatataggcagaactttgacacagacagcttcaaaaagacaagttaaaactgcaagtggatccaaaacatgaatttggattttgtaaaaatatgtacttccagacatgagtgtttttgaaattttagggtttttgcaaagcagttgatttctctcttgactctaaatagtgcagtggcattaataaatcatgtaataatataacaaatttgctttacttgtttaccaattagtcagtatagatgtatgatggaataatagcagagttcactatactaatatttgggataagttggcctggaagagaagaaagagcccacagggatagtatgtggcttatattgttctccacattctcttaaaatcaagcctgctcaaaggctaagcagaggcaacttttatctctttctctgttcctctttttcagcctttttcaattccaagttatttaagcagcacaactgtcagactgggatgaagcttccagtaaaagacaaaaaaattctagaaaagaatgtgtcatcaagatcttgtcttgttttataaatactcttaatttcttaatatttacatttcaatataatgttaaataatttcaaatatgtttgtcaatttaaggatagctactactataagagaataaaggttttcaagtgagatgcaatatagaataatggctaagagactggactctgcagcctccctcactcatttatgagctaggtaacttggatatgttacttaaatacctcgtgcctcaggttctatctctgtagaatgggagtaataatgaaacccaattcatatggttatygtaaagatcaaatgagttaacatatgtaaaccacttggaaaagaggatggagttaattattaaaatttaatatatattaacaattattaatagaatatttcatcatatatgaggaaacctgaaagcaaagatatggtcaattttactaaagtcaggagaagggaaagaagaaagatgatcacacggatcttagattacaaagcaggattcaaacagaacatatttataaccacaataaaaatgaatatatgttcctataatttatcaatttattcattcattaatttcacaaatattttnnnnnnnnnnnnnnnnnnnnnnnnnnnnnnnnnnnnnnnnnnnnnnnnnnnnnnnnnnnnnnnnnnnnnnnnnnnnnnnnnnnnnnnnnnnnnnnnnnnnaaaaagcatcttgattacgattacaagctccgtacccaagtttcaaaataaaatttcagaacgtggctaatatattcaataacatgcaagaagagcatggtgtttgtatcaaagatttgctattaggagataagtgtttattgagatagaaaataaattaaaaaaacacaatacatttcaaagagaaaagtttagattaaaagtcaggtggttgaactaaataaaggactgcaagttaatggtagaactaacatcacattgggtaaagtaggaagcaaaattaaaaaagaggaaattgaatgctcatacaggaaataaatcaagacaaactgctgtaatgcataaaccctggaaagacatggtgaaaataattagaatatataaggaagaaacagtaaattcatataagattcatttaaagaaaaaacaaaatcaacaagagaaatgtcaaaggcatgattttaaaaatatatattgggttgaaaaataggctttaacaatacagattcaaattatttactatagtaaagtaaaataaataaaaaagactcacctgtacatgaaattagtcacatttttcatttgaggaaagaaaatacaagca

SEQ ID NO: 724950 - DNA, 406 bp, Homo sapiens
gaattttataccttgaaaaccaagaatacatgtttttttcaagtgtccataaaacatttgctaaaactgatcatagatgcagccacagagcaaacaacttccgcgaagtagaaataatacggataacattctgtgatcaaatggaataaaagagaaaaattaaatactaatttaaacacacacacacacacacacacacacacacacacacacacaccaraaattttttaaatgccacctgacactttaaaaaaacttttttttttttttggctgggtgcagtgggtcatgcctataatcctagcactttgggaggctgaagcaggcagatcacctgacgccaggagtttgagaccaccctggccaatatggtgaaaccccatctctaccaaaaatacaaaaatta

SEQ ID NO: 724951 - DNA, 406 bp, Homo sapiens
gaattttataccttgaaaaccaagaatacatgtttttttcaagtgtccataaaacatttgctaaaactgatcatagatgcagccacagagcaaacaacttccgcgaagtagaaataatacggataacattctgtgatcaaatggaataaaagagaaaaattaaatactaatttaaacacacacacacacacacacacacacacacacacacacacaccagaaattttttaaatgccacctgacactttaaaaaaacttttttttttttttggctgggtgcagtgggtcatgcctataatcctagcactttgggaggctgaagcaggcagatcacctgamgccaggagtttgagaccaccctggccaatatggtgaaaccccatctctaccaaaaatacaaaaatta

SEQ ID NO: 724952 - DNA, 1315 bp, Homo sapiens
cctcaaaaacagatatgaagcctttgaagtcwggggtatgtcaggaaaacctggtttgatgagagaagaaaccagagcaccatagggctaggatacagggttagcaaaagtggatttggttgtttggttatgtaaaataaataaataaataaataacctgacattttaattggggtctaggctcaagcctgtgtttcatccatttttcttgaaaagctctcaaaagatcaaagttgtggtagagtttgaagacacttaggatttggaagaaacataggcttttgtcaccattaccaattccaccataacagtttaagttccaggtacagttgtcactccaagatggtttttcctgaaaacaacctatacatgttgagtgactaaggttcaatgacattcataacagacccacccactatgaagtatctttaagtctcctaccaaagactaacctcattctcgaggcatgtaaaccccatatcccaagatagtgaagcttatcaagtgcctatttaacagtacgcagtcatacttcatcttattatactaactctttggagatgtccttagtccttttgtcttttagagctgctggtcatctgaacttgctggttccctccagccattctcctctgcatttggtgggcaaatctgggtcctgcccagccaaggctcctgcttccctggaatcctctggataggaagggaattgagcgcagctggagttgctagctatgcccgggaggttacctccacgtgttttaatttatgccccaggatcctacacacaggagaggagatagccttagcacaacgactctcaactggggtggggaggtaggtcttgtactgcaaggggacatttggcaatgtgtgaagacatttttggctgtcctaactaggaggtgggtgctactggtatctggcaggtaaaagcaagggatgctgctgaacaccctacattgcacaggacagccctgccccaaacagaatcatccagctcataaggtcaagaaaccttgcaaggaggtagtataagtctatcctcagatgagcttgatgggcgttttaaggtatagcattgctgtgaaacaagttcttcatgagatctcaatacaggtgcactgagtttaagtgatatcacattagatttgaaagggcattactggctgggcacagtggctcacacctgtaatcccagcactttgggaggccgaggcgggcggatcacgaggtcaggagattgagacaccatcctggctaacacggtgaaaccccgtctctactaaaattacaaaaaaaaaaaaaaaaaatc

SEQ ID NO: 724953 - DNA, 1315 bp, Homo sapiens
cctcaaaaacagatatgaagcctttgaagtcaggggtatgtcaggaaaacctggtttgatgagagaagaaaccagagcaccatagggctaggatacagggttagcaaaagtggatttggttgtttggttatgtaaaataaataaataaataaataacctgacattttaattggggtctaggctcaagcctgtgtttcatccatttttcttgaaaagctctcaaaagatcaaagttgtggtagagtttgaagacacttaggatttggaagaaacataggcttttgtcaccattaccaattccaccataacagtttaagttccaggtacagttgtcactccaagatggtttttcctgaaaacaacctatacatgttgagtgactaaggttcaatracattcataacagacccacccactatgaagtatctttaagtctcctaccaaagactaacctcattctcgaggcatgtaaaccccatatcccaagatagtgaagcttatcaagtgcctatttaacagtacgcagtcatacttcatcttattatactaactctttggagatgtccttagtccttttgtcttttagagctgctggtcatctgaacttgctggttccctccagccattctcctctgcatttggtgggcaaatctgggtcctgcccagccaaggctcctgcttccctggaatcctctggataggaagggaattgagcgcagctggagttgctagctatgcccgggaggttacctccacgtgttttaatttatgccccaggatcctacacacaggagaggagatagccttagcacaacgactctcaactggggtggggaggtaggtcttgtactgcaaggggacatttggcaatgtgtgaagacatttttggctgtcctaactaggaggtgggtgctactggtatctggcaggtaaaagcaagggatgctgctgaacaccctacattgcacaggacagccctgccccaaacagaatcatccagctcataaggtcaagaaaccttgcaaggaggtagtataagtctatcctcagatgagcttgatgggcgttttaaggtatagcattgctgtgaaacaagttcttcatgagatctcaatacaggtgcactgagtttaagtgatatcacattagatttgaaagggcattactggctgggcacagtggctcacacctgtaatcccagcactttgggaggccgaggcgggcggatcacgaggtcaggagattgagacaccatcctggctaacacggtgaaaccccgtctctactaaaattacaaaaaaaaaaaaaaaaaatc

SEQ ID NO: 724954 - DNA, 908 bp, Homo sapiens
ccgttctcctcccttatgaaagggaggtgakgtggagtaaacaccagccccaacatatgatgacacaatctaaatcttcaaaatattaacttgatttccagaaggggaagcagatgtattttgttttcttctcagtccttctgtgattctacaagttgagcaatatctacatgtgaaaatgactttgactgtttcttttattcctctacactagattttttgttgtttcgtttgttttatgagataagatctccctccgtcactggagcacagtgatgtgatcacagctcactgcaaccttgacctcctgagcgcaagcgatcctcccacttcagcttcctgagtagctataactacaggtgcatgctaccaagcccggcaaaaacaaaaaacaaaaacaaaaaaacactggtggatacagtgtcttactacgttgcctacgctggtcttgaactcctggcctcctagttttagcctttttcacagtttgtgcttccctgacccttttcactccctgaaatcagaacgtgattatgttctgcctgactttattttgcttattacagatttgttttcaggcctatgccaaccacatctctccaagctctatttttttttcagttccacaaagcaaaatgtgactgataaaatgatgtgcagacaagcaaatacagagttggggtgactcgtataaatatatttcagtttttaaatagtagaaatgctgcccttttttttcttgcctcctttgcttcctaatttacacagtgcagtttgttttttaagacatattttttggtgcagttttaggttcacagtaaaattgagcagaaggtgttaaaatttcccaggttcccacacctacatagcctcctccactatcaatatctcctaccagagtggtacat

SEQ ID NO: 724955 - DNA, 908 bp, Homo sapiens
ccgttctcctcccttatgaaagggaggtgatgtggagtaaacaccagccccaacatatgatgacacaatctaaatcttcaaaatattaacttgatttccagaaggggaagcagatgtattttgttttcttctcagtccttctgtgattctacaagttgagcaatatctacatgtgaaaatgactttgactgtttcttttattcctctacactagattttttgttgtttcgtttgttttatgagataagatctccctccgtcactggagcacagtgatgtgatcacagctcactgcaaccttgacctcctgagygcaagcgatcctcccacttcagcttcctgagtagctataactacaggtgcatgctaccaagcccggcaaaaacaaaaaacaaaaacaaaaaaacactggtggatacagtgtcttactacgttgcctacgctggtcttgaactcctggcctcctagttttagcctttttcacagtttgtgcttccctgacccttttcactccctgaaatcagaacgtgattatgttctgcctgactttattttgcttattacagatttgttttcaggcctatgccaaccacatctctccaagctctatttttttttcagttccacaaagcaaaatgtgactgataaaatgatgtgcagacaagcaaatacagagttggggtgactcgtataaatatatttcagtttttaaatagtagaaatgctgcccttttttttcttgcctcctttgcttcctaatttacacagtgcagtttgttttttaagacatattttttggtgcagttttaggttcacagtaaaattgagcagaaggtgttaaaatttcccaggttcccacacctacatagcctcctccactatcaatatctcctaccagagtggtacat

SEQ ID NO: 724956 - DNA, 908 bp, Homo sapiens
ccgttctcctcccttatgaaagggaggtgatgtggagtaaacaccagccccaacatatgatgacacaatctaaatcttcaaaatattaacttgatttccagaaggggaagcagatgtattttgttttcttctcagtccttctgtgattctacaagttgagcaatatctacatgtgaaaatgactttgactgtttcttttattcctctacactagattttttgttgtttcgtttgttttatgagataagatctccctccgtcactggagcacagtgatgtgatcacagctcactgcaaccttgacctcctgagcgcaagcgatcctcccacttcagcttcctgagtagctataactacaggtgcatgctaccaagcccggcaaaaacaaaaaacaaaaacaaaaaaacactggtggatacagtgtcttactacgttgcctacgctggtcttgaactcctggcctcctagttttagcctttttcacagtttgtgcttccctgacccttttcactccctgaaatcagaacgtgattatgttctgcctgactttattttgcttattacagatttgttttcaggcctatgccaaccacatctctccaagctctatttttttttcagttccacaaagcaaaatgtgactgataaaatgatgtgcagacaagcaaatayagagttggggtgactcgtataaatatatttcagtttttaaatagtagaaatgctgcccttttttttcttgcctcctttgcttcctaatttacacagtgcagtttgttttttaagacatattttttggtgcagttttaggttcacagtaaaattgagcagaaggtgttaaaatttcccaggttcccacacctacatagcctcctccactatcaatatctcctaccagagtggtacat

SEQ ID NO: 724957 - DNA, 1250 bp, Homo sapiens
atcatcttccaccaggtccctccctcgacacacagggataacagtttgagttgagatttgagtggggacatagatctaaaccatatcagttaactaggatattttatatgcaaactcataaaatatttcatttctattcaggactagtagtataacaggcacctgaaacacacaattttatggaattgtaaacctaaagtcatgtaactgtgttctatgtgtttcctattcccataggatatgcctttgcacccagctcagagagcccttcctgtcctctctagggagaattaaaccctctgtaacagcagtgcctgttgcgtagagatctatgagggcatttattatgcttatgtatttgtttatattctgtcaccctcactaacttgtgagccctggatggcatattccatccattcttttttgctctataacatttcataccaattcatgagacagaggccacctcatatttgttgacttaattaaccaatgagccagttctcaaatgacctctggatagcagtctctctcctctctggctcattcttcaggttgcagccagacactcccttctaaaaatactttgtccatgtcactcatctaccaaaggcccttcactggctgtgtgcagggtctatcctcaacgcttcactgtgttgtactccgttttccagaatctgtccccattttctttccagcttcacattctaacatttcaccctcacatcttcagttccaaatacaccaaatatttgctagatgtgtcctgctcttctgtatgcctggagtacttctccagtttttccattttgatgttcatctttttattctttatgaaatcatactgcatcctttccacataatagtggttaaggtgtacatgttggagcctaagtccaaatcctgccccagcctctgccacaaattagtgataggaccttgggcaactcacctcagtctcctcattaaaatggaaatgataacagtacatacatcagctgcctatggtaaataatgtattagttaattcatgtaaaccatctagaacactgcctggtacttgctaatcattattattgccactttactataaaagcattagaagtagtatattataattacatgaataatcattaagtgggtacccaaatatttacctattcagtaaatcttcctttgtcttcctagttggagtagggaagccrgagggagtgcctcccagacaggaaggggcagcagaggcagga

SEQ ID NO: 724958 - DNA, 898 bp, Homo sapiens
  misc_feature 774, 855: n = A,T,C or G
ttttcctccgattgtgcacartacttccttccctgtgtgtagagatttttcccatggccccctgtggctgcagtgttgctactgttctcacttttattgaggagagagattgttagagtttgctggttgctcttggcccctctctgccctcttgaccgctgtttcggaagaatccccttctgaatttcgtatgcggagattccagacactgcctcctggtttcactctgatggattgagaaggatttgtcttttcctactggatggagtaaatgtgaatctgtaatccccgatccagacaagtaagagggctgctcttttctcagcctcccctatgaggttttgctgctgctcccagcaatcaatgctccatcaccaaccctgagcactttatgtcagcatgattttggagtttctgacccaaaataactcaagatggaaatcagaagggtgggagggaaaagggagcagcagtagttgtgccagaaaacaacgtcagtgaaataggtgtccgagacccacggtgtgggttattccagaacttgggggcttgaaccaagcagcagtaggagaaagaacggtggattcttgtttgttatcatattagaaaccccagagccactaaatgtgtcaatttctcattccagtattatcagccttctaatttgttgaaatcaacccagtttccagaaatacaagggcagctaatcccagctcactgcctcacagtgagtttatacattttgctttgttttcatagatattagttagaatntaaaaaaaaaaaaacttctagtctgcttgctggtaatggtgaggttaattttttgcccctggatagagtcaaaattatacntggtatggtgtgaaaataaaatacacagagatgttatacgtta

SEQ ID NO: 724959 - DNA, 1165 bp, Homo sapiens
gaatctttatttttgtcattatttagcacaaccttcattaggaagtagttgtgcctagattcaataaactgggtctggccaggtgcagtggctcatgcttgtaatcccaacactttaggagcccaaggcaagaggattacttgaggccaggagttcaagatcagcctgggcaacatactgagaccccatctctatataaaattttaaaaataaataaattaggccggcayggtagctcacacctgtaatcccagcactttgggaggccaaggtgggcggatcatctgagttcaggagttcgagaccagcctgaccaacatggagaaaccccgtctctactaaaaataaaaaaaaaattagccaggcgtggtggcatatgcctgtaaatcccagctactcggaaggctgaggcaggagaattgcttgaacccgggaggcagaggttgcagtgagccaagatcgcaccatccagcttggggaacaagagcgaaactccatctcaaagaaaagaaaataaataaataaaataacctcagcgcggtggctcacgcctataatcccagcactttgggaggctgaggcgggcagatcacttgaggtcaggagttcaagaccagcctggtcaacgtggtgaaaccccatctctactaaaaatacaaaaaccagccaggcatggtggtgcgcacctgtaatcccagctacttgggaagctgaggcaggagaattgcttgaacctgggaggcggaggttgcagtgagctgagatggcaccactgcactccagcctgggtgacagggtgagacttcttctcaaaaaaataaaaataaaataaaatagactgaatctacatctctgtgcttttgcttaagcctgttacctcctcatattatttcttcaataaagataaataatgactgaccaatatatatctgggaagtctggggcaataccatagaatctataatcaaacacattaatgtttgaatatttatactgtgttgtgtatatagatttaaatggcctcacataagttcatcagttttccaccagattagtttgccaaaaacttaggttttttcagagctttttggattttagagttgtagataaagggatagtgcatgttatacactgtgttgcttactttaacattctataatccata

SEQ ID NO: 724960 - DNA, 573 bp, Homo sapiens
aagtgcattgcagggtgatgaaagatgtgtgcttgatactatgcgtttggttgaccttctcttggtgctattatttgaaggacgaaaagctttgccaaagtctagtgctggatctacaggcagaatcccaggactccggagattagatagttctggggagcgctcacatcggcagcttatagattgtattcgaagtaaagataccgatgcacttatagatgcaattgacacaggaggtcagaaaatatttttttaaatataaaaagaaagttgtgagataaccatataggcagtttctagttttcggacagtactcttagaaatccagataacaaagtggcaccccttcgatattctcccctatccctgtgcataattatgtaattatcagcttggttcttggtgaaacctgaataaatgcttgttgaatgrgtaaaacttctataaagtttgaaatttctgttttattacctgaaggagatcttataaattctaaggttttctcaagattgataggaactgatgtgaatgaattataataatgcagattttttttgactgctacatgaggtg

SEQ ID NO: 724961 - DNA, 648 bp, Homo sapiens
tcttgagctcctgcatgcctagcctgtgctagatgcttaaaatgcraacaatggaaagcaggagcctcagcggggccacaggaacaaggggatggaggtgaacgtcgaggttccagcgccaagaggtgagtgcgagaacttggaggtacagggaagccgccggcccaagcctgcaggggagactcgaatagagcaagcaatgtgaaggttcttgcagaaggagtggactctacccagcagaggaaggggtgaggtcccccaaggcagagagggcagctctccgaaggtgtgaagtataacatccgaatgaaaagtggggaggctggagtcacactggctgtgtggcccccagcaagctgcttaacttctctgtgcctaagcatcacatctatgaaatatggattacaaataggctggacccagtggctctcagctgtaattacagtggaggattgcttgaggccaggaattctagactagcctgggcaatagagccagacaccatctctacaaaagtaaaaattaaaaagtagctgggcatggtggtgaccctctgtagccccagtcgctcatgaggcttatgtgtgttagtgtacgtagaacccttagaaccctgtctgacacacacaaaagaactcattaaatatg

SEQ ID NO: 724962 - DNA, 648 bp, Homo sapiens
tcttgagctcctgcatgcctagcctgtgctagatgcttaaaatgcgaacaatggaaagcaggagcctcagcggggccacaggaacaaggggatggaggtgaacgtcgaggttccagcgccaagaggtgagtgcgagaacttggaggtacagggaagccgccggcccaagcctgcaggggagactcgaatagagcaagcaatgtgaaggttcttgcagaaggagtggactctacccagcagaggaaggggtgaggtccsccaaggcagagagggcagctctccgaaggtgtgaagtataacatccgaatgaaaagtggggaggctggagtcacactggctgtgtggcccccagcaagctgcttaacttctctgtgcctaagcatcacatctatgaaatatggattacaaataggctggacccagtggctctcagctgtaattacagtggaggattgcttgaggccaggaattctagactagcctgggcaatagagccagacaccatctctacaaaagtaaaaattaaaaagtagctgggcatggtggtgaccctctgtagccccagtcgctcatgaggcttatgtgtgttagtgtacgtagaacccttagaaccctgtctgacacacacaaaagaactcattaaatatg

SEQ ID NO: 724963 - DNA, 946 bp, Homo sapiens
tacaaaaagcaaattattgtacaactattttaattgggatttgaaatagttttctttatgctaaaaaacaaaagtgtgtttgctctttggagtgtctgactaaattcagcacaatttttggcagtttttttctaaaaacagtttgttacacatagaaaattatacttaatatgaaatatatatcacttctacataattagacttaatagaaattagtctgaatagaaaccagtctccagtagcagcaacctttctcaactaatacaccttgagtatactgcagcaaatcaggtatatctgattatgtccccaataagtctgcagcacacacctactcaaaaagatggacaggtaaccaatgtttatagattatataaatcccccgatatagtctagatatgtgtcttggcccaaatctcatgtcaaattktaatccacaacattggagatagggcctggtaggaggggattggatcattggggtggattctcatggtttaacactatccccgttggtgctgttgacacaatagtgatttcttgtaagatcgggttgtttaaaagtatgtggcacctaccctctctctctcttgctcctgctgccatcatgtaagacaccactctccccctttgccttctgccatgagtgtaaacttcctgaggccttcccagaagctgagcagatgccagtgttatgcttcctgtacagcctgcaaaaaccacgagccaattaaacctcttttccgtataaattacccagtctcaggtatttatttgtagcaacgtgagaatggattaatacatataatacatccctcatcccctctctagggtaaattagaataatttttttggtttttttttttttttttttttttgacagagtcttgctctgtcgcccaagctggggtgcagtggtgtgatttcggctcactgcaactgccac

SEQ ID NO: 724964 - DNA, 1243 bp, Homo sapiens
tcttttctttatctctcacagttcatggctgaggcccataacaaaatacggattagcaagagaaaagcataacacatttatttaatgcaagttttaagtgacataggcaccttcagtaatgaaaactcaaagacccagggaaaagtgtggatttttatggacagtcatgcagaagtatgactggaggcaaaaggatatgatcaagtggtaataagcggggggtacttggtaaggcctgcttgttcagattcctcttggcctctctgtgtgacattccttccctccagctataggacaagacacctgtcacatgaaaatcttcaggggaggagggtrggagtaggtcagaggtaaccttcctaggttttaaggcccacttcaggggagagagggacaagaggaatttcagtttctatgtcccactgtaggggagaaggggtgggagaaggtcagagagactatcttgcttctgaggttttctcaatttccttcagcatgcttcactcagtatgtcaatatgccacattctgaggtggcattttttgcacctcatcttctgtagtggggcctttcctccacttttatttacttcacagaatgatgaacatagtggaggtgatgtgaacggtagttactatgctgctcagcaagaggaagtggggtagaagatggaagcagcttcaggaggattccaggcaggaagtatatgggattagagcagctgggtggagcagggaagtcctccagggcaggggaggggctaccacttacaacctccagtcggaaagacacagcacaaaatggattctttccagatttttctacttgtaatttttttttaatgagtacacagcattgcattcctgtaaaactttaattttgtttaaagaacaaatgctgcctacattccagatactggttcttgcttccaggagaatacttgaaatagatcttttcatgaacaagtgtgtttgtggccagtgcccccattggcaaggctgttgaattaaaaatccttaattttttttttttaatttgtactctgtatgtttactgaattacagaaaggtacattcagaacttttgtcttctttccaagtgggtgtctcaggagtcagcagctgcataaatacacacacagttcagttaactgaaattggggattaatgatgtgtgctacacctgcatttttaatcttgcaaaaaaaaacccattaagtgcaagcatagaggattacgatgag

SEQ ID NO: 724965 - DNA, 1243 bp, Homo sapiens
tcttttctttatctctcacagttcatggctgaggcccataacaaaatacggattagcaagagaaaagcataacacatttatttaatgcaagttttaagtgacataggcaccttcagtaatgaaaactcaaagacccagggaaaagtgtggatttttatggacagtcatgcagaagtatgactggaggcaaaaggatatgatcaagtggtaataagcggggggtacttggtaaggcctgcttgttcagattcctcttggcctctctgtgtgacattccttccctccagctataggacaagacacctgtcacatgaaaatcttcaggggaggagggtgggagtaggtcagaggtaaccttcctaggttttaaggcccacttcaggggagagaggracaagaggaatttcagtttctatgtcccactgtaggggagaaggggtgggagaaggtcagagagactatcttgcttctgaggttttctcaatttccttcagcatgcttcactcagtatgtcaatatgccacattctgaggtggcattttttgcacctcatcttctgtagtggggcctttcctccacttttatttacttcacagaatgatgaacatagtggaggtgatgtgaacggtagttactatgctgctcagcaagaggaagtggggtagaagatggaagcagcttcaggaggattccaggcaggaagtatatgggattagagcagctgggtggagcagggaagtcctccagggcaggggaggggctaccacttacaacctccagtcggaaagacacagcacaaaatggattctttccagatttttctacttgtaatttttttttaatgagtacacagcattgcattcctgtaaaactttaattttgtttaaagaacaaatgctgcctacattccagatactggttcttgcttccaggagaatacttgaaatagatcttttcatgaacaagtgtgtttgtggccagtgcccccattggcaaggctgttgaattaaaaatccttaattttttttttttaatttgtactctgtatgtttactgaattacagaaaggtacattcagaacttttgtcttctttccaagtgggtgtctcaggagtcagcagctgcataaatacacacacagttcagttaactgaaattggggattaatgatgtgtgctacacctgcatttttaatcttgcaaaaaaaaacccattaagtgcaagcatagaggattacgatgag

SEQ ID NO: 724966 - DNA, 1243 bp, Homo sapiens
tcttttctttatctctcacagttcatggctgaggcccataacaaaatacggattagcaagagaaaagcataacacatttatttaatgcaagttttaagtgacataggcaccttcagtaatgaaaactcaaagacccagggaaaagtgtggatttttatggacagtcatgcagaagtatgactggaggcaaaaggatatgatcaagtggtaataagcggggggtacttggtaaggcctgcttgttcagattcctcttggcctctctgtgtgacattccttccctccagctataggacaagacacctgtcacatgaaaatcttcaggggaggagggtgggagtaggtcagaggtaaccttcctaggttttaaggcccacttcaggggagagagggacaagaggaatttcagtttctatgtcccactgtaggggagaaggggtgggagaaggtcagagagactrtcttgcttctgaggttttctcaatttccttcagcatgcttcactcagtatgtcaatatgccacattctgaggtggcattttttgcacctcatcttctgtagtggggcctttcctccacttttatttacttcacagaatgatgaacatagtggaggtgatgtgaacggtagttactatgctgctcagcaagaggaagtggggtagaagatggaagcagcttcaggaggattccaggcaggaagtatatgggattagagcagctgggtggagcagggaagtcctccagggcaggggaggggctaccacttacaacctccagtcggaaagacacagcacaaaatggattctttccagatttttctacttgtaatttttttttaatgagtacacagcattgcattcctgtaaaactttaattttgtttaaagaacaaatgctgcctacattccagatactggttcttgcttccaggagaatacttgaaatagatcttttcatgaacaagtgtgtttgtggccagtgcccccattggcaaggctgttgaattaaaaatccttaattttttttttttaatttgtactctgtatgtttactgaattacagaaaggtacattcagaacttttgtcttctttccaagtgggtgtctcaggagtcagcagctgcataaatacacacacagttcagttaactgaaattggggattaatgatgtgtgctacacctgcatttttaatcttgcaaaaaaaaacccattaagtgcaagcatagaggattacgatgag

SEQ ID NO: 724967 - DNA, 1721 bp, Homo sapiens
aagcataaataatgcagctagtcaaagttggatgtatgtcatttatgtgacttgtgcttctttcttcgctttgtgttatttttattgtgtggtgttgagaagtgctaattattgattttcagaaattaacagcaagtactttcacaagcatctaaagccatattttactcaagggaagaagggtgaaaattgcagcctgctgtttataatagaaatagctggaagggatttccttatcttctattaacatagatttcacttctataacacagttgttacctcagcataaattaacaattattcaaaacatattgcatacttcaatttgttgaaatagatattactcaatctaagtacctagacatttcagttagatatttagaactcatttttaaacattttaaacatattgataatgagcctatttaaagccatttgaagtctcagtacagtatatctaaattactgttgcccatttatgtcaaaatcaagaatattttgttctgctgaatacgtccaataatactttattctcactttagtatactaaaagtatatgatttcaatttggaatatttataccagcacctggtaaacctgtgtctcaatgtcattccacataccaaacaaatctatttcagcttttwaaaaaaatattttcccatgattaaacacttctagtgaacttataaaggccaccacttctctctcgttcctgctcctacaccaccacctccccctcaacttgttttcctcctccttcacctcctgaatcagccagcatagagtttagtttatataaacttattcaaccagggaaaatttggcagggatgtcatactgattgttctcacctgtggtaaaggatttgtggattgagtcctctacttaggtaccatttaatgattaaccccaaagtgggcaaagaaccagaaacctggaagaatccttaagcgatcatctgctaaaatcttcgcttccaggtaggcgaatccctaagtcatctagaaaagagtatttcagttctcttcctgagtatcaacaaatatttattgcaatgagactctacagcctttcctatctgcttacaatgtttatctctgaaatatttaaaatcctcagtgaaaatgccccttgcttggatataatctttttttggtcattcctaccccaacatgtagcaaaaggtaaccagcatttctctcatttgttgtgcctgaataacaatcctatttgtatcagtcaggatctcagcacattacctttcaaagcgataatgaagactccaaagaagacatacacatgaccaacaagtatgtgccagcatcattcatctttagggaaatgcaaatcaaagctgcagtgagataccacctcacacccattaggttagctactatcaaaatagaaaataacaagtgttagtgaggatgtagagaaactggaaactttgtgcaccattgataggaatataaaatgctaccactggcgtagctgctaggaaaaacaatatggcaatcgttcaaaaattaaaaatagaattccctatgacccagcaaattctacttccggatatatatccaaaagaattgagagaaagggcttcaaagagacatttgtatacctatgtccacaggagcacttttcacaatagtcaaaagtcgaggccaggcgcagtggctcacacctgtaatcccagcactttgggaggctgaggcagg

SEQ ID NO: 724968 - DNA, 1324 bp, Homo sapiens
aacaattctaaccaattacatacatgttattgtccataacttaaacaacaaagtactgcttcattttttaaaaaaataaaaaatgaaattaggttgtagacatgtaaagtctgctacaaatgcatcaaatacctgctgttcaattgctggcatgcagtaataaagctgggcatttaatcatcaatgatatcactttttataatattttgtcatctttgccttgaatttcttaatgacagtttgaaagaaggagggaatactcataggtacagaatactaatccatacaaagaaatggaggttttttaccactgtgaatgtcatctctttggaatatatgacattttcattttatactttaggctcattacaaagaactctttcaaataactgaagataatcctagtcaaaattataaatatactagagcacattttctctaaagctatttcataagaactaaatcctgtatgaattacccagccaatataaagttagaaacttttaaagttacaaaacaacataaaaaatacagcctatattcaaggaatttatggaaaatttaaatacttgatattttatatgagtgcctagactttgtatattacataaatactcaccaaataaacattccttcagcaagtatgaacatatgtagataactggttaaactttttagttttaacacagatatctgacattatttctgcaagagatcagtatgatcatttcctagtagtaggatgagaaaaccgaccaggagttggagcaacagaaactatgaaaaaggtgctatgaaggaaaacttcaagttgaagcagcacaggagacactgagagacgagcagctgcagaatcaygcagccacatttcacgagatgtctttgcgtagcgttgatgcttaagacagttctcagaggcagcagtgtgggcttttcctttagctctaattctgaagcaactaagaatggctgctatagctgttatggatacagctttttgttgacacacaaggtagctttccctttctattccgtaggcttccttcaaggaaaacccagaagcacaacacagaaacaataagcacttttcaagtgaggcactcctacacgtgatccatttcacccggcactgcttccaggtgatgcagagaacacagactggggcagtttaattatcctgaatatgcagaattttgtataaagcctttcgctccatggaataaagtttcagttcacaagtcttaccagatccattaattcctatgatgaaataacaggaatttggtttagaacatagggaaactgcagtgccttgcttctctca

SEQ ID NO: 724969 - DNA, 1324 bp, Homo sapiens
aacaattctaaccaattacatacatgttattgtccataacttaaacaacaaagtactgcttcattttttaaaaaaataaaaaatgaaattaggttgtagacatgtaaagtctgctacaaatgcatcaaatacctgctgttcaattgctggcatgcagtaataaagctgggcatttaatcatcaatgatatcactttttataatattttgtcatctttgccttgaatttcttaatgacagtttgaaagaaggagggaatactcataggtacagaatactaatccatacaaagaaatggaggttttttaccactgtgaatgtcatctctttggaatatatgacattttcattttatactttaggctcattacaaagaactctttcaaataactgaagataatcctagtcaaaattataaatatactagagcacattttctctaaagctatttcataagaactaaatcctgtatgaattacccagccaatataaagttagaaacttttaaagttacaaaacaacataaaaaatacagcctatattcaaggaatttatggaaaatttaaatacttgatattttatatgagtgcctagactttgtatattacataaatactcaccaaataaacattccttcagcaagtatgaacatatgtagataactggttaaactttttagttttaacacagatatctgacattatttctgcaagagatcagtatgatcatttcctagtagtaggatgagaaaaccgaccaggagttggagcaacagaaactatgaaaaaggtgctatgaaggaaaacttcaagttgaagcagcacaggagacactgagagacgagcagctgcagaatcatgcagccacatttcacgagatgtctttgcgtagcgttgatgcttaagacagttctcagaggcagcagtgtgggcttttcctttagctctaattctgaagcaactaagaatggctgctatagctgttatggatacagctttttgttgayacacaaggtagctttccctttctattccgtaggcttccttcaaggaaaacccagaagcacaacacagaaacaataagcacttttcaagtgaggcactcctacacgtgatccatttcacccggcactgcttccaggtgatgcagagaacacagactggggcagtttaattatcctgaatatgcagaattttgtataaagcctttcgctccatggaataaagtttcagttcacaagtcttaccagatccattaattcctatgatgaaataacaggaatttggtttagaacatagggaaactgcagtgccttgcttctctca

SEQ ID NO: 724970 - DNA, 909 bp, Homo sapiens
  misc_feature 367, 368, 369, 370, 371, 372, 373, 374, 375, 376, 377, 378,379, 380, 381, 382, 383, 384, 385, 386, 387, 388, 389, 390,391, 392, 393, 394, 395, 396, 397, 398, 399, 400, 401, 402,403, 404, 405, 406, 407, 408, 409, 410, 411, 412, 413: n = A,T,C or G
  misc_feature 414, 415, 416, 417, 418, 419, 420, 421, 422, 423, 424, 425,426, 427, 428, 429, 430, 431, 432, 433, 434, 435, 436, 437,438, 439, 440, 441, 442, 443, 444, 445, 446, 447, 448, 449,450, 451, 452, 453, 454, 455, 456, 457, 458, 459, 460: n = A,T,C or G
  misc_feature 461, 462, 463, 464, 465, 466, 506: n = A,T,C or G
aaatgatagacrgtcttggggattcttaccaagcccgtgggccactgacattcgaacaatgaatagtactgccacaaacaggttgcacaatggtgtctgcctccttctgaaaaatcatcttgagaaacaagttgcctttccagcagtctgttgaactcttgtttgccagtgggcagcaacagccacaggtaagagatctgccctcggcaaagccctgctgaaaatccttgcttccctgatctgacttagctcttctatcttgttaccctgctggaagagagaaaactgcccgaaagaaaaacttctgtatcactgttggcttcttactcctcaccctctcttgagtgcgcaaactgagatacactgnnnnnnnnnnnnnnnnnnnnnnnnnnnnnnnnnnnnnnnnnnnnnnnnnnnnnnnnnnnnnnnnnnnnnnnnnnnnnnnnnnnnnnnnnnnnnnnnnnnnactgcctgcttgtcgactctaaagaacccccctgcctggnatgagatttacctaaacaaatagctaggacataaatggcaaatttcttgagcactagaaagagaagtaagtttaagaagtcacttgtgtgcttaaaaaaaaaaaattgcatagcatctttctacagtgtattcagtcctgtagacaaatatttctacacagctggagaatcactgacagaagatttttaagaatattcacaagggaacctaaaccacacaacttcctccaagaaatcctaagttacatcagctgctttaagcagtgaaatccatacagcctgtgagcaacccaacagagaagtgggctattatattggcagcaaggaatccagaacaatgaattacatttctaaacaatgtagcagagggtgaagaaaagaaacctaaatctctaagatgaaa

SEQ ID NO: 724971 - DNA, 909 bp, Homo sapiens
  misc_feature 367, 368, 369, 370, 371, 372, 373, 374, 375, 376, 377, 378,379, 380, 381, 382, 383, 384, 385, 386, 387, 388, 389, 390,391, 392, 393, 394, 395, 396, 397, 398, 399, 400, 401, 402,403, 404, 405, 406, 407, 408, 409, 410, 411, 412, 413: n = A,T,C or G
  misc_feature 414, 415, 416, 417, 418, 419, 420, 421, 422, 423, 424, 425,426, 427, 428, 429, 430, 431, 432, 433, 434, 435, 436, 437,438, 439, 440, 441, 442, 443, 444, 445, 446, 447, 448, 449,450, 451, 452, 453, 454, 455, 456, 457, 458, 459, 460: n = A,T,C or G
  misc_feature 461, 462, 463, 464, 465, 466, 506: n = A,T,C or G
aaatgatagacagtcttggggattcttaccaagcccgtgggccactgacattcgaacaatgaatagtactgccacaaacaggttgcacaatggtgtctgcctccttctgaaaaatcatcttgagaaacaagttgcctttccagcagtctgttgaactcttgtttgccagtgggcagcaacagccacaggtaagagatctgccctcggcaaagccctgctgaaaatccttgcttccctgatctgacttagctcttctatcttgttaccctgctggaagagagaaaactgcccgaaagaaaaacttctgtatcactgttggcttcttactcctcaccctctcttgagtgcgcaaactgagatacactgnnnnnnnnnnnnnnnnnnnnnnnnnnnnnnnnnnnnnnnnnnnnnnnnnnnnnnnnnnnnnnnnnnnnnnnnnnnnnnnnnnnnnnnnnnnnnnnnnnnnactgcctgcttgtcgactctaaagaacccccctgcctggnatgagatttacctaaacaaatagctaggacataaatggcaaatttcttgagcactagaaagagaagtaagtttaagaagtcacttgtgtgcttaaaaaaaaaaaattgcatagcatctttctacagtgtattcagtcctgtagacaaatatttctacacagctggagaatcrctgacagaagatttttaagaatattcacaagggaacctaaaccacacaacttcctccaagaaatcctaagttacatcagctgctttaagcagtgaaatccatacagcctgtgagcaacccaacagagaagtgggctattatattggcagcaaggaatccagaacaatgaattacatttctaaacaatgtagcagagggtgaagaaaagaaacctaaatctctaagatgaaa

SEQ ID NO: 724972 - DNA, 1566 bp, Homo sapiens
gactcacagttccacatggctggagaagcctcacaatcatggtggaaggcgaaggaaaagcaaaggcacatcttatgtggcggcaggcaagtggggtgtgctggggaactcccttttattaaaccatcagatctcatgagacttactcatgagaacagcaggggaaaaacctggccccatgattcacttacttcccaccggatctctcccatgacacgtgaggattattacaatttaaggtgagatttgggtttagacacagagccaaaccatatcagctgcattctagacccrctgagtagacctacccaactgaagggaagctgggaggggaggctcatggtagctccgaggagggcctgggggagatcggagtgcccttaaggggctgacactcccacatagaccatctgggtcttctgagagggtcagaagagggcccagtgggctgttttaacaagctctctaaatgatcctgacatgataagagtttgggaaccaccaccttttagacaccattcaaatagcaccccatctcctgaagcttatcctgataactcctcaacaggtagtcagccatccctcctgttggggcatttttttttttttcactgtattggttaggcagggtaggctaactgctgtagcttcacactgtacagttttatttctcatgtgtgacacgatctcaccaggtgtacatgcggtggtcttccatgtgatgatgtaggagcctggcttcttacctctgtggctcctgtgtagccagggcctcaggctcctccagattccctgcatccagtggccccacaggtggggagaaagcaaggatcatcaagcagcatgttccttgactgtgcctggtctctgcgaccttattattatttttttttacttttttcttgggccagaacctagtgacgtagtttcagcctaactgccaaggagattggaaagtcgactgcctaggaagaagagacaggattggggattgcctagtccaacactttccactaaaaatataatatttttatatatgtatatatgtaatttatatttatatataattttacattttctgctagctatattaaaaaccataaaaaacagataaaatcagttttactaatatattttatttaacccagtatattcaaatattattcaataagtaatcaataaaaaaactcttaagatattttacattctttttgtcacacagagtctttgaaacccagtgtgtatagcacatccaggttcaactaggcaaatctcgagtagccccgtgtggctagtggctaccatattggccagcacaggtctagctactcctgtcacacttgttattgaaattacttgtttgcggccgagtgcggtggctcgcgcctgtaatcccagcactttgggaggccgaggcaggagcatcacgaggtcaggagttcaagaccagcctggtcaacatggtgagaccacgtctctactaaaaatacgaaaatcagccgggcatggtggtgcatgcctatagtcttagctactggggaggctgaggcaaagaatcaacgtgaa

SEQ ID NO: 724973 - DNA, 1304 bp, Homo sapiens
tggaagaacatttattccccacttcctgtttccataagtggaaggatagttaaaaacacttccagaatcttatgccactcattgacacctttacatgagttatctgattggtgagttcaggaagatgaactgaaaatgtttggctcaactgtctcatctgggcattatcattatcatttcagatctgtccacctacagagagggtgtctttctgttttatgcaaccctgtggcagttaccaaagcargatatatctgttactgcacaagtaagttgtctcattcagaggttaaggattactacttaatctaatttggccattaatctaaggccttctttaattctctaatgaactttatcaataagaaagttcaatgttgggccaggcacagtggctcacacctataatcccagaactttgggacactgaggcgggtggatcatttgaggtcagaagttcaagaccagcctggccaacatggtaaaaccctgtctctactaaaaatacaaaaattagccagacgtggtggtgggtgcctgtaatgtcagctactcaggacactgaggcaggagaattgcttgaacccaggaggcgcaggtgagattgcgccactgccctccagcctgggcaacggaggagactccgtctcaaaaaaagaaagttcaatattgatttctgtctctcttgtgttatgtttcccagctgattacaaatttaggaaataaagaaggggaaaatatttaattattgttttaaatgttctcccaacaattcttgaaattaagcatgtgcttgatttgtttgttgatcatttgtatgggtatagaattctggcttgacagggtttttttctctctgtcctttaaagatgttgtgcaactgttttgtttctggtgagaaaaccactgttatccttcactttagttcctttgtgtatgacatgtcttcatttctgacaattttgagtaattagaatattatgtgccttggttagtttttttaatgtttcttatgcttagagtttgctgacctttttggatctctgggtttatacttttcgtcaaatctggaaatttttcagccattatttcttccatttttttttggtctgttctccccactccttcaggactctaggtatacatatattaggctgtttgatattgtcccatagctcactaatgctcttttaattattttaaccctttttttttctctgtgtgtttcattttggatagtctctattgctatgtcttcaagttcactaattttttcttctgcaatgtctaatctaattcaatcc

SEQ ID NO: 724974 - DNA, 636 bp, Homo sapiens
ggtagggtctcactatgttgcccaggctggtcttgaactcctggcctcaagcaatcccttctgcctcagcctcccaaagtgctgggattacaggcgtgggccactgtgcccrgcctctcataaggcagtttcatttttagttttatttttgcagagccttcatactgtcttccatagtggctgtgccagtttacattcccgtcaaccgtgggaatgtttccttttcatcacatctggccacttgttatcttttgatttccccccagctgtatttagatatgatgaacaaatctttttactttaactcatggaattccttctgcctttttcctgcttggattctctgtttcctggatctcacatcttcctattttttgactttatctccttggttggtggagcacatcctcccattgtttcatcccagggaggaggtggcacgaggctgaggaggcagtgacatcgatagtggcgtgctgcctcagagtcacacggcctgttctggctggggtgcctgctgtgccctacacttatttgtcattgcagaattttttattgttgttcagctgaagatttacatcatcctagagatttccatttccttctaggttggacttcttaatattctatattcca

SEQ ID NO: 724975 - DNA, 1204 bp, Homo sapiens
tgaagagctgataacccaattactcaaacttccagttttataataataaaataaaattaaaattaaaatgtatatayatataatactctcaaatgttacaataacatcatttggggcaatatttaaacaatgaaataacaatgctaacatccatttctgttgtgaaatcaaatgcacaccaacaagcccagcatggaaaaccatcccacctttagtattcatattaccttgtgtgtaggcagcatcatcagatcccatactcagtttccgtgtttcacttattctatccacatgtgctaatgtagggtccgtgaggtgctgaatattctcggtttctacataatgatcaggatgattaagaagatttgtaagttcaaaggtaggggacaccacccctggtgaaactgcagggggcttattgggagagactgtaattttgaaagtgtatttcgtattgggctgagtgactaccactcgaggagaggttgcagagttattgcctattgctcgacttttgggaggatggtgatgaataaaggcaggacccatgctcacttgcccagacatgttcctggaggcagcagatgctccagagtttgtggatatgaagagtgtgggctgattccgcatgacctgttcatctcctgtggcagcattcgctgaaatatagaccttaggttgactacgggacatcagctcatccgtatttggggggctggcagctatgtaaacagtgggctgatttctgtttaaggtctggctattgactgaagaggaagtgctggaggttcgaggtccagaagaacgcagttttgaagaattatttctttgtgggggttcaagtttgatttcaatctggttttttcgaggtcctgttgaaatattctgaatgttatattggctatgggcagaagactgtgagctaccagatgaatgaatggttggtggttgtgaagtagtaggtgaactgattggcatgtagacatgagaggtctggtggccttgctgatttggctgttgagatgaggtatgtgacagaggattagatgcaggacaagtagtccagggaccaggctgtgaaggctgataaacttgctgagggttcatgggattaaactgagatacccagccagaatgctgttgtgtctgtcgagttgtaccaccaggagttgtaatgtaaggcctaatatagatagaatttccc

SEQ ID NO: 724976 - DNA, 861 bp, Homo sapiens
acaaaaatgtcttaaaaatcagaagataatatattcagtaaatttattttatgtacctattatattgtctagtactttaatatgtataattatttatggtttgattttatacacatctcattttccttaaatgtatattccaacttatatggagataaaagtaatgatatcactttgccttgaagaaactaaactctaagactgttatcatttgattctttcattttgagctgtctaaaattttataaaattagttaagagcaaaaagaagcatattagttatctttcttttttttcttttttcattaaaaatttttattcagtgcaacgggttgtataacttttatagacaaaaagtacaaatagctagtgtggtttgatttaaatttctatttgaattaaacatttgaatactttttcacttgcaatttatccttttagacaaatttctggaaccttcatttaaatgaacacagatgtaagaaataaagcggttatggaagcccagttctggactcattattaacccatttatgcctgaggttgcaattttttgaatttttattttgttttattwtatttttatttattattattttttattattattatactttaagttttagggtacatgtgcacaatatgcaggtttgttacatatgtatacatgtgccatgttggtgtgctgcatccattaacttgtcatttacattaggtatatctcctaatgctatccctcccccctccccccaccccacaacagtccctgttgtgtgatgttccccttcctgtgtccatgtgttctcattgttcaattcccacctatgattgagaacatgcggtgtttggtttttttgtcct

SEQ ID NO: 724977 - DNA, 631 bp, Homo sapiens
ttcatcaaatttatctccctagcacttatcattccacttacccactctgacaggcagaatgaacctccccatcccccagaagatgtctgggtgggaatccctgaaagctgtgaatatgttaccttatatggctaaagagactttgcagatatgattaagttaaaaaccttaagatcaagtgatatcctggattttctggagggcccaatataatcacatgggtctctaaaaatagagaccctttacttgctgtggtcagaggaacgtatctatagaagaagggtcagggcaatgaaacttgctgactttgaaaaatggaggaagaaccatgagccaaagaatgcaggcagcgtctagaagatagaaaagtcaaggaaacaaattttcctcaaaagcttctagaaagagatataactctgctaacatcttgatttatcccagtaagacctgagttggacttctgacttagataactgtaagataataagcttaccttgctttaagctaccaagtttctggcaatttgttatagcaggaatagaaaactaatacatcctctayaaatcatctactgatgccctagagatttcaggaaatctttcttaattcttgttgcctgtcttaagtcatc

SEQ ID NO: 724978 - DNA, 774 bp, Homo sapiens
tgataagattagttgtttcttgtcaaagctgctgaagagaggagattgtgggaacaaatagtggggtgcgtgtaacaacttttgagcatcacagggacgccatgctacctcaatctttgataggagtaggcagctctctccaagactccaggaattaataagcttcctcccacaaaatatcatctggacacctcggagttggagcctgtggaattgggaggtgtttctgggacaagaatgtggctagtagtattcttgagaaaaagatttcttactgtctgattggagaattcagtgacagtggccctcaaatgatgttgggaagtccaatgtgatgactggcatagagtkagcttttatgctcagtgaagatttatctcatgtgactagcttctacctggtgtgcaaagatccctgatatccacctgacgctcccaactcactgaggggatgttgcagtactcttctttgcaagagcgcaaaaggttccattaggatgcttgcacttcactgttcttactcctggtgagaagtcttttcatatcataagtcatccaatcattcctccccatgtttacctcacatgaagaagccatctattgtaacaatgtattgactttttttttttcagacgggaaatggatagaagcaatagagtggtttactggtctggaaggtgcttcatctgaagaatgaggggttcccctgtccttccagagccaggagctcttcccactgatcttggccataaagggccaatcaatctcaccatcc

SEQ ID NO: 724979 - DNA, 584 bp, Homo sapiens
aatgaataaartaagtaaaatctttgcctttctaaaacttttaatgaaggtcaaatgggatgtaacaataaagaaaataaaatattttatattaatatattttaatgatgttatgtagaaattatgttatagggaaaaacagagatgcaaattatgggaagaggtctggcaaatttaagtgggttgccaaggaaagcctcactggaattcatgtgagtcagcctctgaaagaggtgaggggagcaagccatgccaatatccttcataaaatttctgtattatgtagagctattaatgccaatatagggatgagaaaaagaaaagactgcgtgttggcatcttcctgttagtatcctagaaaaacccaactccaacactttagtttttctaagaactcagggtttccttggtattgctattttgctattctgtgcctttccaggctttgaacctaattaatgagcaaattctgtgatacattaacgtagttgcataatggaagtagtttttttgaagcaaaaacttcacagcaagtccacaaagaagaaagaaaaatcagtatgttaatttattttcagaatttt

SEQ ID NO: 724980 - DNA, 595 bp, Homo sapiens
tctctgtgtgtgtgtgtgtgtgtgtgtgtctcccctcctctctttctctctgaaatcaagtacagatttacccagccaataagattgtatgtttcatgaaactgttagcagtcacatatagtctgttgatttattatgtattatgtacagtatacacttaatgatatacagcatgctcattttaaacgtgatcattctatggacatataggggcaagaatattgcttttgaactataaataatttctttatcaaacatargaagctaagcacttgaaaataaatgtcctccaaataaaaagcctcttgaattactcgtgttacggaatgttgagacttcattctatgtggtattctcaatccacctttttagagattttttttttccattaggagagatgacaaaattctctctctatctttgtgtgtgtctgtgtgtgtgtttgtgtgtgtgtgtgtgtgtgtgtgtatggtaattagttcagaaactaaaaatatatatgtaaataatcacatgataaatttacataagataggttagtaaaggtcatttaatttcttacattcttgcttttattctctagaataccatttag

SEQ ID NO: 724981 - DNA, 595 bp, Homo sapiens
tctctgtgtgtgtgtgtgtgtgtgtgtgtctcccctcctctctttctctctgaaatcaagtacagatttacccagccaataagattgtatgtttcatgaaactgttagcagtcacatatagtctgttgatttattatgtattatgtacagtatacacttaatgatatacagcatgctcattttaaacgtgatcattctatggacatataggggcaagaatattgcttttgaactataaataatttctttatcaaacataagaagctaagcacwtgaaaataaatgtcctccaaataaaaagcctcttgaattactcgtgttacggaatgttgagacttcattctatgtggtattctcaatccacctttttagagattttttttttccattaggagagatgacaaaattctctctctatctttgtgtgtgtctgtgtgtgtgtttgtgtgtgtgtgtgtgtgtgtgtgtatggtaattagttcagaaactaaaaatatatatgtaaataatcacatgataaatttacataagataggttagtaaaggtcatttaatttcttacattcttgcttttattctctagaataccatttag

SEQ ID NO: 724982 - DNA, 1249 bp, Homo sapiens
caagtcactgacaaatcacaagcattgttgtctgttttcctaattatatatttcaaacactatgtattaggagacaaagaaatgggaaaataacctaattctggtgtatgtttctaacttctgtaaagttgggaaaacaattaaactgaggagcgtaaaaatagtttaaatccttttccacttcaaagaaacaaaaaggaaccttggctttctcctataaggttttcgatctgggacagataaaaatataatgttaattttttaacaactcaacasaatgcagcatccttaagaatgaatgcgatgaattggtgcaagtcctacatggcagataaaggggccctgtggtttgcctactgctatcacatactgacttaaaccaatggtggcagcagctggttctttgcacttcagttaaggagcaatgagtatatcagttcttttcatatcaaattatccacattctttgtttgagaataacctgcaaatgtaataagcaatgtcctttttaactttcaatgtaaaaaaattacattgctcttcaacatatagaataaactatgaatatgtcgtcatagacacagtgtgtgccttaaaacagggttagcttttttcgaaaataaaaatgcaggattactgaataaatttgactatctataaacaacaaaaaaagtatgtttttcatgcaacatacttacactaaaaattacttgttgtttatctgaaattcacatttacttaggagtcctgattatatctggcaaccctatcctaagtttaaatttcaccttcactaccagctacgctttgttagttatttaatctctctgagcctggaaaattagagtgaacatatctatatctttcatgggctttttttttctctatgcttttactgtggtaaaacacatgtaatataaattgtactatcttaagcatttttagatgtacggttcagtgacattaagtaaattcatactgttgtgcaaccatcaataccatccatctccagaactgttttccttcttgcaaaactgaaactctatacccattaaacaataaatacccattttccctttatactcaatccctggcaacttccattctactttatatcattatttttttgactactgtcagtacctcacataagtggtatcatacagtatttgtcttttgtgactcacttacttcacttagcataatgtcttcaagctgcatccaccattcatctgttaatggacacttg

SEQ ID NO: 724983 - DNA, 1458 bp, Homo sapiens
ttgtgtctttgataaaaccagagtatcttttgtgtgatccgtttgtatttaatttgaatcattatttcagaatataaaagtgtatctaatttttttattttattttttgagacagagtctcgctgtcgcccaggctggagtgcagtggtgggatctccgctcactgcaggctccgccccgctgtgttcacaccattctcctgcctcagcctcctgagtagctgggactacaggtgcccgccaccacgcccagctaatttttttgtatttttggtagagacggggtttcaccgtgttagccaggatggtctcaatctcctgacctcgtgatccacccgcctcggcctcccaaagtgctgggattacaggtgtgagtcactgcgcccggccctaattttttatgaacatgaattttacatgtggttagtgactgtttgcatttgttatttgacaaacataaaatgtatcataatggaaaatgatcaagtagcaaagaaatgccttcaacagctttctatatgttttggcttatgtacttaaggatgtagacagctttatgagacagactatactatacaagtacttttgtctgaagattagctgggctgagactttttttcttttcataacagtttgatagatgtttgtgattatctgttcaatagcccatttaggactaggttgaagaagcagcagttttctgcataggtagcatttgagatccattatcagagggaaatgattattgtatgatgctgttgtcccttagaactttcaagaggaaaatgttaggattaggtagttatataatgatttgtttgatagaaggagcactgaggttgaaatcagaagatacaaatttgaatgcttgcttctatacccaccagatgcatagcctttagtaagtttttcagaccctcagagccacagtttgctgctataaaaatgagactctccacctaagtcagggaatggttgtgagattacattagatgacatttgtgaaagtgcttaaaatttctaacacattttttaaagaaactgtttataataattctcctttgtggttattttctacagaaagtgagtgagaaggttggaggagctgaaggaaccaagctagatgatgacttcaaagagatggaaagggtaagccttcactactgcctagtgttccctttgacataaacatgtctaccataattagaggagaagagaaaacgggagagggcaactgttttccactggtctctgagaatactacattttgttatttaaaactacttttcatgtatrttttaaaacataaaatgtaaaatattctgtcttccctttgtactgtcctgaggacaaaacctcagtgaaggtgaaaggtcacgatgaactttttctggtgggtttcatcatcattttaaaaaaataaggacagtgttgagctgatgtttgaattagggtgaga

SEQ ID NO: 724984 - DNA, 533 bp, Homo sapiens
accattaagcctcgttttgttcatattttagtggaaattgatctaagcttcatcattaaatataatatttgctattgatttgttgctgggcatcctttaacatgtttatgatgtttcattctattcctaattcattaagattttttaaaccataaataagtgcagattatagtaatattgagcaaatattttcttctcacctccaatgggccaccctctagaccccctaccctcaccctcatctcccctacctcaccgcgggtctctgtcctcagacccctgctgcaggggacccctggaggtgacatatgctcagctggaccaccaggccttcacttggaggacagcccaggctgtgtccccagagtccatggtgcccatggctgagtctagcatgtacacagccctcgccaggcactgactccgggaccactgccccctgcgcctgaggaagtcatgcttggaaaagcctcaagaagccawctggagggcttccccttggaatcatcctggtctgcaaaaccagtcaactg

SEQ ID NO: 724985 - DNA, 1427 bp, Homo sapiens
ttttggaaaaataattccaatcaaaggctttaaaacatttaaagctcttgttttataatgcctagtttctctctgaaaattgaaaaagaagtaatttacagttctacagtacttggcttattcatttcactgacaacctaaggatataatatgctattaattagcattgacataatagctattaagagtaaatatttgcatgctaattggccatttgcacctttggtaaattcctggttcagatcttttgatcattgtcttggacattcaactttttcttaatgacttgctagtaattttgttttcaaatgattgactttattgagttccttatttttaacctacattttgcaggtgctaatgttctgtgaaggaaggcttgtagtctaggggcagaaaaggcttgagagtcacaatttaccttccttaaaaggaaagtgcatgtatgttttggatacatatccctaccacttatttctacttccaatgatatattagtcaccaatgctttgtaactggcatggcagtcagaagtgtgacttcctcccagtgttcttaagtccagataaatggaagatctagatgagacttaaggtacttcctcatccataacctcactgcacagatgaggaaactgaggcacagaggatatcagagacttgcaaagggttatgcaccataaattggtgtcagggaattacaattcaggtttccttctatctgttccctcactggctgttgagagaaatcacctctttctatgcatttcttttgtgtgtgtgcacatagatgaacacacattatgtttcttgttttctgtggcaatcctgatcagtttacggagtgctctggaagctaggtgttcagcagaccctaaacacccacacctgggagcccctgctgaatgcctggcccttccctccttgtggtcaagaactgaggctccctgccccagtgtgcttcccaagtggctgggtcaaactccagggcagacatactcatccctgtccatcttctctagctctcttctgcaactctggtgcctgaggctggtctctttcgtgattcctttctggtgcaaactcttgtgtcgaggtagagcctaaatgagctcctggagcacttccagagccctgtgggaaagccggagcagaccagtgccaaatgggcccrtgtgcaacttggatgggatccagagatctaaagatgtctgaattcctctaagcgcatcctttagtagacatttcccaaagcaaggctggcccctaaggatgacaatgcattagaactcagtttcttggcagtgttctctgtaaatctataaggaagtttacttcaaaagcaaaaatctgggatatatctctgatcataaaattggacttgcagagaatttcatagtggcatgagacattgaggtatagggttca

SEQ ID NO: 724986 - DNA, 1302 bp, Homo sapiens
ggtgagaagaagaaaaccacaaatgcttagggcaaatctttgtttaaaaaactgcatgttctcactcataagtgggagtttaacaatgagaacacatggacacagggaggggaacatcacacacaggggcctgtcaggggagtgcggggctatgggagggatagaattaggagaaatacctaatktaggtgataggttgatgggtgcagcaaaccaccatggcacgtgtatacctatgtaacaaatctgcaagttctgcacatgtaccccagaacttcaagtatcattaaaaaaagaaaaaaaagtaattagatagaaccataccattaaaaaaaaaaaggctgatagaatctcaacctattcatttagcaatgttgttcattacccatgtagctggaccagtctgagcctaggggtagggcggtttgaggtcaggccagtgttcaaatactagccctacataaacaatggtcttggtccactatttaggtaatacagcaaatatttctttctcatgattccggaagccaggaagtccaagatcaaggtgctggcagattcagtgtctgaagaggacctactttccggttcctagatggtaccttcttaccatgtcctcacatggaggaaaaatcgagagtgttctctggggtatctaatgtaagggctctaagcgcattcatgaggattgtgcctttattaacctaatcacctcccagagtcctcacctctaaataccatccccttgggggttaggatttcaacgtatcggccaccatggtggctcacgcctgtaatcccagcactttgggaggccaaggtgggcagatcacctgatgttgggagttctagactagcctgtccaacgtggtgaaaccccatctctactaaaaatacaaaaattagctcaggagtggtggtgggcacctgtaatcccagctactcgggaggctgaagcaggagaatctcttgaacctgggaggcagaggttgcagtgagcagagatcgcaccactgctctccagcctgggtgacaagagcaaaaccctctatcaaaaaaaaaggcgggggggagatttcaacatatgaactttaaacattcagaccataacaagaatgaaagctagtccaagcatcatgtgctgaaatctggcataacccttcttcccctgtcctggtacatacacagcgattggtgccattggtttttaaccatgcttgccagaacctggggagagggagacacagatacaggatgaggtacatttgctttagatccagttgagaaatgcttagtttcact

SEQ ID NO: 724987 - DNA, 571 bp, Homo sapiens
gtgagcagggaggggcaggtagcagatgagatgctcacagcaatgtcccctgaagaccccaccaagtgctgaagaactcatgagctatgtcccaatttcaagtgctgcagaacctgcagatgctttcagagatttgtactgggtagcggtggtgtcgaggtgggaggtgagtaatcttgtgttgcctggaaatcaagagaaggttctttgataacaatcgctactcagtcattccctgaagaaagaactaaggggttctccttcattgactcttggaatgtcatttcattgccctcctcattagcaaaggagaagaataaaaatctcagtctcataaacaagtgcttgcaagattactgagataatacacaaagaccatttgagtgcctctatgaattaaaaaaatatgggatgagaatggggccartgagccctggtagctcagcagatgttggtagagctagttcctaagtgtggcttatgtctcagagacagcctgtctgtgcccatttcatagatgggtgccctcgggacatagggtccaagggatgggtccatcactacgcaagag

SEQ ID NO: 724988 - DNA, 877 bp, Homo sapiens
aagtattttgcaaggagtccactgcttctgcactcatttaattctcacacctctcatgtcagaaattgatgaacttaatttaaggaagatagtagtaagaaggtgaattaacttctcaattaccagaggtttcactggtccatagcagtcttaataatagttactgttaggacctcatggctttagatactgattaaagctttcaaaaggaataaattrctactcaaatatatttaaagagcaaaatcctctagagaaaaaaagaaatgaagctccttaatagtcagaaatttctatctaattttaaaattaattctattctgcaatgtaagattttttctcttttctaatttttatgaataaacaacaattatacatatgtatgggatccatgtgatattttgatacatgcatccaatgtttaatgatcaaatgtttataataacccaaaaatagaaaattctgaggacaatatactagaaaaaaaatgaacctaaatcagtgcctctgcaggaataattcattaaccacttacacttattattagctcttatggcaagttgtaaactagaacactgaaaaataaaagattgacatggaaaggactggtaaagtaaaaagaaccatttttctggtaacttgcctcctcacaccgagaaaccaaaattgtaggaactgcaacagtttgtaactgttctgaattccatctctgatgctggaatcatagaagtaggttctaagagttttttttcaatatccctcctagtatctttccccaacatctatgttttcaaaaaataacattcatagcattgtttctccactgtagaactggctcatgatctttttttcactgaagttgtctgggtaagaagtc

SEQ ID NO: 724989 - DNA, 693 bp, Homo sapiens
tgccatgtaattttcaaaagttaatattttttctaggaaaaaaaaacccactatctgttatgtggatcgggtactttgagtggttattaaaaaacaaagaaagttatatatcctatttcaactgacagatcaaggtataattttcagtcaaatggctcaacatataaaataaaggttttcatggaatgttaggactacatagattctcaactctcacttataccaaacttcaatttttggtacttagaaacttaggccaggaaaagagaaataagcagcccacagtgaaacagraaagtaatggcagaactgagactcaaaatcaagtttctgccttccaaacccggtgctcatttcgattgtactctacttctccaaaatatatggctagtaccaaaatttggatgagaataacttagcagaatttctaattttggtattattgggtcaagattgttctgaaaacagaatgtgtttattcacgttcactacttggccaatttaactatgtattatgccacttacgtatcccttagtttgcttctcaccttattttttggccactatttcaataaaactagaagcgattttacacaaactgggaggaaaatcattggaagaccttgttggtcaccaaggcaacgtatactgtagcatctctcctgagttccagtagtgaactcttattcagcc

SEQ ID NO: 724990 - DNA, 569 bp, Homo sapiens
tattaatagatacatcatcctgaagatataacctaattgctgttcctcctgttgtaaatggagaaactaaagcacagacagcaaaacataaaaatcaaggtatttagagaacaacagrggtggatcctacttatgagagttgtgtggtcacagatgagtgatttaaccttgctaacctccagtttcctcatctgtaaaagtaagaaactcttacaggacagttgaaatataaagttagttagtacatgtaaactatttagcacatttttggcacgtattatttgacattgtaggttttgtccatctttctgggtctcttggtcaaatcttacctctccaaaagtcaataaattttaggagaaaactgccataaatatgattgttttgtttcatttaatatcgtatggttcttgtcttagggttccaacagtgactctgtcctttagcagattgtgtttgtgacacatttaggtttcctttattgggctggcaaactcctgtcctagctgctgtgttttagctgccaacagtttacaccttcaccctttctggtagaatagctcttggct

SEQ ID NO: 724991 - DNA, 739 bp, Homo sapiens
taaatatttagtaaaccagtgcctcacatgttttatctaatgtgatagttccaataactgtgtgaggtaagacaagctattatttttggagtacgacaagtgctgtggaagagaaatccagtaaacaatgacagttaggaaatctatttttgtttttgctgtgtgatgactaatatattaatgataaaatctatacaccaacatgaaagctgttatctgcattagccactggtagctttttttgttcttactggcaaaaattgacaaggcagaggacacatttggtgctagcatgtgacattaacttggagaatgtaatgactttatatcatccatacctttttacaatggtgataaaaaaaatgggctgccatttaaaatatgtaggtcattctatacagtggttgtttgatatttgacctacatttaawatatgtaggtcattctatacagtggttgtctgctatagaatgtaggtcatcctatacaggtcatgctatacagtggttgtttgctattcagtaatacgatttatttctcagaagttccatggagaaccatttaacttctgggctgtcattaattaaaatggaaatacattaaaactcattttctagaagttttcatattatgtattaaaattgggttatgatttctggaataaaaggtcttctaatgttgttctttgaacatcaccctcatataacgtccataatcatgtattttgggcaggagtatt

SEQ ID NO: 724992 - DNA, 886 bp, Homo sapiens
tttctcaatattttagacactcacaatggatgtatataaagaacatttctttgttgggtgcggtggctcacacctgtaatcccaggactttgggaggctgaggtgggctgatcacctgaggtcaggagttcttgaccagcctggtcaacatggtgaaaycccgtctctactaaaaatacaaatattagcagggtatggtagcacacgcctgtattcccagctactcgggaggctgaggcaggagaatctcatgaactcaggaggcggaggttgcagcgagttgagattgtgccactgcaccccagcttgggtgacacagcgagattccatctctaaaattaaattaaattaaattaaaattaaaattaaaataaaggacatttcttgattgctcttgggagcttgttgtttgacttgctgtcatttaaataattgtcaagtttgagctgggtcccagagcagcctctgcaaagcaagatggtacacctaagatgctcttagacctgatacctaattccggcaaagatacatatcttttccttattggctcttccatcaggttgctagattaaacatgtttattttctaatggcttgttttttcctaagactgtccaagtggttcaactactttgtttgacctagaaaaaaatgagcttattaaataaatgtctctattcgggtcttacattaattggaaaagttatctttaacccactgtatgtttttcaacttatgggagttcagtctccaaatcctaaacagaacaacatgacttttgcttttctgttttccaagtgctaaaaaatccaatattctctaaaagaaaatcatcatacagagatgagtacttgttttactttttatttttttatcccaaactccaa

SEQ ID NO: 724993 - DNA, 1417 bp, Homo sapiens
gtagaaaatttgaggttctggatgttgtccaccctgtagagaggttttatgcagctaacatggacctgggctgactgttagaaatttaaaatccagtcagtattgaaatgacttaaagctgacctttaatttttgtgagaaccaacctagtcatcatttgccttatttctaagatatagattttcaggatctgaatggaaagttggggggattttgctagagtccctcctccttaaataaatgtcttgaattcacatttcggcctccaagatttgtgtcttccaaaatctgtgctcagttattagatagcccagtagccagttttgtttccagaatcagttatcatctgaaaggaaaaaagtaaccataaaatctgaactcacctttcatcttccctccttctccaaattttgttcccacaaattctcactgctttaataactctaaaataccttcacatttgttaaaaaagtattttaccagcttccatagtttttgtttccattttatttttagttcatcatttctttgattaacaatwgtcttgatatttctaatgcctgtttgcctttctcctcttccttccttcctttgtctttttcttccatttttttcctaattgatttataggacaaggataattctttagttattccacatttctaaatgaaataaatctggctaatattagaatgacctaagttccaataaaatggccgtcaaaagtgtctggtggatggtacaaaaaatataatgtggcacacacttggtttactaaacaggtgctctgaggagactgccttagactttagaggcttccctttttgtaatcatctgatgtcgctaggctttgtgttccatccaaatctcatcttgaattgtaatcaacataattcccacctgtcaagggagagactaggtggaagtaattgaatcatgggggtagtttccctcgtgctgttcttgtgatagcgagtgacttctcatgagatctgatggttttataagaagctcttcccactttgcttggcatttctttttgctgccttgtgaagaaggtgccttgcttcccctttcccttctgccatgattgtaagtttcctgaggcctccccagccatgctgaactgagtcaattaaacctcttttctttataaattacccagtctcaggcagttctttatagcagtttgaaaacagactaatacctcatctaatcaaaggagatacattttctaatttacctaagatctgtataacaaatgtaaaaagtaaggagaagttctaaatgctctaagacaaaatgaagtaagggttattactgcacagttgttcctagattaaaaaaaatcaaggtgtcaagactgttatatgcctaattctatatattacttagtgtagaaagatgacatcaacca

SEQ ID NO: 724994 - DNA, 1705 bp, Homo sapiens
gttacctgggtctccagagggtgaggtcgccgtgggcaccctgggagcagcagttcagatagaaatcctcccatgccgtgtgcaaacactaagttttttgttttgttttgttttgttttttttgagacagagtctcgctctgtcgcccaggctggagtgcagtggcgcgatctcggcttaccgsaagctccgcctcccgggttcacgccattctcctgcctcagcctcccgagtagctgagactacaggcgcccgccaccacgcccggctaattttttgtattttcagtagagaccgggtttcaccctgttagccaggatggtctcgattttctgacctcgagatctgcccgcctcggcctcccaaagtgctgggattacaggcgtgagccaccgcgtccggccgcaaatactggaagttttaagtcaagcgaacaaacattaaactgttctgtcctcttaccttgacaaatacacctaccagtgaccgggaaggctgccttgtgaatttagaaagtcctgggtcttggcagcttcaggggacagatcgccccgctcacgtttgcccctcttgcttcccaccctgtttctgtcccttccccggggccctggggcacacaggggtgggatcgggggtccaggccgggaagggctgctcaggctccgggcacgcactcctgggggcggcctgtgcacatcccttttggaggggtctgccccacgcatccggggaggtacgcagcccctggtgccagggtccaggtggtgctactggggagggcgcgtgcaggaaccagcagccctggaaccagacgccagggtaggagctggtcacgagccctgcctggctgggtcgggtccctgtcctgggtcccagagtgccctggacgttggggctgcagggacaccccggggccagcgacggcaggtgatgtccagggccccgcgccaactgggagctttgctgccgctgcggccttgtgtgaatttggagggacaaggccggggcgcgaactgaatctactgtcatatgcggagtcaatgcaccatctccaggacctcgaaagcctcagtttccacgtatgcaaaacggtccatggtgccctcgtaccctggtcgctgctgcaccatcgaggtcagcgcgcggcaagtcccaggtaggccacgtcggctgcagacctcggcggcgggcggtggcggcgcgtgtccacgcgagggcgctgcgcaccgcgcttcagcccgacctcgccttctgcaggggcggtctcctggcgccagggggcgtgcgaggaccgaggagagcgcaagagtaagcccgcgggtgccggagcgcgcgccccgccgtgtgctgggtccagggcgcgcggccggcctgtccgggcctccttcgcagacgaagcggctggaacgtctcgggggcgcgccaagccgggggcgcatgcctgcacacgtgtgcggggctcacctggtgctgcggccggctcgggcgttgcctgcacgcaccgtgctctacctgcgggagcggagtggagtccgcggtgcctgcgtggccggggcagggcccacagggtccggctcagagccccgccccgctgcctgcggctgccgagcctttccaagctcgagggggccgggacctttgggaaaccagcgcctgaggcttgggggcggccgtgctgggagtggcggctgccgggaagcagggc

SEQ ID NO: 724995 - DNA, 1545 bp, Homo sapiens
cctgagaaaccacagctgagaattcacacaaaccgatgctgtatttgtggaggctccaccgactcacccaaaacacgtgcttttcccctgacctgcaaacttttaacaccttcttctcttcccgtttcactaggctatttgagatcctgcaagatttatcaagactgtactagccatatgaaagcatgttaacacagggagggagagaggaaaagccctccacatgttatgactggcatacatgcttccaaagcatcgttactaaccgaaggcccagttcctgaggcgatcaccccagacacactgaatgcaatttgttggtcactgagtgggtatacctaatcaccacagatgtttacatgcagctgcattttctctccgtttgagtcacaatgttttatatgtaaatagtattgtgtgcatgtgtgtgcatatgtgtatttatcctccaagtccagatggagttaattttctgctgttatttgtagttcatgtttcatatctaagaaactaaggacccagatgagctttccttggtgtcacaaactttttttttttttttttaatagagatgaggtctcactatattgcccaggctggtctccaactcctgagctcaagtgatcttcctgccttagcctctccaagtgctgggattacagatgtgagccactgcacctggccaacaaacttctgattcttatagaatcagatgtaattccttagagacctgagaagttctatactcaggttctttcgtgccgtctgactccaagagctcttgcctgaaggaggtcccttccaggacactgagtcccaacccacaccacctccttggagggcgtgtgccctctcttccgctgaccttgacattcttgcacaggctgcttgtgcacagaggcatcacctcccagaggggacctctggagtggccccaggtaccaggtacagtcagccgcttctacctgtggaaggcgatcagggtagaaagctctgggaagcactaaaaatacacacaacccttacaaacacaactcggtgatacatgctaatagttctggactccaaactggggccaaagcacagactccacagctagttctagcatgtagcagatgtcacccaacctggaaagctacttggttgaaacttagttaaatcygtggccacagcagttttatacttgacctgagtcctccaatgtctgccacacctgcagtggcttccttcccattctctctctcctctaaaatacaagaggcatttccccccagtgcaggaagatggaacagactattttggttaatcatctacatttgtgttcttgagtttcttctggagttgtccagcctggggctgcatgcacattggcccaccacaaatgcctccctctgcggagagtgaggtgggccggtcggggcagaacgcctgcttctcaatgcaccccttgctcactcagctctgggagcccccctgccagcgtgcccgagagctactctaaatgaagttcgagctccatttcaggaaggtggtgagacaataaaa

SEQ ID NO: 724996 - DNA, 1271 bp, Homo sapiens
gtttggccccattttcaaaaccactgtgttttatttctattgtcccaaaccctctggccttcttcctagagaacaccaagaggaatgctctcaccagtttggttgaaaccttattttttagtttgtgcacattcaatgtcactgtgctaagagtgaccggatgcattagtcagttttcatgctgctaataaagacatactggcccagcgcagtgactcacgcctgtaatcccagcactttgggaggctgaggcgagtggatcacctaaggttgggagtttgagaccagcctggccaacagggagaaaccccatctttactaaaaataaaaaattaaccaggcatggtggcgcatgcgtgtaatcccagctactcrggaggctgaggcaggagaatcacttgaacctgggaggcagaagttgcggtgagctgagattgtgccattgcactccagcctgggcagtaagagcgaaactctgtctcaaaaaaaaaaaaaaaaaaaaaaaaaatacccaagatgggtaatttataaaggaaagaggtttaatggactcacagttgcatatggctgggaaggcctcacaattatggcagaagtcaaaggaggagcaaagtcatgtctcacatggaggcaggcaaggagcttatgcagggaactcccctttataaaaccatcagatctcatgagacttctcattatcaggagaacagcacaagaaaaacccacccccatgacttgattacctcccacaacacgtgggaatcatgggagctacaattcaagaagagatttgggtggagacacagccaaaccacgtcaccagactgcctcttcagggagtgaatcacaaatgtattcctgaccaccctgttttctcccctcttgaatcaggtaagtccttgcccaggacggagattggtcctaactgtatttgccctaaagaaatatgaccttttatgatggggtatatttattaaataacagtattctgatatttaatgactacatgaccactaacacagctggatgaagttgaattccaaaggaatcccaaggcctaatcctatccttaaataaaatattattttctttgaaaaagggtcttgctttttcacccaggctggagtgcaatggcgtgaccatggctcactgcatcctagaccacccaggctcaagggatcctctgcctcagcctcctgaatagctgggaccacagtcatgtgccaccacaccaggctacttttatttttattttttatagagatgggggt

SEQ ID NO: 724997 - DNA, 1271 bp, Homo sapiens
gtttggccccattttcaaaaccactgtgttttatttctattgtcccaaaccctctggccttcttcctagagaacaccaagaggaatgctctcaccagtttggttgaaaccttattttttagtttgtgcacattcaatgtcactgtgctaagagtgaccggatgcattagtcagttttcatgctgctaataaagacatactggcccagcgcagtgactcacgcctgtaatcccagcactttgggaggctgaggcgagtggatcacctaaggttgggagtttgagaccagcctggccaacagggagaaaccccatctttactaaaaataaaaaattaaccaggcatggtggcgcatgcgtgtaatcccagctactcaggaggctgaggcaggagaatcrcttgaacctgggaggcagaagttgcggtgagctgagattgtgccattgcactccagcctgggcagtaagagcgaaactctgtctcaaaaaaaaaaaaaaaaaaaaaaaaaatacccaagatgggtaatttataaaggaaagaggtttaatggactcacagttgcatatggctgggaaggcctcacaattatggcagaagtcaaaggaggagcaaagtcatgtctcacatggaggcaggcaaggagcttatgcagggaactcccctttataaaaccatcagatctcatgagacttctcattatcaggagaacagcacaagaaaaacccacccccatgacttgattacctcccacaacacgtgggaatcatgggagctacaattcaagaagagatttgggtggagacacagccaaaccacgtcaccagactgcctcttcagggagtgaatcacaaatgtattcctgaccaccctgttttctcccctcttgaatcaggtaagtccttgcccaggacggagattggtcctaactgtatttgccctaaagaaatatgaccttttatgatggggtatatttattaaataacagtattctgatatttaatgactacatgaccactaacacagctggatgaagttgaattccaaaggaatcccaaggcctaatcctatccttaaataaaatattattttctttgaaaaagggtcttgctttttcacccaggctggagtgcaatggcgtgaccatggctcactgcatcctagaccacccaggctcaagggatcctctgcctcagcctcctgaatagctgggaccacagtcatgtgccaccacaccaggctacttttatttttattttttatagagatgggggt

SEQ ID NO: 724998 - DNA, 3159 bp, Homo sapiens
tggagttcattggtctaaccctgtcaatttacagataaggaaagtgaggtccccaggggctaagccattggactgccatgcaccgtggttgatggggaggcaggggcctgagcactctgcttggagccccctctgctttctgctctttttggctgatcagtgtgtttgcagtcagcatgccggcatcactccccaagactggcggcccagcgtcaggctcgaacaccctatgagaactgtggcagtgacagtgcgggtttttgtggacttcatccccggacacagtgagaagctcttggctaagacacagggctgatttactcacactgtgagggaataagctgggaatggaagagtctggctgtgtcagtatagccaaatacgaatcccagaatagatgggtatgaatagaccactgacaaaatcttcagatttagcatctagcagtagctgacagtgagtactttctctggaatatggatattgaaaaactacctttaaaaaaatttttaactgttatttaggtcattttctggcactgaaggagctgaggggcttcagatgactagaagaaaaaagaaacaagttcaatttagacttcctacaaacatgttagataaaaccaacacagatgtgtccccctcctgctgcagagactcaaggtagactctgataaaaaaaaaacacacagctgatcacgtaataggcgaagagagaaaacaaaagtagtgccgttgggaccaacacactctttagtggccgttcctgggtctgggtacttgttgggtttggtcctagattgcacccagggctgggaactggaatgctcacgtccagagatagatgtggttttggcctaacaaaggtgtgggagctagaatttggatccttgcataaagtttagagcctgaagatctgattgtaccctaaaaggggactggaaattacaataccaggccatgcatgggtatgggctccaagtttattttatctcagtcatacaggaaccaaaagtagaagccctgccataaaaacagttgcagcccattgaagtcctgaaggccttgggtggcagcaggtgcagaactgtcctgtaggcatgcctccaccacccagtgtgtaggagatttggagataaaacaacccccacggaggataagatcacactagaaaaataagcacataaacaaatctaccaccatggtgagaagaggggtcaagaaataaacagtagaatcaaagtctctaacaatctgaaataattgaagaacctgaaggtggatataaagtacgggcacaactcattttattgcacttcactttattgtgctttgaaggtactgtggtttttacacattgaagatttgtggcaaccttgcattgaacaagtctgtttggtgccattgtcccaaaagcatatcctcatctcatgcttctgtgtcagcattttaaaacaacaaagtatttttaaattaaggtgtgtacatatttttaggcagaatgttgttgcacacttaatagactacaagcatattgtaaacaaaacttgtatatgcactgagaaaccaaaaaatttgtgtgactcactttattgcagtgttctgcaaccaagcctgccatgtctctgaagtatcctgtagttattttataaaatgattaaagaagaaatagagccatagtaagaaaggaagacagtttgaaaaaaaattggaaggtttttttaaaaagaactaaaagtgcatgatatgttcattgaagtttttttaaaaagtcatcagattagacacagttaaagacagaattagtgaattagaagatagagctggataaatcccccaagcacagcaagagagataaaaagatggatagtataaaagtgtaattaggagtcatagaggaaagaatgagaatgcccattaggaaatccagaaggaaggactttagagaatgttttgagtagaatagttgaaaagataatggctgagaattttccagaattgaagaaaggcatatgtggtcaaacaattttgaagtagaataacaagcaagggaaattatccatcagatatcaagatatattacaaagctgtgaccattaagacaatgtgttaattggcctaagtgtagactaaccaatgaaataaaattgagatctttaaacatgcatatatggcagtttgaaggcattataaatgagatttacatacacctataaattgtgccagggcaattagttatccatatatgaggaaagataaaattagatctctgcctcacacaaaatcaattctaggaggtgggaggtgggggtgggagttaataagaacctatatatgaaagaaaaacctttaacattgttagtagaaaatatagaatatgacggccaggcgcggtggctcatgcctataatcccagcactttgggaggccaaggtgggcagatcacctgaggttgggagttcaagaccagcctgaccaacatggagaaactgcatctctactgcaaataaaaaattagccaggcatggtgcatgcctgtagtcccagctactcgggaggctgaggcaggagaatctcttgaatccaggaggcagaggttgcggtgagccgagattgtgccattgcactccagcctgggcaacaagagtgaaactgtgtctcaaaaaaaaaatatagaatataactgyatatattaagacatgctacatatcagaattctttcatcattgtctaagaaaagctttttgcaggaaagatatttacaatgcacaaaatataaagatgggtttcttgaataaatatgcaaatcagtccagtaaataaatgggcaaagtatatgacctggcagttcagagaagaggaaacccaaaatagccaataaatataaataggtgttcaaccttactagtaatttaagggcttgcaaattaaaccatcaaattagcaaaaataaaaatggtgctataactgtgagtgaggtagagtgaaaggatgtgttcacttcctcagaagccatgtacatgggtaaagcttatggtgggcatttctggtaagctagaagatatggtcctaggtgtataccctagtagatgcccaagaaagtgtatacaaaatatttgttgtatttgggaggctgaggcaggcagatcacttaaggtca

SEQ ID NO: 724999 - DNA, 1131 bp, Homo sapiens
ccccttcagtgcacagcccagagccgtgatttgccagctgggctcctgcgttcagagtctcccaacagaacaggttcttgtccagagaagttcaggaaatgctacatactttcccctgccttttagagacttgatgtccattagactgtgaaagacctcgagaattgcatgaagaaacttgtttccaaaatgtccttttgtaaagggatacctgctacacatgtgattctgggaatattctgggaagcgcaggcctgttgagtaaatgcagcacctgtattcaccatggcatccagggcccttcaaatctcagtgttgcttgacctcccagacagctgctcccatccctgccatgtgcgccacaagcccctgctccagccgccacagcttctccgatcctggaacagtctgaccttgtactgttcttactgcttgaggtataccttcccacctccaaagattctcttgctccttcgtggcccacccgagattcctgtcttgtgtgaagccttcttcaggcccctcaccaggtagggtcacgtgctgtcttccctggctcctgtagcatttcgttctgatcactcgaaggagccatcagtatctgacgtcagtactctgctgtctgataatccctccaggcaagttcagagtctctcctgtctggtccctgtgggtcagggcagcccctgccttccaggaagcagggacatcatcaagaactggacttctttgtttccccactgcccagcctaccccacccttcctgggctgcagccagctcaggagcctgttgccctgatggtggagtcctttcaggacagggaggctgtgcctgtctctgcctgtgggccagagtgccacgctgctatgtgccaggatatgtggccaagtgtgacagagattcctagatgctgacgagcctctcattgcacagtggtacrgtgtctggccaactgtctatccccagccatctggttctcccagttacttctgcgggtgaaggtgaggagatgagaggcctgctctaggaaatgggttgggggccggaggggccctggcggggattgccgtgagcctctcttactcccggatgtccctggtgagaggagccacttttgtgttgcttttgtg

SEQ ID NO: 725000 - DNA, 815 bp, Homo sapiens
tgggattataggcataagccaccatgcctggctccgattattattattttttacttgtaaaaagttcaaggccgaaggggaaaacatttatcataaaatattcacatctatttgtaatatttttagtagagaagaaaatatgcactaaaacataattcatctgttataatgggagcatatgaagctgtggtgaatagggaaatatattaacaaaggctgaaatattaatcaaacagtataagttatatctcagtaagatttttaagctatgaaactgtataaggaacttatttattgcaagaaatatctcagaattatattgggaaaggttctaatggaacaaaagtccaccaaaaagatctcactattaaaattatgggctgtaagtaattctgaattaattcctttgttggggtggtagggtgggagtmgcacaggataattttcttttttaaattggtagaataaaataataataagagaaaggagggcagaaggagacatttctggcaacaaatgtggccttagcactttgaaggaaatgcatttttttgagcacttgtttagtatcttggcctgggataggtgaacttttcttttaaaatctgttttgcattcatgttattaaaaaaaattaagtgctgattcatctagaagatatttttaaccatattggcacgcactttctcaccttgacatatatagcatattttctggaaatgtgagcaaagcacattttctgctgcatacaataatacaatgcagtgcaatgtaattcatgtccctgagatagtgtgaggtaccaaaggcaaaca

SEQ ID NO: 725001 - DNA, 618 bp, Homo sapiens
tctcagctacttgggaggctgagacctgaggacgatctcttgagcccaggagtttaaggctacagtgagctatgatcaccccactgtgatccaccctgggcaacaccctgttttgggacagtgtctcaaaaacaaaagacaacaacaaaactacatgtgcatgtatgtttcaagggattcaaatcttagcattcaacaatcttaggattcaaaagattccttacccagaaaaagaaatgttaagaattggcccaggcacggtggctcatgcctataattctagcattcaggaggccaaggtaggaggattgtttgaggccaggagtttgggaacagcctgggcaacatagtgacatctcgtttctacaaaaaataaaaaattagtcgggcacagtggcatgtgcctgtagtcccagctactcagtgggataaggggtaggattgcttgagcccaggaggtcaaggctgcaatgaaccgtgactgcaacactgcactcagcctgggtgacagagtgagaccctgtctcaggaaaaaaaaaaaaagaaaaattaacyactgatttaagataaattatcagttaaatacaaattaaatcaattaacccaaaccattccatt

SEQ ID NO: 725002 - DNA, 765 bp, Homo sapiens
cggctgtaccctcagcacttaaaacacatagcaggcactatgtgttggatgaacaaataactaaacagaaataggccgggtgtggcggctcacgcctgttatcccagcactttgggaggctgaggcaggcagattacctgaggtcaggagttcaaaaccagcctggccaacatggcgaaaccctgtctctgctaaaataaaatacaaaaattagccaggtgtggtgacacacacctgtaatcccagctactcaggaggctgaggcaggagaatcacttgaagccgggaggtggaggttatagtgagcwgagatcgtgccactgcactccagcctgggcaaaagaccgagaccccatctcaaaaaaaaaaaaaagaaaaaaaaaagagaaagagaaatagattttttttttgtttcccttaccctagtcttatcttttcccacaaaaattggaccctcaagtttcttcgctccctcaagttcattgaggctaaattgggtttaggctttaaaggtccagattaggcctatagttttttccactttactttttaggggaccacttggaagggagggagaactaaggaaataaatgtagcctgggcaacatggcaaaaccccatctctacacaaaaaaattacaaaaattagcagggcatggtggcacatgcctgtagtcccagctatttgggaggccaaggtaagaggatcacttgagcccaggaggtggaggttgcagtgagttaaaatcgtgccactgcactcca

SEQ ID NO: 725003 - DNA, 573 bp, Homo sapiens
ccaagtaagattttaaaatttgttataattttggtttttaacaacttctgttgtaaataataaaagcactaaatccctactgaaaataaagggcctaaagactgaatgagagatgcaattttttttggctaacctattggcaaagaaatgatgatgatgatgatgatgatacctagtgttgctggagtgaggggaaatgagatgtatcagttatccattgctatgtgacagccactcccagacttaatggtttgaaacaacagtcactcattttgctcatgaattggtaacatgatcagagctcagcagaaaacagctcctggctgctccgtgcagggtatctaggcacagttcatttggcaagttggtgttggctgctgcctggaagcttagctggggctgtgggaggggcctccagtcctctmcccatgggcctctccatgggctgctcagacttcctcacggcatggtggctgggcccttcagggtggccttttcatgtgctagcctcagaagccacctagcatgacttttgcgattttctgttggttgaggttgatgtaacggctcgcc

SEQ ID NO: 725004 - DNA, 573 bp, Homo sapiens
ccaagtaagattttaaaatttgttataattttggtttttaacaacttctgttgtaaataataaaagcactaaatccctactgaaaataaagggcctaaagactgaatgagagatgcaattttttttggctaacctattggcaaagaaatgatgatgatgatgatgatgatacctagtgttgctggagtgaggggaaatgagatgtatcagttatccattgctatgtgacagccactcccagacttaatggtttgaaacaacagtcactcattttgctcatgaattggtaacatgatcagagctcagcagaaaacagctcctggctgctccgtgcagggtatctaggcacagttcatttggcaagttggtgttggctgctgcctggaagcttagctggggctgtgggaggggcctccagtcctctacccatgggcctctccatgggctgctcagacttcctcacggcatggtggctgggcycttcagggtggccttttcatgtgctagcctcagaagccacctagcatgacttttgcgattttctgttggttgaggttgatgtaacggctcgcc

SEQ ID NO: 725005 - DNA, 650 bp, Homo sapiens
gcaattgctatgtattaattatactaaacacaaaaattagtgcaattccccataattttgcccccttcaattttatacttcactgccaccaggttctctgaatctggtgggagtgaatcatgaatccagtttatcatgaatctaaggaagtttcaagtcccctgaagcccaccagagttcctgaagacagcccctccactctctcctgagagagagagaaagccagccaatagctcaccagtgggtcaagtttagggcttattcccccacttttcttctaaattgctgggctcctgccagactcagttctttactgcatcaaatcagcaaaccctaaatctcctgcctgctccccaccctaataatgcaattcagccaaaccgactttgcaggaagactcattaaactggagaaacctacaaagtggcagggttggggggagggtagaaacacacacacacctcaaaccacaagcatcttcgattgcttttgtctctggagacagcagaatggatgggctgccctgggcgactgagcagatgggaaactcattacagatgtgagctttagaggaagaaggacatttggagacccatacacttcaggagtttgrgggtattcatgtgttgcctggaaaccagagaccaaat

SEQ ID NO: 725006 - DNA, 642 bp, Homo sapiens
cagaaaatatttaatattcataatctacataattttagaattagcctgtgtacatactatgaatgaggatatccaaatctgcactattgatactgtgaaattcatgcagaagattcagttaagttcttgcctgtgcctttccaatcctttattttctttcttcatactcactttcaacagcactgatgagtttaaaaaaaaarggggggggggggacaggtggtatagcctagcactgaaattatgctaaataaatgtaaaaataaaacaaacaccaaacaccaaaaacaaacccaaaagaccaaaaataaatacagggttggtatctaaatgatctataaaaatcagtctttttagttactaggaatagggggaagaatttttctaaaataacttcaataccagctttgcttaacacattttaaaaaaaaatgatacagaattttaggtgttcaacacagatatctcaagttctaagcatcaaagctgaatatgattctattaaaattataatagtgtgctgctgcagaaaaaaattcacatctgtacatactaccacggaactatgagagaactgatgaaaggatggatatacataaatagcttttaaacttttaaaaatgttttaaaacatgtttctaa

SEQ ID NO: 725007 - DNA, 1463 bp, Homo sapiens
tccagagtctgcgattagcagctacaggagttcatgttcatctgctgttgtgtctttaagaattcaaactgggcttttctattgtcgacattggcattggagagatagaaaaagaacccaaccttttgtcttttaatttcatgtgaatgtctcccagagacagaacctaaaccrgaactccggcatcaaatgtgtctgagaaatgcagtttcttagattctagtccttggaatacaatgaagtacagaaaatgtcagaaataatgctatgacatcgaaagaaaattttgcttatctgaaggataggggatatctttttccttatctcttccagtttatacttgtttattctctacatccatgttaaacaccactgcttccatgaagtcatgtcatattcctaatatgatgcaagctcagtgttctttaaactccctagagtataatgcatacctattattgtatttgacatattctttgtattatggtagttttgtagcatctaatctcttctctcactagtctgtgatttggtatggaaaatcccatactagatttaacataggatttaaagtgaggataaaaatcatgaattcagatttctttgttttctgctgatctgaaataggtttatatgcactcattgaggaatgcttagctaggggaaaagaacttcgttaatttctgcttttcaaaacaccatcgagatgctcttttgactagacatgtcaagtgaaattgttctactaggcttcagtatctcagatcatgacaaatcatgacattctgttattgtgtttaatactgataagatatgtaagtgaataataagccagaaatacatccaatgaaaataacttagtagcacaatacttttttgagtagttcgtgaaggaaagggttgcataggaagaatataattatgtaagttttgaagacaaagaaatgaatttcctaccatgtaaacttagtattcactatatctttctgagatctattttctgtctaaaatatgaaaaataattaattgagaattaaatgaaataatacacatgatagcattttgcaaattgtcttacaactttttgattgctattataacaagtattattactacttaacaattattaacttcttcctacgttccaggcacagacagaggcactttaccacgattaactcatttagtccgtataaaaatcttataatctatgttctattaagttttccattttatagataaagaaaccaaagtttagagagctcaaataacttgtgcaaagtttctcaagacactggtgattgagttatggaaaaaatcataattacctttgcagaagattatgcttaatcattatctgataccagcgaagcaaaacttttatccactagtagtaggaacaagaaatagtaaattaattgaaacatggcaataaaatggaaatcataaaaatatatttaaca

SEQ ID NO: 725008 - DNA, 1171 bp, Homo sapiens
tgaagctggaaatcatcattctcaacaaactaacacaagaacagaaaaccaaataccacatgttctcactcataaatgggagttgaacaatgagaacaatggacacagggaggggaacatcacacaccagggcctgtcagagggtgagggactaggggagggatagcattaggagaaatacctaatgtacatgacaggttgatgggtgcagcaaaccaccatggcatgtgtatacctaygtaaaaagctgcactttttgcacatgtaccccagaacttaaaatatataaaaaaagaaacataaaacaaagttttaaaaatattgtgatttaagcacattattttttatgtatcagtatatccagttatatttttggtaattaggtgggcatgaaggagatgtgagatctgattgtttaacaaaggaaaacaaaagatggtaataagtttatttctgggcatagtaaagttatatttaagagctcttccagcatagaggttcttaattaaacatcaataaatgtgctcccctataaccatgagttatatacaatgttacatcctgttatatatcaagtagatttatccacttgtgcttattagacttataggttaccatgttagctttgttagaattcagagttttcagttaggttagctgctttataatggattataaattaaataatttctaaaatctaatgtgggagaaaaccaagaaaatattaatgtatcttattatttcatcattctagctctgttcattacagtggcttggaaacatttccacaagttataaagatatttatctctaaaacttaactttttattgctaatgttttcttctaaaatgaacctgagcttatccgaataccttattgcaataaagcaagattatgtaaattttatgaaagcttttgttatttaaagaacacagctacttcatcttccattggtgggtttctgataaatttcactttaagaatatcacatatattcaattgaaaatcagttacactggccacaaaccaatcaaaataaaagctatgtggccatgctaaccctcaaaaaaaaaaaaaaattactctactttcatagtactatactcagattgattttatgaggaatataaaatttgttaatgtttattagtatttatctttaccagctta

SEQ ID NO: 725009 - DNA, 1171 bp, Homo sapiens
tgaagctggaaatcatcattctcaacaaactaacacaagaacagaaaaccaaataccacatgttctcactcataaatgggagttgaacaatgagaacaatggacacagggaggggaacatcacacaccagggcctgtcagagggtgagggactaggggagggatagcattaggagaaatacctaatgtacatgacaggttgatgggtgcagcaaaccaccatggcatgtgtatacctatgtaaaaagctgcactttttgcacatgtaccccagaacttaaaatatataaaaaaagaaacrtaaaacaaagttttaaaaatattgtgatttaagcacattattttttatgtatcagtatatccagttatatttttggtaattaggtgggcatgaaggagatgtgagatctgattgtttaacaaaggaaaacaaaagatggtaataagtttatttctgggcatagtaaagttatatttaagagctcttccagcatagaggttcttaattaaacatcaataaatgtgctcccctataaccatgagttatatacaatgttacatcctgttatatatcaagtagatttatccacttgtgcttattagacttataggttaccatgttagctttgttagaattcagagttttcagttaggttagctgctttataatggattataaattaaataatttctaaaatctaatgtgggagaaaaccaagaaaatattaatgtatcttattatttcatcattctagctctgttcattacagtggcttggaaacatttccacaagttataaagatatttatctctaaaacttaactttttattgctaatgttttcttctaaaatgaacctgagcttatccgaataccttattgcaataaagcaagattatgtaaattttatgaaagcttttgttatttaaagaacacagctacttcatcttccattggtgggtttctgataaatttcactttaagaatatcacatatattcaattgaaaatcagttacactggccacaaaccaatcaaaataaaagctatgtggccatgctaaccctcaaaaaaaaaaaaaaattactctactttcatagtactatactcagattgattttatgaggaatataaaatttgttaatgtttattagtatttatctttaccagctta

SEQ ID NO: 725010 - DNA, 1171 bp, Homo sapiens
tgaagctggaaatcatcattctcaacaaactaacacaagaacagaaaaccaaataccacatgttctcactcataaatgggagttgaacaatgagaacaatggacacagggaggggaacatcacacaccagggcctgtcagagggtgagggactaggggagggatagcattaggagaaatacctaatgtacatgacaggttgatgggtgcagcaaaccaccatggcatgtgtatacctatgtaaaaagctgcactttttgcacatgtaccccagaacttaaaatatataaaaaaagaaacataaaacaaagttttaaaaatattgtgatttaagcacattattttttatgtatcagtatatccagttatatttttggtaattaggtgggcatgaaggagatgtgagatctsattgtttaacaaaggaaaacaaaagatggtaataagtttatttctgggcatagtaaagttatatttaagagctcttccagcatagaggttcttaattaaacatcaataaatgtgctcccctataaccatgagttatatacaatgttacatcctgttatatatcaagtagatttatccacttgtgcttattagacttataggttaccatgttagctttgttagaattcagagttttcagttaggttagctgctttataatggattataaattaaataatttctaaaatctaatgtgggagaaaaccaagaaaatattaatgtatcttattatttcatcattctagctctgttcattacagtggcttggaaacatttccacaagttataaagatatttatctctaaaacttaactttttattgctaatgttttcttctaaaatgaacctgagcttatccgaataccttattgcaataaagcaagattatgtaaattttatgaaagcttttgttatttaaagaacacagctacttcatcttccattggtgggtttctgataaatttcactttaagaatatcacatatattcaattgaaaatcagttacactggccacaaaccaatcaaaataaaagctatgtggccatgctaaccctcaaaaaaaaaaaaaaattactctactttcatagtactatactcagattgattttatgaggaatataaaatttgttaatgtttattagtatttatctttaccagctta

SEQ ID NO: 725011 - DNA, 3039 bp, Homo sapiens
ctacctgctaacatttccacccagaagaaatattttattatcaaatggcagaaacaattttcacagtagccacataaataggctttggatcacaaaaatcataaattactcccgtgttgaccttccactatcaaaaaagttttaaaccctcccagaaagtttagtagaaagagaaagagtcaacggtacggtggtaagagcatgcactctaaatcatgttgcttagaatatatactagatgtgtcaagtggcaagacacttaaccctctgtgccaacaaactgcagataacaataattatttcaatgtatttttgaagattaacagatattacatatcacaatgcttaatgaataatatgtactccaataattatattatattttgatgctgattactcatgttcaaatgaggatttaaggcctcattagaaatttaggcaattggttaatctacttctctattcaatcaacatatagtcagtgctatatgtgctgaaggcacagtattttccctgctttagagtagcaatgtaatgagggaaccaaagttaaaaagcaaaaagaagtgaattttaatgttgataaaatcatgccatactaagaaatgtgcctatattaaggtaaagtaataaactataaagttgtttaacaacatttttattccactttttttctttccagttccttattgagttaaaacttgtaaaaactgacaggtttgggtggctcatgcctgtaattccagcattttgtgaggccaaggtgggcagatcacctgaggtcaggagtctgaaaccagcctgcccaatatggtaaaaccctgtctctactaaaaatacaaaaattagctgggcatggtagcatgcgcctgtagtcccagctactaaggaagctgaagaaggagaatcacttgaaccagggaggaggtggttgcagtgagccgagattgtgccactgcactccagcctgggtgacacagcaagactccgtcgttaaaaaaaaaaaaaagctattaacataaacttcatagtgttttttaaagaagctacacatacaagttcttagttgcttccaagtttttaagttttcatttttaatttctgtattaaaatgcttttaccctgctataaacaatacctgagactggataatttataatggaagcaggtttatttgactcacggttctgcataactgagaggcctcagaagacttacaatcatggcagaaggtgaaggggaaagcagacaagaaaggctctctcattttaaaccatcagatttcgtgagaactcattatcattagaacagcatggaagaaactgccaccttaaaccaattgcctcccaccaggcctctccctccacatgtggggattacaattagagatgagatttgggtggagacacagagccaaaccatatcaatttccaagaccttatcttctctgtattttgtgtaacatataaggtgccccaatgttacttttagttaatgtttacatcacataaaaagttactagtcttctctgaacatgaactttataagcataacatttttatcaactttgaatgcacattttaattttactaagagttccatataccttcagtgtttcttctagaaataagcctaaacatttccacatgctcacatttktattaaggaatgaggctaaattaattgtgtttatatactcaaaactctgtaaaaataagcatcttattagaaattagggtaaaagaaaacaagatacaaacaaaaagcacctttgtcatgtctaagaaaaccaaattttctatgctgagagcccagtgattttgctgagcaaatttaggtttttgttgtaattagtttctatttttatttattttgatatttagagttctttttatctacattaagaagaactcattgaaatcaaattgttaatcataatgttaaaaaatatgtgaaaaacaattttgtattcaaatatggttctgcaccaaactcatgaggcaactagcttctaagaagcagggtttatgccaggctattgctttagagaccatgaattcaattgtgaaagtatcattcaaatttaagtatttaatattcttagtaatcttcatttagttcagtattaattctattgaggaaaagtccaaaaatgtatttttattgtcaaattaacagagctaaattgacatatctaaataataatctcttaataaagcctgaggtaatacctattatgcctcaaaggaaagcaatcaaattgaaaaaggcaatatcctcaatatcctcctgggaacaacttttcttttctttttaaccctattccccagagtctcattcttcttattataatgcaaacataaattgcataaacaataaaggaatgcatgcttccagaaaaaagcatgagaataaaagaaaatcacatggtgatataaaatatataaaaacaatactcatcctgacagactgttagcagaatgggagtcctcctattcgcctttggaacttagtatttgaccattttgttagtaactttttcacaagggtgatgcttaatactgagtgtcaacttgattggattgaaggatgcaaagtattgatcctgggtgtgtctgtgagggtgttgccaaagaggttaacatttgagtcagagggctggtaaaagcagacccaccattaatctgggagggcacaatctaattagctgccactgccaccagaataaaactcagggaaaagaatgtgaaaagactaaactggcttagcctcccagcctacatctttctcctgtgctgaatgattcttaccttcaaacattggatttcaagttctttagctttgggactgggactggcttccttgctccacaacttgcagatggcctattgtggaaccttgtgatcatatgagttaatactccttaataaactctgctttatatatctatcctactagttctgtatttgtagagaaccctaatacatattttggtaccaagagtggttctagaggaacagaatattaaggatggagttc

SEQ ID NO: 725012 - DNA, 659 bp, Homo sapiens
ttccctatttattttctatttttcattgtatagttgtcttacatttctatataaacaagtctctcagtatttgtgatttattttcaaagctgacaaagttattctgccatggatctgagaaacagttygttctatttttggttatttgtcagtaatttgattttttaaaatataatttgttactccatctggagtttacttagatgaatgtataatattgtccaaactattatgcagttttccaacacaatttattaagtaattcatttcccttttgatttgagggaaatgaattgttttattacatactgaatcctcaaatgtagttaagtctatttcttgagtcaccactttgttctgctgctctatttctatcttagcactggtattgaataattttaattgttgttttataatgtgttctaatatctggcagagctagaaacaactccttcctccctgaattattttctctttcagaatattcattgttattctcatctgtttgttgttcaagattaattttagaatcattttgtcagagtaaaaaaaacatcctattgggatttttgtatgtgcactcctgttaaaatataaattaacttgaagaaaataggcatttttataatacacagccctcatatccagacacatgtttt

SEQ ID NO: 725013 - DNA, 641 bp, Homo sapiens
tttcatcctcaccatatctcaatgaggtggtatcatttgtcccattttacagatgaagaaacaaaatcagattttctaactcatccagacttaagcgaccagcaaatggatttagatccagaaggctaagttcataaattttaaaacctgacctcgctttaaccatgccacattgccatagggcccagttgtatcaagtgcaatctaggaatctaagtgtttctcagtacagaatgaaaggagcaatcagatatacatgggggaatggagtgggggttcccccaggacttgttcaaacttgattgaacagattcttgagctcaggatgagggaggaggagatccttccagtgcaggactacagtgagaagaaatctcctcccaggaggtgatgagctaacaaaaaggaggtaacagacctgtcccaaaagccccttgcaaataaccctctgacaacacctgctctgcttgatggtgaatgtttttccacctgctccctccacttgctgtggcccttcagagaggaggggctatgtcagacacttttttctccccacacttttcctggcccatagtaggcactcaataaatgttggaatgaatgagctragcgcaggaatgagtgcatgaaatgagaagaga

SEQ ID NO: 725014 - DNA, 656 bp, Homo sapiens
attatctctyactgtcttgagacaaagctatacaattttggggtttgacaaatatggatctttcttattgcaaattcaagcctaaaacatgggatctttacttcttttcctggctttagcatttgcttagctgctttgaattttagcacaaaggaatattcatggtataaacattaacagaagactaatattgtaaacagtaaacaagtaggtcatgattttcagtttacccacatgggtcagaaatctgaaaattctttagaagtggaactgggaaaatcaggttaagaggtaataatggtaagggtgccaatgtcttagtcttaggcttttatgaaagagctttagatgttggactaatttctaagttgtctgggtcaatcctgtatgagatatttctaaaagaggttttgtctggaaagtctattgacatgtgacagactccacacaataaatgcaatataagacttagttactgtcacattaactctaagaaacagtctgtacggttatcagattaattaattggttggttaggttcagagtcagaagaaaaggaattgtatttgagaaagtatttatctggaagtaaataagatttccctgttttggaggagaagacagatgacagagaaggaaaaagaacaaaaatgagt

SEQ ID NO: 725015 - DNA, 649 bp, Homo sapiens
aaccttctacacagcaattcatataagaagatgcccctaaatgactttggatatgaaatctctcatgacagctgtgattacacaatagcaaatctgatgccacaggtgaaaacaggactttttgtgtattgtcacactcgaatgaagaagagctcctatacaactgccttttattgaattgaagacaccctcgattgaaaaatgtaccattattttttatacgactaagaaaggggagaaaaactactggttgagctaagataaaatgtttttttattacattaattatttcagacaggttataatatgaaaaagtgcacagtttagaatcaatgagccaggtatggtggtgtgcggtggtaatctggtggtaatgccagctgagatgggaggattacwtgaccccaggaattcaggacaagcctgggcaacatagcaagattctcatctcagtttttaaaaataataaataaataaataaataaataaataaaaaacagtaatttcttttgcactagtaaaagctcacaggacctctactatatgatttgggggaaaatcctatcaatattatgaggatagagaaattgcttaaagttattctaagaaacaagcaccttgacatttcaagatacagagataacaatag

SEQ ID NO: 725016 - DNA, 2071 bp, Homo sapiens
atctttgtttttattgtttttttcaacattctgaagaaacctttaagctaagaggtcaggataatagcctaggtgttgatagctgctgccatagcaaaacaacatattaaataaagatggtttaatatatgmggtagcctgaggtggagagatgtagaggaggggaggggtaacctttatcatttgtgtgttcatgtttagtcttctgattttaattaaataagatgcattttattttagaaaaggctgagaaatttaccttataagtaagagttttagttcaaggactgaaaactacaaggatgtagtccctttcttggcccttaactattctgaagcattagtttttgctctaggagaaaattctgccctggagatctgaacacataatctacactaatgttgtacaaagctgtgccacttctttagaacatttgcaacatgtgtaagcacctgaggtcactaacaggcagagaaattaacagttaagtaggaactaactgaaatatttatggagctggtgaaagaaacattacaactgaggacacatagcttgtgccatatataattcaaccttatttcagacaacaatttattttttatatttcaaaagacactgtgcttcaaacatttgtataatgtttcaatggctccccaaaaagggaatttataaacatgtgttgagtgcctcactctatgtttggggctagagagaatccatgcatagccattactgtgagctaataatcaagtggagatatctaaataatacagaacaaaataaaaattgcagaaatgtactagcaatgggtacctttgttccctgaggctaataaatgtcaggccaatagaaaggccttcaatatttgtttattattttgaacaaaaggaatgggtcacaatcaaaccagagaagggaacaatttattttggcaggcgaatctgggaaaggtctcatggaagaaatgttactgaccttgaagaatgagtaattttgattgggggagagggagaagcagcatgggcaggagacagggaagcgtgtaagtgcacggcacatccaagagagccaggagagtgcagcgaagtgcaggcttcatagaaagccaacggaggacgatgaggatgggaagggaagttggagcccatcaccaaagcattaaattccatagaatggagttggcattctattttccggataataaggaggttttttaagggcagaatgatatattcacttcactatttttggaaaatgattccgaggatagtgtgaaggatggattaggagatgaagctggaaataggaccatcagctaggaagctcatgtgctgtcagtgaaagataatgaaggcctcattaagacaggtgctgaggaagtaacagggcattctgaggggccattgaccactcacagggagaagaattcataattgtctatgaagaataggggaaaattaaggatgggatcaaagaagaactgacggctctagccatggtgacttgggagatgataggttctgggttccctggagaaactggagcttctggaaagtctcatgctttcatttcatgaccgtgcccagctacaatgcatgagtagtattttccaactcctctcaatattacaaggcataatttttttattgtcaagccacagatctgtttgataaaagtaaaccattcaaaagaaagattaggccaggcacggtggtttacacctgtaatcccagaactttaagaggctgaggtgggaggatcacttgagaccagaagttcaagactagcctgggcaatatagcaagaccctatctttacaaaaataaaaataattagccagagactgttgtacatgcctgtagtcctagctacatgggaggctgaggtgggaggatctcttgaaaccaggagttgagggtttcagtgagctatgattatgccactgcactcctcccagggcacagagcaagacagactctgtcagaaacagaaagagaaaaagagagaaagaaaaagaaagaaaaagaaagaaagaaagaaagaaagaaagaaagaaagaaagaaagaaag

SEQ ID NO: 725017 - DNA, 2071 bp, Homo sapiens
atctttgtttttattgtttttttcaacattctgaagaaacctttaagctaagaggtcaggataatagcctaggtgttgatagctgctgccatagcaaaacaacatattaaataaagatggtttaatatatgcggtagcctgaggtggagagatgtagaggaggggaggggtaacctttatcatttgtgtgttcatgtttagtcttctgattttaattaaataagatgcattttattttagaaaaggctgagaaatttaccttataagtaagagttttagttcaaggactgaaaactacaaggatgtagtccctttcttggcccttaactattctgaagcattagtttttgctctaggagaaaattctgccctggagatctgaacacataatctacactaatgttgtacaaagctgtgccacttctttagaacatttgcaacatgtgtaagcacctgaggtcactaacaggcagagaaattaacagttaagtaggaactaactgaaatatttatggagctggtgaaagaaacattacaactgaggacacatagcttgtgccatatataattcaaccttatttcagacaacaatttattttttatatttcaaaagacactgtgcttcaaacatttgtataatgtttcaatggctccccaaaaagggaatttataaacatgtgttgagtgcctcactctatgtttggggctagagagaatccatgcatagccattactgtgagctaataatcaagtggagatatctaaataatacagaacaaaataaaaattgcagaaatgtactagcaatgggtacctttgttccctgaggctaataaatgtcaggccaatagaaaggccttcaatatttgtttattattttgaacaaaaggaatgggtcacaatcaaaccagagaagggaacaatttattttggcaggcgaatctgggaaaggtctcatggaagaaatgttactgaccttgaagaatgagtaattttgattgggggagagggagaagcagcatgggcaggagacagggaagcgtgtaagtgcacggcacatccaagagagccaggagagtgcagcgaagtgcaggcttcatagaaagccaacggaggacgatgaggatgggaagggaagttggagcccatcaccaaagcattaaattccatagaatggagttggcattctattttccggataataaggaggttttttaagggcagaatgatatattcacttcactatttttggaaaatgattccgaggatagtgtgaaggatggattaggagatgaagctggaaataggaccatcagctaggaagctcatgtgctgtcagtgaaagataatgaaggcctcattaagacaggtgctgaggaagtaacagggcattctgaggggccattgaccactcacagggagaagaattcataattgtctatgaagaataggggaaaattaaggatgggatcaaagaagaactgacggctctagccatggtgacttgggagatgataggttctgggttccctggagaaactggagcttctggaaagtctcatgctttcatttcatgaccgtgcccagctacaatgcatgagtagtattttccaactcctctcaatattacaaggcataatttttttattgtcaagccacagatctgtttgataaaagtaaaccattcaaaagaaagattaggccaggcacggtggtttacacctgtaatcccagaactttaagaggctgaggtgggaggatcacttgagaccagaagttcaagactagcctgggcaatatagcaagaccctatctttacaaaaataaaaataattagccagagactgttgtacatgcctgtagtcctagctacatgggaggctgaggtgggaggatctcttgaaaccaggagttgagggtttcagtgagctatgattatgccactgcactcctcccagggcacagagcaagacagactctgtcagaaacagaaagagaaaaagagagaaagaaaaagaaagaaaaagaaaraaagaaagaaagaaagaaagaaagaaagaaagaaagaaag

SEQ ID NO: 725018 - DNA, 2071 bp, Homo sapiens
atctttgtttttattgtttttttcaacattctgaagaaacctttaagctaagaggtcaggataatagcctaggtgttgatagctgctgccatagcaaaacaacatattaaataaagatggtttaatatatgcggtagcctgaggtggagagatgtagaggaggggaggggtaacctttatcatttgtgtgttcatgtttagtcttctgattttaattaaataagatgcattttattttagaaaaggctgagaaatttaccttataagtaagagttttagttcaaggactgaaaactacaaggatgtagtccctttcttggcccttaactattctgaagcattagtttttgctctaggagaaaattctgccctggagatctgaacacataatctacactaatgttgtacaaagctgtgccacttctttagaacatttgcaacatgtgtaagcacctgaggtcactaacaggcagagaaattaacagttaagtaggaactaactgaaatatttatggagctggtgaaagaaacattacaactgaggacacatagcttgtgccatatataattcaaccttatttcagacaacaatttattttttatatttcaaaagacactgtgcttcaaacatttgtataatgtttcaatggctccccaaaaagggaatttataaacatgtgttgagtgcctcactctatgtttggggctagagagaatccatgcatagccattactgtgagctaataatcaagtggagatatctaaataatacagaacaaaataaaaattgcagaaatgtactagcaatgggtacctttgttccctgaggctaataaatgtcaggccaatagaaaggccttcaatatttgtttattattttgaacaaaaggaatgggtcacaatcaaaccagagaagggaacaatttattttggcaggcgaatctgggaaaggtctcatggaagaaatgttactgaccttgaagaatgagtaattttgattgggggagagggagaagcagcatgggcaggagacagggaagcgtgtaagtgcacggcacatccaagagagccaggagagtgcagcgaagtgcaggcttcatagaaagccaacggaggacgatgaggatgggaagggaagttggagcccatcaccaaagcattaaattccatagaatggagttggcattctattttccggataataaggaggttttttaagggcagaatgatatattcacttcactatttttggaaaatgattccgaggatagtgtgaaggatggattaggagatgaagctggaaataggaccatcagctaggaagctcatgtgctgtcagtgaaagataatgaaggcctcattaagacaggtgctgaggaagtaacagggcattctgaggggccattgaccactcacagggagaagaattcataattgtctatgaagaataggggaaaattaaggatgggatcaaagaagaactgacggctctagccatggtgacttgggagatgataggttctgggttccctggagaaactggagcttctggaaagtctcatgctttcatttcatgaccgtgcccagctacaatgcatgagtagtattttccaactcctctcaatattacaaggcataatttttttattgtcaagccacagatctgtttgataaaagtaaaccattcaaaagaaagattaggccaggcacggtggtttacacctgtaatcccagaactttaagaggctgaggtgggaggatcacttgagaccagaagttcaagactagcctgggcaatatagcaagaccctatctttacaaaaataaaaataattagccagagactgttgtacatgcctgtagtcctagctacatgggaggctgaggtgggaggatctcttgaaaccaggagttgagggtttcagtgagctatgattatgccactgcactcctcccagggcacagagcaagacagactctgtcagaaacagaaagagaaaaagagagaaagaaaaagaaagaaaaagaaagaaagaaagaaagaaagaaagaaagaaagaaagamagaaag

SEQ ID NO: 725019 - DNA, 2071 bp, Homo sapiens
atctttgtttttattgtttttttcaacattctgaagaaacctttaagctaagaggtcaggataatagcctaggtgttgatagctgctgccatagcaaaacaacatattaaataaagatggtttaatatatgcggtagcctgaggtggagagatgtagaggaggggaggggtaacctttatcatttgtgtgttcatgtttagtcttctgattttaattaaataagatgcattttattttagaaaaggctgagaaatttaccttataagtaagagttttagttcaaggactgaaaactacaaggatgtagtccctttcttggcccttaactattctgaagcattagtttttgctctaggagaaaattctgccctggagatctgaacacataatctacactaatgttgtacaaagctgtgccacttctttagaacatttgcaacatgtgtaagcacctgaggtcactaacaggcagagaaattaacagttaagtaggaactaactgaaatatttatggagctggtgaaagaaacattacaactgaggacacatagcttgtgccatatataattcaaccttatttcagacaacaatttattttttatatttcaaaagacactgtgcttcaaacatttgtataatgtttcaatggctccccaaaaagggaatttataaacatgtgttgagtgcctcactctatgtttggggctagagagaatccatgcatagccattactgtgagctaataatcaagtggagatatctaaataatacagaacaaaataaaaattgcagaaatgtactagcaatgggtacctttgttccctgaggctaataaatgtcaggccaatagaaaggccttcaatatttgtttattattttgaacaaaaggaatgggtcacaatcaaaccagagaagggaacaatttattttggcaggcgaatctgggaaaggtctcatggaagaaatgttactgaccttgaagaatgagtaattttgattgggggagagggagaagcagcatgggcaggagacagggaagcgtgtaagtgcacggcacatccaagagagccaggagagtgcagcgaagtgcaggcttcatagaaagccaacggaggacgatgaggatgggaagggaagttggagcccatcaccaaagcattaaattccatagaatggagttggcattctattttccggataataaggaggttttttaagggcagaatgatatattcacttcactatttttggaaaatgattccgaggatagtgtgaaggatggattaggagatgaagctggaaataggaccatcagctaggaagctcatgtgctgtcagtgaaagataatgaaggcctcattaagacaggtgctgaggaagtaacagggcattctgaggggccattgaccactcacagggagaagaattcataattgtctatgaagaataggggaaaattaaggatgggatcaaagaagaactgacggctctagccatggtgacttgggagatgataggttctgggttccctggagaaactggagcttctggaaagtctcatgctttcatttcatgaccgtgcccagctacaatgcatgagtagtattttccaactcctctcaatattacaaggcataatttttttattgtcaagccacagatctgtttgataaaagtaaaccattcaaaagaaagattaggccaggcacggtggtttacacctgtaatcccagaactttaagaggctgaggtgggaggatcacttgagaccagaagttcaagactagcctgggcaatatagcaagaccctatctttacaaaaataaaaataattagccagagactgttgtacatgcctgtagtcctagctacatgggaggctgaggtgggaggatctcttgaaaccaggagttgagggtttcagtgagctatgattatgccactgcactcctcccagggcacagagcaagacagactctgtcagaaacagaaagagaaaaagagagaaagaaaaagaaagaaaaagaaagaaagaaagaaagaaagaaagaaagaaagaaagaaagraag

SEQ ID NO: 725020 - DNA, 937 bp, Homo sapiens
taagcatgtgatgtctgtcaatggtgcctgtaggagaagccagaaaaggtcatgttgctcttgaaagctaaaatgtaaaccagggaagcaacacatacatgattgcttcaaagttttattaaaactactgacacatatgaaaaaactggtacacacaccacacatgaatgaagttcttcaatcaaagtttgctgagtgcttactctaagccaagctggkatacaacgtggaaaagaacactgcatggtacggaataacaactcttatctgttgagaaccaggcattgtgctaaaatttataattattatttctcatttaattctcaacaccctattattacactgggctctgcaaggacaggaatgtttttcctttttccctgctattatatactcaggaaatgaaataatgcccatcacaatgtcaaacactgaatcagctgatgaatataatcccatttgatacatatgcaatctgaagtcaagtaatttatccaggttggaatatccagaaaatgttagagtaaggatctggacccaggtctgattgattctagagtctgtttgttctctcaacctcttggccccacagcctcttaaactgaaatgctgccaatttaactctagaggcagggatattagacccattcctcccacattaatagtgaagctaaagaaataaaaaaaaatgtaaactagggaatgaaaaaactgaccatgaaagtggtatatagtttgctgatatttgaagccataaccttaaactcaaagctcatcaaaactcagctttggggatgagaggactctgttgtaatctctgcttggaacctcccctatctggcatcaggagcaagaaatttcctccattctattcatagaacaagccaagataaaaatgtatggcccagcattggggaaggttgggaggaaactgcga

SEQ ID NO: 725021 - DNA, 937 bp, Homo sapiens
taagcatgtgatgtctgtcaatggtgcctgtaggagaagccagaaaaggtcatgttgctcttgaaagctaaaatgtaaaccagggaagcaacacatacatgattgcttcaaagttttattaaaactactgacacatatgaaaaaactggtacacacaccacacatgaatgaagttcttcaatcaaagtttgctgagtgcttactctaagccaagctggtatacaacgtggaaaagaacactgcatggtacggaataacaactcttatctgttgagaaccaggcattgtgctaaaatttataattattatttctcatttaattctcaamaccctattattacactgggctctgcaaggacaggaatgtttttcctttttccctgctattatatactcaggaaatgaaataatgcccatcacaatgtcaaacactgaatcagctgatgaatataatcccatttgatacatatgcaatctgaagtcaagtaatttatccaggttggaatatccagaaaatgttagagtaaggatctggacccaggtctgattgattctagagtctgtttgttctctcaacctcttggccccacagcctcttaaactgaaatgctgccaatttaactctagaggcagggatattagacccattcctcccacattaatagtgaagctaaagaaataaaaaaaaatgtaaactagggaatgaaaaaactgaccatgaaagtggtatatagtttgctgatatttgaagccataaccttaaactcaaagctcatcaaaactcagctttggggatgagaggactctgttgtaatctctgcttggaacctcccctatctggcatcaggagcaagaaatttcctccattctattcatagaacaagccaagataaaaatgtatggcccagcattggggaaggttgggaggaaactgcga

SEQ ID NO: 725022 - DNA, 1560 bp, Homo sapiens
cgattacatttataatagcactggtaagaataatatgcctgggaataaatttgttcaagaaggtgcagtacttgtacacagacaactacagaacattgctcatggagattaagaaggacctaaataaatggaaagacatattttgtccatgggttggaagttgtaacatggttaagataaaaatacaactcaaagccatccacagattcaatacaatcctatcaaaaagtggccttttttacaagaatggctaagaagaacttcatattcctaaaaaatagtgtgtccccccaaaacaaaagcaatcttgaaatgcaaggaggaacattttctattccaaaggtctttaactgctctcagcaatacttggtagtcttcaatatacaggctttcacattttttttcttttgtttctaggcaggatctcactctttcacccaggctggagtacagtggcacgatcacagctcactgcagcatggaattctcaggcctatgacatcctagagcctcatccactgagttcctgggactacagactcacaccaccacacctggataatttttctgattttcagtagagatgagggctcactatgttgcctaggctagtttcaagcatctgagctcaagcgactctcctgccacggccttccaaagtgttggtatttgaagctgagcctggctggctttcacatgttttctatgtagttgatatttcttgatactattgtgagcctggctggcttttacatctttgctatgtagtgaaaccctgtctctaccaaaaagacaaaaagaaagagagagagaaagaaagaaagaaagaaagaaagagaaagaaagaaaagaaaattaaagaagagaaaatctctgaactaaacttattcctcaaactctgacyttacaaatcttatgtgcccatctcttctgcctagaggaagaggggggcatgaggcagaagagaggtgcatgtgggattgttgggcctagatggattgaatggtttcaatttctgcttttgtgtctcatgaaagcagttcattttggttgtcatcttctccaggttctgaagacgaggcattgattggcatcaatgttcaagatttagcaagagtaggtgccttttttcagacccaggagtcaaagccctgtaagctaaaagcacagggatcagttaataggatgttggtactgcaggaagtcctatttctctctaacatgtcacaaatgaaaacactgtgatttggtgtccagtagttactgcctgaagcacttcaaaccattgtattaaagcggttaggatactccttgcatgtacctaattgccagcattctaatcacagaaccatgaccaaaagcatcaaaaatgtgacagggcctatgccaaacttatcaaagtaagacaattgacatttctctctatcatttaacaaaatggtaaatgcaaagaacagttttggaaatttactatggggataaataatctccttttctttaaacaccatacaacaaaacaaggacaaagtgagaataaacacacagtaattttttcagcta

SEQ ID NO: 725023 - DNA, 783 bp, Homo sapiens
taaaattggcatcaaaccatggtttctttccatgattgggcttatttccattccaggatgaatgttcctccaagtttaacccaaatagtagcgtgttaaatttttgcccaccttaaaccattatattttgggggtagtttcttacacaacaaggcttaactaacacaaaagggtgatctccaagggtctgattgattacgtctggggtgaggacttcaccagtatctggtgaaaatactagtctagctattagttgagggaaaagctagagaaaagacttacaatgcaagccttgagccatacaacagatatatgaagcaaagtaaggcctatgagctttatcttctactccagttccctaaactctccttcagaattgtattaatgggggttgtgtttatgatgaaaagcgttctttgagtgtgttggagaaatactgtatataagatgcctctcttagaaatcataattcacattacattgagagttctaagtcctccgttcttaactggcatatcccaaatacatttaatccataaaatttttccccaaaatctcaggttaccctgcagaacacaagacgaaggaatatagtaggcagtgctttccaaattattaaactatgaaacccttttgtcatatatagtatatatattgatatcttagagtatatagttcaagaaacattgcagctctgtcccatagaaaaataatgggagccacatatggaactctaaattttttaaaaagccacatctagaaaagtaaaaagaaacmagtgaa

SEQ ID NO: 725024 - DNA, 835 bp, Homo sapiens
taaatcatttatataactaaatgagcatggggaaatctatcaaaacccattaaaacgataagtatacagataactgactttgtgtgtaagagctggattaaaggtcagtatgatacaatgataggyggtactagatcagtggaagaaagcaaatactttgctgccttaaattgctggctattatgaaaaattaagtcatacatattcttagtaaatggtaccaaaaaaggcgtaataataaatcatgcagaaaacaaatatattaggatgtttggcacttggccctattttgtgttattttctcaaaatatgacttttttcactttttatttgatggataaattgtgtccaacacaaaaatattccaaaggtaaacaattaaaatgccattgatgtgtgttatattttcttcaaagagaacttttttaaagaggatgagttaaaaatgatcttaaaggtcaaacgtaatgaagtatgtcgaaacacagttatcaattaaaaacatatttgtggtaattagcattcaaactaaacgtgcagattttaagctctggaatccacatctcatattctcacaagacatatcaacccataaaagtaatgaatcaaaacactactcacacaaagcaagacactgctctctggcattccttggtagaagaaacctggaggaaactgcttcactacttgtgttaacccccaaatcaacaaggcttctgttccatgttgaataaacttcaaaactcttcatgtggctccaggtgccctggactctggccatctcagtcatggtcagcctccacacttaatttctttacatttctcaaccatgcca

SEQ ID NO: 725025 - DNA, 835 bp, Homo sapiens
taaatcatttatataactaaatgagcatggggaaatctatcaaaacccattaaaacgataagtatacagataactgactttgtgtgtaagagctggattaaaggtcagtatgatacaatgataggcggtactagatcagtggaagaaagcaaatactttgctgccttaaattgctggctattatgaaaaattaagtcatacatattcttagtaaatggtaccaaaaaaggcgtaataataaatcatgcagaaaacaaatatattaggatgtttggcacttggccctattttgtgttattttctcaaaatatgacttttttcactttttatttgatggataaattgtgtccaacacaaaaatattccaaaggtaaacaattaaaatgccattgatgtgtgttatattttcttcaaagagaacttttttaaagaggatgagttaaaaatgatcttaaaggtcaaacgtaatgaagtatgtcgaaacacagttatcaattaaaaacatatttgtggtaattagcattcaaactaaacgtgcagattttaagctctggaatccacatctcatattctcacaagacatatcaacccataaaagtaatgaatcaaaacactamtcacacaaagcaagacactgctctctggcattccttggtagaagaaacctggaggaaactgcttcactacttgtgttaacccccaaatcaacaaggcttctgttccatgttgaataaacttcaaaactcttcatgtggctccaggtgccctggactctggccatctcagtcatggtcagcctccacacttaatttctttacatttctcaaccatgcca

SEQ ID NO: 725026 - DNA, 1895 bp, Homo sapiens
ggatgcacacaggaataacccatagcacctgctgtcagggagctcacagtctggagggaagccaacagctgaacacacactttgcaattcagtgagtggctgccttgacagagggagatagcagctacacagaagagaccgtccacaaggcatggagagccaaggaatgcctaggtgcttttttaaaaaatatataatttgtatttctctttttaattctgtccattttcactccatgtattttttttttaagacaggatttcactctgtcacccaggctggagtgcagtggtgcaatctcagttcactgcaaccttaacctcccagttcaagcaaccctcccacctcagcctcctgagtaggtggatctacaggcatgcgtcaccacacttggctaattttttgcatttttagtagaggtggtgtctcactaggttgcccagactggtctcgaactactgagctcaagtgatccatccatcttgacctcccaaagtactgggattacaggtgtgagccaccaagcctggccacttcatgttttttttaagtggcagggtcttgctatgttgcccaggctggcctccarctcctggactcgagtcatcttcctgtctcagactcctgtgcttttttttctgagatggagttttgctcttgttgcctgggctggagtgcagtggcgcgatctcggctcactgcaaactctgcctcccgggttcaagcgattctcctacctcagcctcccgagtagccgggattacagattcttgccaccatgcccggctaattttgtatttttagtagaaatggggtttcaccatgttggtcaggctggtcttgaactcctgacttcaggtgatccgcccgcctcagcctcccaaagtgctgggactataggcatgagccaccatgcctggcctcctctctgcttttttttgatgagtagaagattgtggttgaataggtctagggtagggctcaactgacttctcctgttaagaggaagaataaatattttcggctttgtgggccatgaggtctctgttacgactacgcaactctgtggttgtagcatgaaagcaaccatgtttcatacctcaatgaatgagtgtggctttcccaataaaacttcatttacaaaaacaaacagtgggccagatttggcctatggggactgtagttgccaacccctgctctaggcattaccagttatgttaaggggaaatatgtacttatttgtatatatgtttacacatgtgtacattaattaatatatactaaaatgttaattaataataaaaaatatactgtaatcacatagactagaatattatatatttctcagaattttgcacctgggaatgtttttgactctcagttccattactttttttttttttttttttttaaattagagtctcactctgtcttgcacaggctggagtgaagtggcctgatctcagctcactgcaacctctgcctcctgggttcaagcagttctcctgtctcagcctcctgagtagctgagactacaggtgcccaccaccatgtctggctaattttgaatttttttggtagagacggggtttcactatgttggccaggctggtctcgaactcctgacctcaggtgatccacccacctcggcctcccaaagtgctgggattacaggtatgagccaccatgcctggcctcagttccattacttctggtgtcaccttgtacatgtcaatgatacagattaagctgtgcctcctgcagcagtggaacagggatggcagtaataacagatctcacaggactgtttgaggagtcagtgggaggtgacgagacaaggcacacagagacatttcgagctctgcacccagatgttcatttgcgactggatcctc

SEQ ID NO: 725027 - DNA, 1895 bp, Homo sapiens
ggatgcacacaggaataacccatagcacctgctgtcagggagctcacagtctggagggaagccaacagctgaacacacactttgcaattcagtgagtggctgccttgacagagggagatagcagctacacagaagagaccgtccacaaggcatggagagccaaggaatgcctaggtgcttttttaaaaaatatataatttgtatttctctttttaattctgtccattttcactccatgtattttttttttaagacaggatttcactctgtcacccaggctggagtgcagtggtgcaatctcagttcactgcaaccttaacctcccagttcaagcaaccctcccacctcagcctcctgagtaggtggatctacaggcatgcgtcaccacacttggctaattttttgcatttttagtagaggtggtgtctcactaggttgcccagactggtctcgaactactgagctcaagtgatccatccatcttgacctcccaaagtactgggattacaggtgtgagccaccaagcctggccacttcatgttttttttaagtggcagggtcttgctatgttgcccaggctggcctccagctcctggactcgagtcatcttcctgtctcagactcctgtgcttttttttctgagatggagttttgctcttgttgcctgggctggagtgcagtggcgcgatctcggctcactgcaaactctgcctcccgggttcaagcgattctcctacctcagcctcccgagtagccgggattacagattcttgccaccatgcccggctaattttgtatttttagtagaaatggggtttcaccatgttggtcaggctggtcttgaactcctgacttcaggtgatccgccygcctcagcctcccaaagtgctgggactataggcatgagccaccatgcctggcctcctctctgcttttttttgatgagtagaagattgtggttgaataggtctagggtagggctcaactgacttctcctgttaagaggaagaataaatattttcggctttgtgggccatgaggtctctgttacgactacgcaactctgtggttgtagcatgaaagcaaccatgtttcatacctcaatgaatgagtgtggctttcccaataaaacttcatttacaaaaacaaacagtgggccagatttggcctatggggactgtagttgccaacccctgctctaggcattaccagttatgttaaggggaaatatgtacttatttgtatatatgtttacacatgtgtacattaattaatatatactaaaatgttaattaataataaaaaatatactgtaatcacatagactagaatattatatatttctcagaattttgcacctgggaatgtttttgactctcagttccattactttttttttttttttttttttaaattagagtctcactctgtcttgcacaggctggagtgaagtggcctgatctcagctcactgcaacctctgcctcctgggttcaagcagttctcctgtctcagcctcctgagtagctgagactacaggtgcccaccaccatgtctggctaattttgaatttttttggtagagacggggtttcactatgttggccaggctggtctcgaactcctgacctcaggtgatccacccacctcggcctcccaaagtgctgggattacaggtatgagccaccatgcctggcctcagttccattacttctggtgtcaccttgtacatgtcaatgatacagattaagctgtgcctcctgcagcagtggaacagggatggcagtaataacagatctcacaggactgtttgaggagtcagtgggaggtgacgagacaaggcacacagagacatttcgagctctgcacccagatgttcatttgcgactggatcctc

SEQ ID NO: 725028 - DNA, 2164 bp, Homo sapiens
caaatgctgttgtaggaatggagctgatgcattcatttatttcttcaacagctgtaaatagctgtgagccccaccatataccaaacactccactgggtactggaaacatacaaaaaaaaaagtgtacctgcaccaccctcaatgagctcacaggtcctcaatgagctcacaggtcctcaatgtgctcacaggctagtgaaggggatggttatttaaagtttttaactgcttaaaaagcgatgggatgaaaatgtttacttatctctaattgaaaacatttatagtggcatgaatatatctgaccaacaacagcagcagtaattaaaaataaataacacaactggttaactccagtctaaggtgtcaaatatattctttttttttcttttttttttttttttgaggcagtcccactctgtcacccaggatggactacagtggctcaattgcagctcactgcaacctctgcctcccaggttcaagtgattctcatgcctcagcctccgtagtagctgggattacaggcacaagccactacgcctgactaatttttgtatttttagtagagagggggttttgccatgttggccaggctgatctcgaactcctgacctcaagtgatccacccacctcggcctcctaaagtattgggattataggcaatgttcccacctgatgttctaccatttcaaagaatgctctacattgcagtccatgctctgatctcccacctcaacaacccttagaactctccatggagcctcctactttcccgcctcaccttctctcccagggccatgtgctctggattcatggacagggcaggcaatgggccatgtgctctggattcatggacagggcaacgggccatgtgctctggattcatggacagggcaacgggccatgtgctctggattcatggacagggcaaygggccatgtgctctgcattcatggacagggcaatgggctaccgactccagatgtcccaccaccttacctccgggcacgcaacggaagccgtctccctgataaccaggtttgcactggcacgtgaaagagcctggagtgttgtagcagaaggcgtcagggtgacatcggcttggctggcattcatctacatctgtaaaacagccaccaggcccagggacaatgagatttcttctggaattcgtagtttacccaataatttaagccacttactcaaatctatgggaacctgcttctgatctgggaacagtaatccaaaactcactaaacattaactatcaagtcactaactccccaatatctatctgtcgtacttgcaaatgtgtttcactttggcagcaatgttttcatgaaaaatgtttttggccaggcaccgtggctcacgcctgtaatcctagcaccttgggaggccgaggcaggcagatcacctgaggtcaggagttcaagaccagcctggccaacacggtgaaaccctgtttctactaaaaatataaaaaattagctgggcatggtgacacgtgcctgtaatcccagctattctggaggctgaggcaggagaattgcttgaacccgggaggtggaggttgcagtgagccaagatcgtgccattgcactccagcttgggcaacaagagctaaatgccatctcaaaaaaaaaaaaaaaaaaaaaaagaaagaaaagaatgttttcatcaaccttacaacaggggaaaagataggatctatttgtattataaaattctccctcctgtcataaatgagagcttcaaaactgtctgagtgtttactgacagattattaactgctaggcagaaaaccctcagtgaaaagaaaatattcacatgttcagtaataaagagaaagtatctcagaaattctatcttagttgggactttttagaaatactctatggtataatattaagtaattgtgcaaaccaagaaactcagggtactctattgatgggctatcttacctaaaattacctgtaagagaacaatggcagccaagaagctcaagtctgaaggattctattgagtcatttatactttgactccgcagtcatttattcaatcagagaactttgcttttttgaaggagaaggttagaacaagccagttgaatggctacatgttaatacatcttattaaataaaaggatagactttaatctcca

SEQ ID NO: 725029 - DNA, 2164 bp, Homo sapiens
caaatgctgttgtaggaatggagctgatgcattcatttatttcttcaacagctgtaaatagctgtgagccccaccatataccaaacactccactgggtactggaaacatacaaaaaaaaaagtgtacctgcaccaccctcaatgagctcacaggtcctcaatgagctcacaggtcctcaatgtgctcacaggctagtgaaggggatggttatttaaagtttttaactgcttaaaaagcgatgggatgaaaatgtttacttatctctaattgaaaacatttatagtggcatgaatatatctgaccaacaacagcagcagtaattaaaaataaataacacaactggttaactccagtctaaggtgtcaaatatattctttttttttcttttttttttttttttgaggcagtcccactctgtcacccaggatggactacagtggctcaattgcagctcactgcaacctctgcctcccaggttcaagtgattctcatgcctcagcctccgtagtagctgggattacaggcacaagccactacgcctgactaatttttgtatttttagtagagagggggttttgccatgttggccaggctgatctcgaactcctgacctcaagtgatccacccacctcggcctcctaaagtattgggattataggcaatgttcccacctgatgttctaccatttcaaagaatgctctacattgcagtccatgctctgatctcccacctcaacaacccttagaactctccatggagcctcctactttcccgcctcaccttctctcccagggccatgtgctctggattcatggacagggcaggcaatgggccatgtgctctggattcatggacagggcaacgggccatgtgctctggattcatggacagggcaacgggccatgtgctctggattcatggacagggcaatgggccatgtgctctgcattcatggacagggcaatgggctaccgactccagatgtcccaccaccttacctccgggcacgcaacggaagccgtctccctgataaccaggtttgcactggcacgtgaaagagcctggagtgttgtagcagaaggcgtcagggtgacatcggcttggctggcattcatcyacatctgtaaaacagccaccaggcccagggacaatgagatttcttctggaattcgtagtttacccaataatttaagccacttactcaaatctatgggaacctgcttctgatctgggaacagtaatccaaaactcactaaacattaactatcaagtcactaactccccaatatctatctgtcgtacttgcaaatgtgtttcactttggcagcaatgttttcatgaaaaatgtttttggccaggcaccgtggctcacgcctgtaatcctagcaccttgggaggccgaggcaggcagatcacctgaggtcaggagttcaagaccagcctggccaacacggtgaaaccctgtttctactaaaaatataaaaaattagctgggcatggtgacacgtgcctgtaatcccagctattctggaggctgaggcaggagaattgcttgaacccgggaggtggaggttgcagtgagccaagatcgtgccattgcactccagcttgggcaacaagagctaaatgccatctcaaaaaaaaaaaaaaaaaaaaaaagaaagaaaagaatgttttcatcaaccttacaacaggggaaaagataggatctatttgtattataaaattctccctcctgtcataaatgagagcttcaaaactgtctgagtgtttactgacagattattaactgctaggcagaaaaccctcagtgaaaagaaaatattcacatgttcagtaataaagagaaagtatctcagaaattctatcttagttgggactttttagaaatactctatggtataatattaagtaattgtgcaaaccaagaaactcagggtactctattgatgggctatcttacctaaaattacctgtaagagaacaatggcagccaagaagctcaagtctgaaggattctattgagtcatttatactttgactccgcagtcatttattcaatcagagaactttgcttttttgaaggagaaggttagaacaagccagttgaatggctacatgttaatacatcttattaaataaaaggatagactttaatctcca

SEQ ID NO: 725030 - DNA, 638 bp, Homo sapiens
tgacacctagcatacataggctttgccacagtcagaacaaaggtcttgcagcacatccgaggcttcccaacacgcagatgctctcttggagccctgaggaagcttccagagctgtgccgtttgcttgcacccgggcagatccagatggcagctgatcactgcagggctctgtgatctgtgcgccagctggtccgctcgctcgggcagttcaaacggtgctctgtgtttcaggagggacacccaggaggtcaccttcttagctttacagccacctggtggatccctgctggagtgtcctcctcagcgttgggcatgggggcgggtggtggtccctgaaggactctatccatagagccctctttagaagtctccaccgcgctgagmtgtgccaatgcaagactcacagtccccttagattcctgttatgattgctgttctcttcttatttaaatattttcacaaacgactttgttgttttccagcctaagactttcagtaaagcagactatcttttaatctaataactcaaattaagtgaacattttaattttcatttaaaaatttaaattttgtttaaaattaaatgaaaaccaaataatatttacttttaaacaaatcagtgcagcatggttatgagc

SEQ ID NO: 725031 - DNA, 634 bp, Homo sapiens
tgagacagagtttgtcttctataggtttctttccttcatcattttggtcctaccccttaagttaattaaaaacaaatctttttcctcccttcgctaccatgccatcttaggcccctcttctccagaatcagtatctccagtccctggctcaytcattgcttaccattgtcccagtcacacctctccatcctgagcaccctcctgtgaaggctctttagctgggagagtggtatctttgccaacttggaagttgggggctacagaaaagcaaaggctatgtagtctggatctttacccttcagtaacacttagtcacagaggtcagaagggtgactgacctctgtgctccagctgattattattattattattagtagtagtagtagtagtagtagtagggtctacttcatttccaccacctttttttctggggcatggtaagagttaacttctaaacaaactcacactactttgcaagcaacagcaaacacccagtgtaatactgtccttataaaatatgtctttccataatgtgacccaaagcatagagaatatttttactccagcatttcctgccattaatgttttccttttgcaatcttcacatagtgttatgagtgagttgtgtgttaca

SEQ ID NO: 725032 - DNA, 634 bp, Homo sapiens
tgagacagagtttgtcttctataggtttctttccttcatcattttggtcctaccccttaagttaattaaaaacaaatctttttcctcccttcgctaccatgccatcttaggcccctcttctccagaatcagtatctccagtccctggctcactcattgcttaccattgtcccagtcacacctctccatcctgagcaccctcctgtgaaggctctttagctgggagagtggtatctttgccaacttggaagtygggggctacagaaaagcaaaggctatgtagtctggatctttacccttcagtaacacttagtcacagaggtcagaagggtgactgacctctgtgctccagctgattattattattattattagtagtagtagtagtagtagtagtagggtctacttcatttccaccacctttttttctggggcatggtaagagttaacttctaaacaaactcacactactttgcaagcaacagcaaacacccagtgtaatactgtccttataaaatatgtctttccataatgtgacccaaagcatagagaatatttttactccagcatttcctgccattaatgttttccttttgcaatcttcacatagtgttatgagtgagttgtgtgttaca

SEQ ID NO: 725033 - DNA, 634 bp, Homo sapiens
tgagacagagtttgtcttctataggtttctttccttcatcattttggtcctaccccttaagttaattaaaaacaaatctttttcctcccttcgctaccatgccatcttaggcccctcttctccagaatcagtatctccagtccctggctcactcattgcttaccattgtcccagtcacacctctccatcctgagcaccctcctgtgaaggctctttagctgggagagtggtatctttgccaacttggaagttgggggctacagaaaagcaaaggctatgtagtctggatctttacccttcagtaacacttagtcacagaggtcagaagggtgactgacctctgtgctccagctgattattattattattaktagtagtagtagtagtagtagtagtagggtctacttcatttccaccacctttttttctggggcatggtaagagttaacttctaaacaaactcacactactttgcaagcaacagcaaacacccagtgtaatactgtccttataaaatatgtctttccataatgtgacccaaagcatagagaatatttttactccagcatttcctgccattaatgttttccttttgcaatcttcacatagtgttatgagtgagttgtgtgttaca

SEQ ID NO: 725034 - DNA, 618 bp, Homo sapiens
gctacctcctattagtttgggggaaaaatatagctaacgataacgaagagaatgccatctatttctttagcttaaacatgcctgcttcagtggtgaacagttgatctctaagcttgctgttttcaggctataaaagctgtttatttcactctataaaagaacatttgaacttatatagctatttaagtttaaatgttttaggggaaagaaaaatgcaaggggaattagcaaagagaggctgaaacctgatctgggctgcggggtttgcatagaaacttccctctttgggaatcccccctgcctrcccccagtacacccactgcagcaccagcccacaggaaatgtactgagctgagtgtgatttcaacattagtagtcatttcggcaaagctctcagagtcaatcatttctcatgcgctggtgtgatttgcattcactggggaccccttggctcttaaaaagctgcagctgccccaaagaggtgaaggacattaacaaatctttgttgtttttctcttaaaaactgtgagtttgcatgagggatctgggtagaaatgtgcttctctgtgcatcatgggaggctgctgctctgttggctctgagaatgacagataagtc

SEQ ID NO: 725035 - DNA, 2102 bp, Homo sapiens
gggaaaaattgccccacagaatcccttcaatactaagaggaacaagaagccatttcagtgtgatttgttgagtcctaaaaaaacaacagaaactttttttttttttttttttttttttcagaatgagtctcgctctgctgcccaggctggagtgcagtggtgcaatcttggctcacggcaagctccacctcctgggttcactccattctcctgcctyagcctccggagcagctgggactacaggcgcccgctaccacactcagctaaattttttgtatttttagtagagacagagtttcaccttgttagccaggatggtctcaatctcctgacctcgtgatccgcccgcctcggcctcccagagtgctgggattacagctgtgagccactgcgcccggccacaacagaaaattttaagcacagtcaagttgacgtcaattcaatctctgcttaatagcataaaatacagggaagctgagtaagcaactgtgccctcgctcacattcctaaccctagtcttggagaatgcataataaccatgcactagcccaatcccacatagtaaccaatgcatgtgattgaggaagccagggtcagttctcaagagcctgaagactactagcattcacttcttacctccaaatactcttgaccacatctgaggatagaataaatccccaaagccatcccccaaaatgactggacttcttagttttccttggtttggagatgaccaagggttgacctccaccctgagattggaatagattggacatggctccaggccttttctgcatttagatccatcttcctgggagcaggataaatggcagcctattcctgtcacattattcttctagcagatgggatttcatccagatagtattttttttcctaagcaagggaaaaaattcctacttttgttcataccataggtgcaatttacactaaattggaaaagaacagggatgcctcagccttttatttttaaaaagttttaattgaaaaataacaattatcatatatatttattgcatgcaactggttgttttgaagtgtgtatacattgtgaaatggctaaattgagctaaattaacatatgcattacctcaaatacttatcatttgtgtggtgagagcacttaaaatctactttcagcgatgttcaagaatacaatacattgtcagtagctatagtcatcacgttgtataatagatctcttgaacttattattcctaactgaaatttgtatgctttgactaacatcaaagagagatgttgggcagatagtgttaagccttattttagacaccttgaaatgactgaaaacaatagaagctatgtgggtagaaagctaactttcaactttccctaatcctgagaattgtagacaaagtctaatgaattaatagagacccaagtcattccagactaggaacacatgggaaattgccaatggatagttggatcctctcattacagaaacctaactctgagatagtcattgaaatgtctaatcaccaatctgatttttttttaaataagaagactttaaaacagttctacaaaatctatatgaggttgtgtgcacagagtttattgtagggatgctgtcagtaatagtacctataagggagtgagggaggcaggatggggcagaaggagaagttgaactataattcagtcacaacagagactttatctgatcccttgggaggctctgaacctgatatgacccttcagagctttccaaaattgagataagggggtgtgccttgtaccactcgatagaccaatcattggatatgagctgccaaagaaagtgggtataaccttgtgtaaggcagctcccttaggctgaaggcaaatcctggggagggactcagctgcagttcttccccaggcagtgctcccggtagctgtgagagtaagctggtagcttgatcctcattggggaccttggcagtgtgcaacagcatccactccataatcaaatgccaaaatgaataccaaacaaaggcattctggttttgaaagtagcatgcagttagcccagaaaatacagtagtatgaaattcgatggagtagttccctggctaaat

SEQ ID NO: 725036 - DNA, 626 bp, Homo sapiens
cacacatcctttgaggatgcaggttagcttgggtcagaatgaaccataagatgcaaatacaaaccaaaatttggtgagctcaatttggtaagctcaaaaccagcaaaagagtcagggaaggactccttccatagtcaaatctcaaatttgggtttattcaggtaaagctatagggtygcctccatatccccaaataaatcacccctcctgatggaggtccaactttcccggcaacctgaacagacttttgggccagaaataatatgtgtccttggtctagaaacacaaccccggggttaataagagcaatccaacttatgacttcttatatccttttccatgaacattaaaggttctattccataatcattaaagaaggagctttaatgattaatggtaaattgagagtaaaaagtctgctagtctattagtgtcacaaggagactgtcttaaagacaatgaaaatggtggctcttactggtacagcagagaaaatgagcaaatacccaagtgtcaatgaataagacattcccatctttcctaaacttgggacaaaagagacaagcaaagatctgaattttattcctttcttttagccaataaggagaattttaaagaaaaagaaa

SEQ ID NO: 725037 - DNA, 912 bp, Homo sapiens
tgggatgaacacaacctaacatacatcttgcttgacacctgtgatgtttggcccacatacagcacctcacttggtgttgtatctgtatggaaataaatggcctgttaggctgaaatgatctatggacgaccttcagggctttggagatggtctctttcagggcaggtcactttaaaaccaataatayggaagcagggaagatgcctctggtggctaaggaagtctgtctcctgcatttttatgctgggcacttttcattagataagtaagtatatgtcagaaaaacgtgaaaaaaaacccatctgtgtctataactaattaaaaagatgtgtgatcaacaaacaccctcttctcctacaaccagggaacaaacagctcattactttccttaaaagccatcctggaaacctttcccggggaaaatgcgctgagcattgattatctatctacacccatcatagccacacggcacattattccatttgttgggagaccttactttaccggttgcagaccaagtttccagagtagaaagcatggtcttagtctcaccccaactaatggttcttcagaggtctcccaaaactcctgccgcctcttctgcacgttaatgaaaataaatggcaccaatctcaatgttctttgcctcagaccaaatggggccaggagcttagaagcaagaagctgaggcatcagcagggtactcccaggacagggcttcctttggctgtgatcattacgtgattccctgacaggctgctgttttcgtcgacggtgtccgtaactcactgactgaaatctttgacctctgtagtacagatgggatccatttgctgccagtaatgatgtgtgacctcttggtgaaggcaggggaagaaaagaagctgaagagatcttcaatatttttgagaa

SEQ ID NO: 725038 - DNA, 632 bp, Homo sapiens
tgggttataatcaaggtatcagcagagctgtgttcctttttggggggctctaaggggaatccattcacttgtcttttccagcttctagaggctgtccccaccccttggctcatggccccttcctccatcttcaaagccagccacggtgcgtgtctctgaccattcttccacagttacggctccctctgatgacagctgggaaaggccttctcgtttttaagaacgatgtgattagattgagtcctcctggataatccaggctcatctcactatctcagggcctgaaacttaaccacacttgcaaggtgaaatatttaccagtgctagggatgaggatgtggacatctttgggaaccattattcttcctgtcacactgaggaaagatttgtcactgtagagatcttatttctatatttttttttccttttttgttttttcattcattacccaacagagatgctctttgctatcaaaacaccattgcctgtggtggtgggtgcaggaatgtattgggcagagctgctggrgtggggaggggagtagttacttcaatatctcctgatagaatgtggagtttgggaaagataactcaatttaatatctatatttgaaaggaataataaagtcatgt

SEQ ID NO: 725039 - DNA, 632 bp, Homo sapiens
tgggttataatcaaggtatcagcagagctgtgttcctttttggggggctctaaggggaatccattcacttgtcttttccagcttctagaggctgtccccaccccttggctcatggccccttcctccatcttcaaagccagccacggtgcgtgtctctgaccattcttccacagttacggctccctctgatgacagctgggaaaggccttctcgtttttaagaacgatgtgattagattgagtcctcctggataatccaggctcatctcactatctcagggcctgaaacttaaccacacttgcaaggtgaaatatttaccagtgctagggatgaggatgtggacatctttgggaaccattattcttcctgtcacactgaggaaagatttgtcactgtagagatcttatttctatatttttttttccttttttgttttttcattcattacccaacagagatgctctttgctatcaaaacaccattgcctgtggtggtgggtgcaggaatgtattgggcagagctgctggagtggggaggggagtagttacttcaatatctcctgatagaatgtggagtttgggaaagataactcaatttaatatytatatttgaaaggaataataaagtcatgt

SEQ ID NO: 725040 - DNA, 1119 bp, Homo sapiens
tttcgtttgcatttctgtatgtagcaatgattgttagtcctttaagtttcctctactgtgaattgcctgtacatgtcttgtcctttttttctttgaaagttgcttattttttcctctgaatttgtaggagtttgttttgtattcttggtattagtcctatgtcatttttagatagtacagatattttctttaatttaccattgtcaattaactttatgttgcccttggttaaacagaaatcactaattttgatgcaatcaaactagttaattgcttttgggaatttgttgaagttttttctcacccatatttcccaaaaatatcttcctacattgtcttctctttataatttcatctgctacatttaggtctttaacccatatgtagtccatctttggatatgatgttaagtaggaatcccatttcggttttctctgtagtgtgggtcagtttttctgacatcatcttttaagcagtatgtcatgtcttcattaatttgtgaggctactggtagtgttagttatgtcccctcatataaatgttggtctgtctcagttctagtactttgtctttcttgtaccaatacaatatctgttgctttgtagcttatcttaatatttcatagasgtgaactttttactgcttaagtaaataagtttcttaaatcctagttttcagaatgttttttcactgtgttcaggatattatttcagaataaaaagtcagatatgtttggatgggcttttcaatacatttatggaggtagcaagttgtgttcaaataatttaattctgtatcattgaatgacttagttaaattttattatattttcagttttctaacctcttgggggaggtgttagagctacacagataggcactgacactttataagtgtcaataagtggccaatatttaagatttaagaaggcaaatgatgttttctctatctaagtacttatttcctataacaaaacttggttaagattctggtttaaaggtttgctttccagataataatagcatcagcttacatctggcttaggtcggtatcataccccatagttgtaggcccatttaagccttgaatcctgttttagaaaaagcatataataaatta

SEQ ID NO: 725041 - DNA, 621 bp, Homo sapiens
gaacaatccgggtaaatggtttaaaaggtttaaaggatctcagggcaggagaaaatattcccccaaaagctatttttggatttgctgtgactgtggcaatattaacagttctcctaaatcagtagttctgaaactttggtataaactgaggaagttgttgatgtttttatcccttaacggtgtgatggaagaggcctaggattgtgactggyatagggaaaacctgcatatctgcaatttagcatgcaagagagggtagcatttctttggctatattttgagaagtacattccgtgtgaaacattttctcttcttgtgaaatacaacaagttgttctgcccattcatactaatttatcctctaatattttagactaacaggtacatggctatttgtgctgattgggacaccattaaaacagagatatacatttaagacttaagaaagatgcatttcctcagtatttagaaactaaatctaggaacaataaaattaagaaacaataaaattaagaatatatatagctcagaaaaggtgaacgtaagcaaagcaatgacatgggaaataatgcctagtttattttttacggcatttagaaagactgttttttgatagtcgtgt

SEQ ID NO: 725042 - DNA, 656 bp, Homo sapiens
gggaaattttcctatttttctctctaatcatagggatagcttcatagattgtagttatagcatatgttattgctactatgcttcctaccatccttagaatggttattatgaattacacagagttatcctttctctggtttaactaagagcatccctctcccagggccagcatacctggagattagagtggtcagggcactgagaagagtgaaatggctgagagcgttcagatacctggtratttatcattagctgaattttaaataaactgctttggatatagaaaactcattgccagttttcactgcaaatgagggtatcatcttcctagttaaatgatttgtcaaggactgctgggtagccaagaaaacttagtaggattaatgacaaaaaatcataagtgaaataagtcaggtatagaaagacaaataccacacaatctcacttatatgtggaatatataaaagctgaactcataagagcagagagtagaatggtggttaccaggagtggtaaccactcttgggatggggttgggtgggatgggatgttggtcaaaggatacaaaatttcaataaacaggaggaataagctaaaaagatatgttgtacaacatggtgacaattaattattgtctactaagtattaactatagt

SEQ ID NO: 725043 - DNA, 2268 bp, Homo sapiens
agttgctaaacttgcttctgattttggggtgcaggatatgagcttaagaaacgttacatgacctgagattaggaggtctgggtattataataaagtatcagtgcctgacgtttctctgcctggtttccttatttgcaaataaaggtagcaagcactccatttggtacttctaaagatctaatgaaattgtgtgtgttgacactgctttcatkgttgcaagagaaaaagacagtgaaatcaaagcatctatcataaatgcctgacacatagaagatactttatgacagctatttgttattcttgtatataaaactagctttaggctgggcacggtggctcatgtttccaatcctacattttgggaagccaaggtgggcagatcgcttgcatccaggtgtttgagaccagcctgggcaacatggtgaaacccttctctatgaaaaatacaaaaattagccaggcatggtggtgcacatgtatagtcccagatacttgggaggctgaggtgggaggatcatttgaaggttgaggctgcagtgagcagtgatcatgccactgcactccagcctgggtgacagagcaagatcctgtctcaaaaaataaatctagccttttcattatatttctcttactacactttctatctcgttatttgtgaagttttgttttagttcctgagtattgactctccagattcccaaataccaatgtcctgtaccagattcttggtacatggaccagatacttgaacacttaaagcactgttggtgttgtactttgagagacacagtgtaagagctgtcatttgtttgccagctggttatttagctagagtggcaataccttgccttgataaagttaccgcttttcaggttgtagcttctgcaaatcattaggggtcttggaattgatttatctttcagaaatagattcacaaactcattcataaccagaatatccatttgtaatgggaaatagaagttttggatgacagtttcttcctagttcttcctaagaaaatcttttcaaatgataatcattaatttcttcccacacatggattttgagtgatgcaggttaattgtatcatctaatccagtctgatttacccatatccattgtagcaatgtgtttaacacatgagctagacttacttctttccatgactgctggagaaacataaaccatgtcttatttcatgattacccttttttttctagcttctaaactgattgttttctgactgttttgcttcagaccatgtgcattgtatgtgggtgtgcatgagtgtataatatgttcacatgatttggattaaattttctttttataatcagaattctgttatgtttccctgatgctgtgcatttcttgtttactggttagagtgagtagtttgtatagaaagctgatttcatttcattgtgtatggacatttctttttcatccacggagggtctgatttttgtggggattgagggaagtccctgcccaaggcaccatggtgtattgatatgaatatgggcttttggagttagactgtttaaatctggctctactacttgtaacttgtgtgatttgtgaagaaatgcttaacctgtcagcctctgttttcgcatctatgaaatggaaataatataacaagtccgtatgatagatggtaaggatttcatgagatgattttatatgtaaatggagataaccatagagaagaatatatggttaatgtagtccattatcatttctgtatattactactggtttgtttgtgttttttttttttttttttttcatgtgttcgggctgagctctgaattttcgtctgcctttctgggtttgttaacttatagtctatttctcattgttctatttctccaccctcaagttaagtatggtactcttattaagagtgggcatccatgcatagcgttaactgtcattgtgcatatactgaattgattgcaaaaagaatagtccatgttagaccaaggccactttttaattatacttaaagatcttgttgtcagcaattataactggttcattttatagaaatacttaaaagattgggatattcctaggtttcagaaatattttcagttttactttttatgatccgagaattcgtaacacagcttttattcttcactatagaatgaatactccacagatttgtggattatagcctgggaatcagaaatatcactgattcagagattaccttttattttgatttatttaggaaggcgacatgccaattcatgaact

SEQ ID NO: 725044 - DNA, 641 bp, Homo sapiens
ggaggctgaggtgacaggatcacttaagcctgggaggtggaggttacagtgggccaagatggtgccactgcactccagtctgggtgacagactgagaccccctctcaaattaaaaaaaaaaaaaaagaaaaagaaaaaacacagtaattcccttctcctcaattcttaagaaatgcttcccttcctccacccacttttacatacaggcaggaaaatggagaaaggaaggggaaagcacagagaacacagaagaaggaaggaaataacaggaatcatgaccagcacctaatacccaaccacacccagaacacactgctagtatcaaatgtgagaagcttcaggtggttaaattaaggttctggccctggatcatgagggacatagtgttaacgccaattatacarccactactacattaatgaaatatatggatatgtaaactgttttaagaatagatacacagttatcatttcctcaactttgttactgtgtatccctttaaggctactttaacactgtaacttaagaacctgtgacttttatagactgagatgtagagcctggattttagtcatccctctccatgtgctttgatttatctccagggagatttttatacacatagcaaatacacattctga

SEQ ID NO: 725045 - DNA, 1376 bp, Homo sapiens
caaaattcaaaaattaaaagcaaatgggcatccccctgctctgaaggaataaattaagagttcactgaactcaggaaagaaggaacagacaaaatgatttcrgaaataaagcctacattataaggtactcaaaggagaataaattcaagtggaaatgtaataaggggcattgaagaaagacagttttgcttgatgtgatcctatttgtccatgtttgctttggaaaaaccaagaggatgaaaatgaaatcaagagaaaagtgttgggaagaaagacttctcctctaccaacctaagtccagctggttgggggcctgtgaattaaatggcaatagagtaacagggggaaaatacacatgtgggcgtaccctatagagagagtagctccctgaacagctgggggtaaaagtttatgtaccaacctatatactaccccagcggggctttaggacttcaaagaatggaagcttcttatgagtcttgtttatacaattttttatttttttgagacggagtttcactcttgtcccccaagctggagtgcagtggtgcgatctctgcccactgcaacctctgcctcctgggttcaagcgattctcctgcctcagcctcccgagtagctggaattacaggcatttgccaccacatccagctaatttttgtatttttagtagagacgggatttcaccatgttggccaggctggcctcaaactcctggcttcaagtgatccacctgcctctgcctcccaaagtgctgggattacaggtgtgagccaccgcactcatctttatacgattttttaaaaagtgtcttgatgttcaacgtcagtgcttctgtgaccagagacctctggaggagggtttgtggcagctatgtctcctaaggctctgagttagtcagataagggaagtttcagataagatttctctctgcgtctgttgtagctcagatatttttcattggaagttatctctttaccaagttagtgtactgttttcttcagaagtaaaaagagtcagagagaaagtgcttgaaatggaagacagagaagaaacagtccaagttaaaccttggacaacctgagtctgaactacgtgagtccacttagatgtggattttttttgatcaaacaatattcgccagatgcaaaacccatgtatatggaggggtgacttttcatataccacgattttgcaggctgactgcaggactgttgaccattagtatgtcttcttttgagaaatgtgtattcaaatcttttgcccattttaaacacaggttatttgttttttttttcctattgagttgcttgaactccttatgtattcgattattaatcccttgtcagatgggtagtttgcaaatattttccccc

SEQ ID NO: 725046 - DNA, 1376 bp, Homo sapiens
caaaattcaaaaattaaaagcaaatgggcatccccctgctctgaaggaataaattaagagttcactgaactcaggaaagaaggaacagacaaaatgatttcagaaataaagcctacattataaggtactcaaaggagaataaattcaagtggaaatgtaataagrggcattgaagaaagacagttttgcttgatgtgatcctatttgtccatgtttgctttggaaaaaccaagaggatgaaaatgaaatcaagagaaaagtgttgggaagaaagacttctcctctaccaacctaagtccagctggttgggggcctgtgaattaaatggcaatagagtaacagggggaaaatacacatgtgggcgtaccctatagagagagtagctccctgaacagctgggggtaaaagtttatgtaccaacctatatactaccccagcggggctttaggacttcaaagaatggaagcttcttatgagtcttgtttatacaattttttatttttttgagacggagtttcactcttgtcccccaagctggagtgcagtggtgcgatctctgcccactgcaacctctgcctcctgggttcaagcgattctcctgcctcagcctcccgagtagctggaattacaggcatttgccaccacatccagctaatttttgtatttttagtagagacgggatttcaccatgttggccaggctggcctcaaactcctggcttcaagtgatccacctgcctctgcctcccaaagtgctgggattacaggtgtgagccaccgcactcatctttatacgattttttaaaaagtgtcttgatgttcaacgtcagtgcttctgtgaccagagacctctggaggagggtttgtggcagctatgtctcctaaggctctgagttagtcagataagggaagtttcagataagatttctctctgcgtctgttgtagctcagatatttttcattggaagttatctctttaccaagttagtgtactgttttcttcagaagtaaaaagagtcagagagaaagtgcttgaaatggaagacagagaagaaacagtccaagttaaaccttggacaacctgagtctgaactacgtgagtccacttagatgtggattttttttgatcaaacaatattcgccagatgcaaaacccatgtatatggaggggtgacttttcatataccacgattttgcaggctgactgcaggactgttgaccattagtatgtcttcttttgagaaatgtgtattcaaatcttttgcccattttaaacacaggttatttgttttttttttcctattgagttgcttgaactccttatgtattcgattattaatcccttgtcagatgggtagtttgcaaatattttccccc

SEQ ID NO: 725047 - DNA, 1376 bp, Homo sapiens
caaaattcaaaaattaaaagcaaatgggcatccccctgctctgaaggaataaattaagagttcactgaactcaggaaagaaggaacagacaaaatgatttcagaaataaagcctacattataaggtactcaaaggagaataaattcaagtggaaatgtaataaggggcattgaagaaagacagttttgcttgatgtgatcctatttgtccatgtttgctttggaaaaaccaagaggatgaaaatgaaatcaagagaaaagkgttgggaagaaagacttctcctctaccaacctaagtccagctggttgggggcctgtgaattaaatggcaatagagtaacagggggaaaatacacatgtgggcgtaccctatagagagagtagctccctgaacagctgggggtaaaagtttatgtaccaacctatatactaccccagcggggctttaggacttcaaagaatggaagcttcttatgagtcttgtttatacaattttttatttttttgagacggagtttcactcttgtcccccaagctggagtgcagtggtgcgatctctgcccactgcaacctctgcctcctgggttcaagcgattctcctgcctcagcctcccgagtagctggaattacaggcatttgccaccacatccagctaatttttgtatttttagtagagacgggatttcaccatgttggccaggctggcctcaaactcctggcttcaagtgatccacctgcctctgcctcccaaagtgctgggattacaggtgtgagccaccgcactcatctttatacgattttttaaaaagtgtcttgatgttcaacgtcagtgcttctgtgaccagagacctctggaggagggtttgtggcagctatgtctcctaaggctctgagttagtcagataagggaagtttcagataagatttctctctgcgtctgttgtagctcagatatttttcattggaagttatctctttaccaagttagtgtactgttttcttcagaagtaaaaagagtcagagagaaagtgcttgaaatggaagacagagaagaaacagtccaagttaaaccttggacaacctgagtctgaactacgtgagtccacttagatgtggattttttttgatcaaacaatattcgccagatgcaaaacccatgtatatggaggggtgacttttcatataccacgattttgcaggctgactgcaggactgttgaccattagtatgtcttcttttgagaaatgtgtattcaaatcttttgcccattttaaacacaggttatttgttttttttttcctattgagttgcttgaactccttatgtattcgattattaatcccttgtcagatgggtagtttgcaaatattttccccc

SEQ ID NO: 725048 - DNA, 615 bp, Homo sapiens
cagaagggatagtttaagaaaagtgtcatatttttatccctggatttttgacacacaaaagccatacaccaatattcagacaaaggtccatcagtcattttgaaacttttcttgatctttttgataattctrttctttctggaggggaagatccttattaccttggtaaggcaagttgtctctaccttagaaacgcgaccccaaaccaaactgatacattcagaagggaaaatgtgaccagcactgtgataactgcttggtaaagctgacctcgtcatttggtctcttgttcatagagcagagggggccagcacactcactgtgtctttaaacttttttttttttttttttttgagacagggtctcactctattgcccaggttggagtgcagtggtgccatcataggccactataccttcaaactcgtgagctcaaacaatcctctcacctcatcctcctgagtagctaggactacggggcatgccaccacacccagctaattaaaaaaaaattttttttttgtagagatgaggccttgctatgttacccaggctgggctcaaactcctgggctcaagcaagccttctgcctctgcctcccaaagtgctaggatt

SEQ ID NO: 725049 - DNA, 1270 bp, Homo sapiens
cagattcaggtctgttttaaacaatatgtggtttgtgttgtcattctcccagccccatcacccatggttcttgatgttacagtttttctccaggcattgatttatatgtattaccttttgaagcttgaacgaatgtctcatatgcccaaatttctttgtttatatattttaggcaaaggctgccacccaaaaatgtttactactaccgctgcccggaccayaggaagaactatgtgatgtcctttgccttttgttttgaccgagaagaagatatttaccagtttgcttactgctacccatatacatacactcgcttccaacattaccttgacagcctgcaaaagagaaacatggattacttctttcgggagcagctgggccagagtgtggtaaggcctgtgccaggtttgggttactcatttggaaacaggcaaacttgggatagggacttaacacgggtttttatgcaatgcaaataatgaatactggtgctttccagaacttttaataatttactaactacaattaaacaattatataattagtattaatttaacaattctttaaagtattgtttttattgtgtgatttattgcgactgtgggcaccaggaagtcacagaataagatatgagacagatggttgtttttctgaatgaagctgataaagctctctagcaaaatacaaaatttaagtgaatcccaaaacctctgagagaaaaggagacttttgctaggtgttacaaaaggtatgaaagcattttattactgtgagcctctgataggaagaatacatttcttagtgaaccaaacttgcctgcagtacaggttagcaagtggtgtgcagtttggttgtgatggccacaatgtgccctgtctctgtcatccatcagttcctgactgttttttcctgctccaggtttagtttcctgggtctagagatttcagtctcctattccataattgttccctattgctgatgtgacaaactaccacaaatatggtagtacaaaacaacacaaaattattatcttataattccaggggctagaaatacaaaatgagtctcactaggttaaagtcaaggtatcagcagatctgcatttcttttggaggctttaagggagaatttatttccctgccttttccagcttttagaggctgcttgcatttcttagtttgtagttcccttccatcttgagagctatcagtggctggttgagtctttttcatgctgtatcactttgatatgagctctctttcacttataa

SEQ ID NO: 725050 - DNA, 1354 bp, Homo sapiens
tagcattttacagtttacaaagtcctttcctatatatcatttcactggattcattcattcaatcattcaccaaacactcactgggtatttactatgtgcaaggctctgtgtaaggtaacaatcagtcaacaaaatatatttaaatgctgagcatacagtagcaaacaagtctccagatatgaatcacaaaaattcacaatcaaaatcacagaagttgtatcagattaaagaataggcaagacacaggtcctgtaatggagtcagggtaggtgtaggacatgctacaagcaaaagagtgacagttctatctgggaaggattggacaagaaagacttcatacctgggacccatgtcttaggacaaaatgttaagttccaactgatcctactgccatacctgagccagttctkcacctggttctcctagacgatggaggcccactcgtgtgcctgatctccgagcaatatccactccttggtttatccaaatctgtgtgctataattgctcctgtaaggtttagaattttcaaagtatggttgccagctcaaaatcatagttatacctttaacaaacaggcataatatttactactctttgaatcccacaggattactatgagcattacatgagatcatggatagagatataatgccaatgatataaagggccctttttgaattcttaatatgtaccagacatcaagtactttatgcaaatctttgctcatcttcacattttttatacatagatatgaattccttctcttttatagaagttcagtgacttatccaaggtcatataagtagaaagcagcagagtttatctactgccaaaagccattttattattatgtgtctctttcctctatatcacattgcctctccaaagtgaaaataaataaatacatacatacatacatacatacaatcacaaatgcagcacctgccatttgccaggcaccaaaataggcattttgtttgatatgaaactcacaacaagatagctctttttaaacaggtatcttttttcaaaaagatttaaacactaaggcaactgatgctcagagaggatgaaaaaaaatcaaacagtttgttgatggtaaagccagggtttgaacccaagttgttgcctcaaaagttgttgtctttccactatatcacactacctcccaagatcctcagtttgctgctagctgcctattgctttccttccttggtacttactttttccatctttccaaattttatctttccatctttccaaaatttatgacctctaagagctctttcagctttgaggttctcaggttctaagatataaacaggtagagatgaaaggcagacagaaagacat

SEQ ID NO: 725051 - DNA, 607 bp, Homo sapiens
agtttgaatcctagctgtgcttactgccagcaattatctgtgcctctgtttccatatatgtaaaattattgtcacattaataattaatagaaatagatattaatagaaccttcctctgagggttgtttgggggtactgaatatttacatattttaataggagtaaagcacttagaacaggaaatggcacatagtatgcactatgccagctaagcctatatattagctattattatttcttctcattcttaccccttaatctgcwtgctatttaagagaatattatgtgttatatgatcacattgaccacatagatcctctagctttcaaaaaccacatagatacttcagtttaggaattctaaatgaaaagcatagaatactgagttaaaatgcccatcctacatttagtggtgacaatgacattatgcagaatattacagaggatgggtggaaaacgatgttaattttttcttagaaatataagaattgctattttgctacctatttgcctgttacaaatgtgtcaagaataagtaaataatatctgaggactgctttgagtgcctaataaagtgtatatatctactctacaccaagcactaggat

SEQ ID NO: 725052 - DNA, 1222 bp, Homo sapiens
tcataatgaaaccttttgagaattatcatgaatttgcacatgacagtgaagcatacagatattacatagccagtaagagacattatttataaattaattgagatgctttatatctaaagttttcatttagatttagcagttttaaagtccacaaaaatattttataatattatgcactaacaactactaagtggaatggagcactrccatttcttcctaattgagaacggtgcaatagaataaatttaatcaatctccaaagaaatgtgcatgataaaatctagttcttccgctcacatttaaattttctaatatttttattacaacttttataactcagtctaactatagactaattgttttaattactgtaacttcaagttatatgaattacttggctataattaagcaatatgacatgacaagcagtgcctttcaggatgattgtagggtattatagtttcataataaactccaatgatgttctatcttaattatacacattaatagattctgtacacatttaattatctgctacatttatattcccataactttaagcggttctgctttagtataaccagtgttcaaaaaaattcactaatggggcatgatagccaagttatcactgtactttaggaagaaaaccacccattgatatatgcaatattttatagttatatgggtacaaaattaagtgattaaatcttatagctacatcaaaacatatatttgtgtaaatttaaaagataaattctgttctacttcagaaatatggcagatattgatgtagaattatgaataaaataatcatatataaataatgaaatgtgcttttttggagaattacctatttatatgaatagtaaaacctggatttaaagcatgtattaaatagtagagatttaccctaaaatttttcactatagtaaattttctaaattttttgactctctttttcattggcataaattctccctagagataaatttcctccaaaacatctctagaaacttatatcaagctatcagatctctctgtttggagaagtgttaaaagatatccttggtctcactaaatttttagaaggttttttttccctctccttttctaaatatttatcagtaccatcaaatttacttggtaataatttgaaaatattcaaccttgttttctttccaatttttactgcaatgtcattaattcaaaaaataatttaaat

SEQ ID NO: 725053 - DNA, 568 bp, Homo sapiens
tcacctgagagaacttcctcctccacctcacccgcaaccactaagccacctgctctagtcctcatctggtgtacgattttaatggcacttcatgacactcatatctctttttctctgtctcttcccctcagggtagaagctcaacaaacccaacttcatcatttgtgtttcttcctgtagttgctgcacttactgggcactcagcagtacttgctgagtgattcaatgggaacacagctggttaaatattggttaaaagtgaggaaatctgcaatgcagcatascaaaaccattgttagtgactgttcattgacatctaatttgttttccttacaaatgctggctatgaactgtcgtgtaaatcaggtactttttctttaaacaatcacatttccatttttgttttattataataactaagaatgatgatttagaaacataaattttggtctgaccatgttaagtattaaattaatggtcttaaatttcttttgatcagttttattaaacaaatatatttacctaattaatagatgaataatcaagtaatgattggtgtttatttaat

SEQ ID NO: 725054 - DNA, 568 bp, Homo sapiens
tcacctgagagaacttcctcctccacctcacccgcaaccactaagccacctgctctagtcctcatctggtgtacgattttaatggcacttcatgacactcatatctctttttctctgtctcttcccctcagggtagaagctcaacaaacccaacttcatcatttgtgtttcttcctgtagttgctgcacttactgggcactcagcagtacttgctgagtgattcaatgggaacacagctggttaaatattggttaaaagtgaggaaatctgcaatgcagcataccaaaaccattgttagtgactgttcattgacatctaatttgttttccttacaaatgctggctatgaactgtcgtgtaaatcakgtactttttctttaaacaatcacatttccatttttgttttattataataactaagaatgatgatttagaaacataaattttggtctgaccatgttaagtattaaattaatggtcttaaatttcttttgatcagttttattaaacaaatatatttacctaattaatagatgaataatcaagtaatgattggtgtttatttaat

SEQ ID NO: 725055 - DNA, 680 bp, Homo sapiens
agcactgtgttactaaataggcttccaaatgagatcatgttaccactgggaagcctaaataactgaactgaactgaaactaaaaataaatccaattattgcatggatatatttgtaaaatcattaaggctgatcatcttccaatccccaaatcctcaactcacawaggacaaggagacacacattctcctgttggtagctttagcaaacttcctatgttttgatcaggagggaaaaaaaaaagccttctcaaattagacaacaaaatattttcaggaaattacgtaagttactttataatcctttttaatattataagcagtatgatggctctaaatttataagtagccataacaaaaaatatcgtgcaaacagaatacaatcaccacttgttaaacatgatgaaaactaaaggcaaccatatgaaaacaaacatacatctttgccagtagacattaatctgctcctgtggacttaaattccttgagggcagggatcaattcttactcaacctaatttcaattcgttggaatgaacccatactacagaactaggttctgggcacacaaccatgtgcaggtaagatctcgctcagtgtgaagcttacattccagaggtggtgacagtgctccccggaagtgtaaaaaagaaaattaattttaaacgagttaagtgtcaaaa

SEQ ID NO: 725056 - DNA, 680 bp, Homo sapiens
agcactgtgttactaaataggcttccaaatgagatcatgttaccactgggaagcctaaataactgaactgaactgaaactaaaaataaatccaattattgcatggatatatttgtaaaatcattaaggctgatcatcttccaatccccaaatcctcaactcacaaaggacaaggagacacacattctcctgttggtagctttagcaaacttcctatgttttgatcaggagggaaaaaaaaaagccttctcaaattagacaacaaaatattttcaggaaattacgtaagttactttataatcctttttaatattataagcagtatgatggctctaaatttrtaagtagccataacaaaaaatatcgtgcaaacagaatacaatcaccacttgttaaacatgatgaaaactaaaggcaaccatatgaaaacaaacatacatctttgccagtagacattaatctgctcctgtggacttaaattccttgagggcagggatcaattcttactcaacctaatttcaattcgttggaatgaacccatactacagaactaggttctgggcacacaaccatgtgcaggtaagatctcgctcagtgtgaagcttacattccagaggtggtgacagtgctccccggaagtgtaaaaaagaaaattaattttaaacgagttaagtgtcaaaa

SEQ ID NO: 725057 - DNA, 638 bp, Homo sapiens
ttttatgtatattttctgctttagactcwtgctgtcaatgaacaaaatgttcatttttctagtgcggatggagtaaatgcaggaaaatcccatccttctcacatcgttctctgttttgaacatgttcactgtaatcggtcttaaaagaagtaactaacttctgctaagttttcatttgccatttggtggctttgcaaaggagaaaagaccacttattattgactacgcaagtgtgaccctgtggaataggtgttgatgaaaagagtcaaagtctactaggtatttgaagagatttattctgagacaaataggagtgaccaacggcctctgacacagctctcagatgatcctgaaaacatatgcccaagatggtgaggccacaacttggttttagggagacatgagacatcagtcgatacaggtgagatgtacgttggttcagtctggaaaaacaggacatgtagaagtgggggcttccaggtcacaggtagattaaaagattttctgcttggcaactggttgaaagagttattttctaaagacttagaatcaatggaaaggaatgtgtgggttaagataaggggctgtggagaccgaggttgtatcatgcaggtaaaatctctaggtagtaggcttca

SEQ ID NO: 725058 - DNA, 638 bp, Homo sapiens
ttttatgtatattttctgctttagactcttgctgtcaatgaacaaaatgttcatttttctagtgcggatggagtaaatgcaggaaaatcccatccttctcacatcgttctctgttttgaacatgttcactgtaatcggtcttaaaagaagtaactaacttctgctaagttttcatttgccatttggtggctttgcaaaggagaaaagaccacttattattgactacgcaagtgtgaccctgtggaataggtgttgatgraaagagtcaaagtctactaggtatttgaagagatttattctgagacaaataggagtgaccaacggcctctgacacagctctcagatgatcctgaaaacatatgcccaagatggtgaggccacaacttggttttagggagacatgagacatcagtcgatacaggtgagatgtacgttggttcagtctggaaaaacaggacatgtagaagtgggggcttccaggtcacaggtagattaaaagattttctgcttggcaactggttgaaagagttattttctaaagacttagaatcaatggaaaggaatgtgtgggttaagataaggggctgtggagaccgaggttgtatcatgcaggtaaaatctctaggtagtaggcttca

SEQ ID NO: 725059 - DNA, 1323 bp, Homo sapiens
taatgaccactcacagagactcaactttaagaaggatgtagtcatattttacttcctgccagggcaacacagatatactttgcacaaaggcaaactcttctgtcaggaccagtcttgcaaaggtggtgttatactgagcagcaacctgcctcctatcccccaaccctcgtggcacccagttgaaactcccagcatctgcacttcagcctgaatgacacagcaagactctatctctgaagtccaaataaatgacaaaacactgtctaaatctgtatctaaatcacaatgaattcaacataagatagataccaaaacttcattagtgtgatagcaactattgaaccgaaagctgaaaaagctttctctttgtaagccttaagaaatgctaagtaaaacaatttcatttcatagaaatgaaaccatattttttctacaggatccacagtataatttaactcataactgcatcaggtgcactaacagtttatataggttctggcttttaactgcatacatgtctgttatcctatggaaaatctttactaattaagtaaaattgagattaaactattctagtggaaatcaatatatagtatttgacctatgagtcaaaagagatagattagtcagtggaacaacgtgtagatgaaagaagcagaaaaacaaagagttttatttcctaaactctacacactgcagattttaagaaaataagtttagtatattggaatttaaaacatctctgggtatctcatatgtttatttatatccttatgacctaagctgaaaaaaaatcaagcaaaatataaaacctttttggagttcaatctatccatgtgtaaaataaggaaatcatagactagattaactctaaagtaataaacagagctaattccatacctaaaaggacacaaggcagaactaacatttccattaggcttttaagaataggtaagaagtattatttaaatggtcttacacctaaccatgactgagacttgccaattaccagtctcaaaaaagtcactttttaatcttataattgttgctaaaataattttctgaggattttttctccttgaacatctcagtctagtgcgatacttaatattatattttyactctagctacaaagaaatctaaatagtggccccaaataggaagatgggcatgtatctttttcactgggctcatgataaaagcaacatgtagaaactggaataaagcagaggacagttatttgcagtggttgttagcagtgattctagatgttcaccacaaaaaaagcatgtgagtcaagagatgtcaacacagatgtggtca

SEQ ID NO: 725060 - DNA, 666 bp, Homo sapiens
tggttggtaactactcaacagtggataagggtaggcataaaacagatatatctactgctacttcctccttagcaactcctcaccacagacgccgtgcctctttctggtatatctaaacaggaacaaacatgtacaagactcagttcaaactagaaggcccttttcgcgaatgttttttaaagtgagtggtaaactgcaaaagtcacaatatgagatccattcctccaacgttctaataccataatctgtatacaatcaaaggctatttataaagattcctggtatttctctatgagttgctggaaacagcaaaatcatagtttatgaagttcacaatccaacagtgaaaataaatgatacggctaggcacggtggctcacgcctgtaatcccagcacgttggaaggacgaggcaggtggatcacctgaggtcaggagttcgagaccagcctggacaacatgaaaaaaccctatctctactaaaaatacaaaatcagccaggtgtggtggcgcacacctgtagtcccagatacttaggaggctgsggcaggagaatcacttgaacccgggaggcggaggtggcagtgagccgagatcgtaccactgcactccagcctgggcaacagagtgagactccatctcaaaaaaataaatacataaaaataaa

SEQ ID NO: 725061 - DNA, 909 bp, Homo sapiens
tgactctgacctctccggaaataaagattctcatcagagtaaagcagtttaaccagcattatgagaagatacaaatttgattggccatggagccaactaaatgatggaattagttaccaagagaaaacatcagatttcttttcagagaagaaagtatctcctgtgactaaaatgattcagatgtaaatatgcttgaaagtgaaaaacagtctcctccatttctgtaactcagtttttgaaaagagttgtaaaaacagagtaggagaatttttaaaggtaacccagattctttaagtggaagttctctttctactagtacttcttgtatttaaaaaagacttggtggtgggrgggaactactaattttgcagaatccagaaagttctgacagattcaaatctattcatatcaggcaagaaataatcataagagataatattttcttcttagaaataaattacctgggacaatttttcaaaatctgtgaacctcttaggtaaaaactaattgttttacatgataaatgagatttattaaactgttgaccttattgtacactgaaaatagatacatgttctgtgaatttctaagataaaacaaataatcacaactgcaacagcaaagacagataaaactgactggatgaaagtacatggccaagcagggacatcagtgatcctttgcaaactgtaatggccagatttgtatgtggcagttgataaacaaagctcattttgaagtatagtttaaatggtttttaggcctactatccttttaggaaatattaactcctggattgccaagaaaaatgggactgtgtttcaggagagacaaatctaattttggcttttttactggagtggtagatttcattcaagtcctttgacctctgattttcagcctttttta

SEQ ID NO: 725062 - DNA, 1102 bp, Homo sapiens
ttttttatatgtatatatgtatatttttatgtgtgtgtatatatatatatttcaaaactgagatgtaggcaggaaatggcaaattcaatagaaaagtgattaaaagggcaaaacttagtacagggcatgtatccacttgctacatgaacacttattatagatgattattaattaaaatctttaggagtgttttgaaagagtgttttgaaaataaatttcaaaaccaagagcaatctaaaaatatttatctcaagcttcaagtatgcaagaaggttaaattctgagcaaaaatacaaatgccatttattttacaccaagacctttaaatataaattatgattctacctagggacagggaatggaggaagtcaatactacttcctcctttaaaatggactggaaaactccaagttggacacaatacacagaattcattttgagagataaatcctaactacttactctgaatagtttttattcagatcccagtagttggaaaatgatagtttagagagacccaaattggaaagaagtatatccctctgtcacagctaccttaaaacatcttaaaatagaatgcacctggatggacaaggtgaaagcatattcttttcttctttttcttttttgagacagagtctcgytctgttgcccaggctggcatgcaatggcatgatctcagctcactgtaacctctgcctcctgggttcaagtgattctcctgcctcagcctcctgagtagctgggattagaagtgtgtgccaccactcttggccaattttttttgtatttttattacaaaaggggtatcatgatgttggcgaggctggtcttgaacccctgacctcaagtgatccacccgccttggcctcccaaagtgctacttttctaatatttagaaaaatacttattgaagctattagagattattaaatacttgtgcttagaaaaattccaaacttagagatgacatttaaaaaataatttcctcttaattcctgtatatatagggaaagagaattgtgtaagtttctaaattcctaaaatgcatagtaattttgaaaaaattaaacaaaaagtgaagcagagggaagcacataat

SEQ ID NO: 725063 - DNA, 810 bp, Homo sapiens
tttcaggcaaggaaggattccagagaaccactcatagaatgtggggatgcttttcaggagggaaacatctcctggttcaatgcttgccaacctgcacaaatatatgggaccctccctatggaaggggcccagaagagtgtggagacagttattttgggatatgtgtccccttgcatttaggtgactcagagactgggcctgatactctcttggagaaagtataaagataagaaacttgctagaattgtcctgatagcatggtaagtaaagaggcttgagaggcacacctaggcagagtgacgacattagtcagagtacatcagcagatctccagtcagatgtttccagtgggagaatctctgaagaactctttattagttattagtcatayattgctgtgcaaaaatagtaccaccaactttttaaacaacacatattttttaagctcaaagtttctgtgggtcaagggtccaggcatggcttagctggcttccctgaaaggttgcaactgaggcttggattgtggtctcatttgaagctcaagtgaggaagggtacatttccaatctcatgttgttgtgtgaagcattcacttccttgtgagtatcatactgaggttcttggtgtcttactggttgttagctggaggctgctctgtttgccacatggccctctccagaggaaactcacaacatagcaaactagtttcaaagccagcatgggagatagaaacctcttttaaggagggggtgggaaacaaagcttgcgatgagatgaacaaccagccctaggatgtttaccatcaacaaag

SEQ ID NO: 725064 - DNA, 2144 bp, Homo sapiens
tgtttttgctggcttctgtagtgttaacaaggtcattgctgaatagtgtttcatcatatgaaggcagaggtttgttcacccactccgcaggtgaaggacacttgtgacagtcctagtttttggtaattatgaataaaaccactataaatatgcctgtgtaggtttttgtgtgaacatgagttttcattttatttatttgtttttaatgtgaaatatgcttaggtcgattaaaaacagcagagaatcgctaacttaatgaagtctctataacaacttatttaggaaaatgagaaataggtacctagttgacaaaccccctgggggaaacagggaaacaggagaagctaattaatttaggcctgcatttcttagttgccaaccgaacctgccagcatttatttcggcaaaaatatttttggaactagattcttgaattaaagcaatgagaggtgttaggccaagtgaagggagctcctagaacagatgtcttgtgtaaagtaggcaaccaaatggtttggtaaaatatgtctttttcacctaatcctcatcactgcctgatgccagtatgaggtcaacttatataaataagaagcaacacttcctatctattagtatctctcgccatgtaattcataaaagctagaagttgattgattttgataaatgataartgtgcatcccaagaagacaagtgtgaaatggtcctaaccagttggtacaggcggagctgtttaatgatgttacatgtcattggcaactaggtttccatccaacggggctcgttgtaaaatctaaaagccttatgcagtgatttgatgcccagagtaagaaaactcagtgaacaagatcccttccagagtaacatatagaaaagattttttgagacttttttttattttcttctccccattttcttgggtttccatgcacccttcctcagcttttttacatagatcaatttctacaaaggcatttgcgagcggttgaaagcagaaaaaagcattacccatatttctttggagatcaaagacggaggaaacattccttctaattcatgtagattaaatcttagtcttttgtttttatatcagctataatgcatagatttgagaaactgcctcaagttccaatgcttttttaatttgaagcaccattgttgtgattacaaatttgctgggttccaacaccacaattttgcttcctttatcagtgagtgttttgttcctaagaaaatgtgtttgcaattaatggaatcttgtgcctttaagctgctttggccacaggcctgtaatttgctttctttgctttacctccaggcttttgtttgtcctttctgtttgcctctaaggaagctgaaatggatgcaagttgtcttgccgtcccaggatctttttgaacatctgtgtagtcatctgatcatccatttcctcctcccactcacaaaaccccacagagacagaacttgcccaggtttgcacatatggttgatgttcacagcttgaaagtgtccaagctatttaagtttgattttaattttaatgaaagctcatagttttgcccagagatgaaagcaaggtgttagaaatccccagatttccaggtcattagatcacttaacagttcacccacggctgattcgttttcagtagagcagtgttttaatgagcataattcaaaaatatccaccttaaaattttagagggtccgaaatgtactttaggtgtctggtttcgagagttcctttgaactttgaaaattccattttagtggattatatggttaccaaatagtttctaaaaacaatcagaaaagcattttatggaaacatccaattagagaaacagtttttaatattcactgcccatagctgaaggaagaattctcaagctgggatgctgaccgctgaaattgtgactaatcttttgagctctacctggcttgttaggtaatatctggaaggggatttgggaattgtaaaaagataaaaggattttgaggatgattgaactcatacttttcatatcttcagggcctatctagcatacaccgtggtccataaaaggtttccagtaaatttatttgaaacagaattaaacttggaaatgaaataatagttcatgatatagttaactggaacacgatta

SEQ ID NO: 725065 - DNA, 1651 bp, Homo sapiens
gaaacaaacaaaatagggtgactctgtgtcctcaaatgggaaggctccaacacatgctacttcctggccccttgaattggtactctccaccagagccaccacccaggctctgtggtccmtgaggagagaggctcacaatggggcctcctccaaggagaacaagctcccaggagacctcccctcaaacccagggctctgagctggctaatgtccaaggagaggcacaagaatggctggtcagggactggagtctctgcctggcctacctaagggcatcctcagctgcaggtcccctgactcgatgaacagaacagggaggggatgccgctgagcatccacccccacagcctatctgtctcattccagccagacagcccctccagggcctgagatgtaactctgcttccttctagcctgaagccatggaggagaccgggtgggggcaggtgtggacaggtcaactctggccagacagggccctaaggtgccgccttgccggggtgccaggctctgactctgggacaaggacaccagaccacaccaaccacacttgccagcctgccctgtctgctctgagccacccccttggcccactgcctcttccctctgccggacgcctacctctgacgcctccccccacagctccatgtcagccatatgctgtctctgtcttctcattaggactttaggcacactccagacaacatctctttttatgagctacctaaaaaattcctctccagcaacaccaagccaccaaggggtggccagcaaggcaggactctccaggccaggccagcagggctacctgggaggaggcttgtggcagaggggcagaggtgggctactcccaggctgcatttaggactattttgcagataggtaatggggaaccacccacaaggatagagtttgaaataagaagcaagctaaagccagggctttggggaatggagctcagatccccaaaacttagcatgtagaaaaacatttttgaatcttactgggcataagactcaccaggaagagataaaaatgcagatttcaaggcagccgaggaagctgctccctcagcaagccctgctaggcctgcgatgtgttcccaggaaagattatggaagatttgaagagaaaagcagaatccaggcttgggtgaggtcggacagccaaggccagagcacagggtggaaaccagagaggtcctgaggtccgagctggcgggaagtacaggagaagcaggagggctgtgagtgggacatggatcctaaagccacagatctctgggcatgacttcctgcgattctgaaagcctccagcttttaggtcaacccttgaaatgtgagcaggccatacagaacctcggggcctatgaaatcttcctccttagaaatagactcttaatttagagttgagagtccacccaagaggaaagagctagatttattgctggcaaaatatgaaggatgtaacatgatacctcttcaagtctccttatatattttcacaggccaggcagtaattgcctccagagatgaggccctgatgggttaggggaggaaccctgcccacccgcccgccagctaggaggagggagtctggggccaggtacagctgtggtagggatgcaggacagaacggactcacaaaaaga

SEQ ID NO: 725066 - DNA, 2985 bp, Homo sapiens
aactcctgacctcaggtgatctgcccacctcggccttccaaagtgctgggattacaggtgtgagccaccacgcccggctggattatactttttaaaaatttgaaaattgtagttttaggggttccttcaaaggtggaattatattctttattccattgtggcaagggacttttattcaataaattgatttcagcataaaaagcaattcactttaacagatatttggctcagtttaaggcttagctgtattgccagtactgaagtactaatatgagtgttgtttagtataatgaagtcaaggtacatcagtaataccaagataaagtttcataataaaaagccataaagtgaagacagagatttcaaagtaaaagaatattttatttgtggaatttgatactttgataaataatcaaagtacaagccctgtttaaaattaaaagttcggcttacaaatataatagccaatgtatcagtgtcttatgtgatactatatcatggatatattgatgttataaaataattagatacagagtcatgcaacttgctttcaccctgttgggacactctgaacagtcagcactgttcatttgatagtaattttcagatgctagagagatttgtgagaggctgataatgcaagagtaatgatttatgtagccagtttcttcaatgatctgtgataacaaatcattaagaatgagacatatggcttaagaatgaagcttaagaatttgacatatggccggctgtggtggctcacacgtgtaatcccagcactttgggaggttgaggcaggtagatcactggagtccaggagtctgagaccagcctgggcaacatggagagattctacctctacaaaaaatacaaaaattagctgggcatggtgatctgcamctatagtcccagctacttaggaggctggggcaggaagattgcttgagcccaggaggtcaaggctacagtgagctatgatcatgccactgcactccagactgggcaacagagtgacacccatctaaaaaaaataaaagagaatttgacgttgtgttattctacgctccaccaaatacctctccccttgccaccctgtctccctttccctctgttttaggatttttctcacactgtaaaagaagatttactcacagttgttaaaagcttgccttccagctttctaatttgaggtaggttctataacctctgtgggtccccgtttccacatgtaaaagatgaacataatactagtactacattaatagggttaggagggttaaagggtaaagagtcctttgagcacattttctggcaaaccataataacttgataaatgctaagcattggaacgggtaccaagtctccaagaaacaagtatctcaatgcagttttagaaatttcctgttttattcttttctgtggccctgctcaccctctgggaataatcatttcaactttgcatttgtgaaaaataatacatacaatcttaaggttacttcagactatactttttcatcgaggagtattgtattcaaaagtgatcgatctgctgaatatataaattaaaatggacacaagccttcattcatcagacatttgagtgtctgtcctctgagttcccatagaatctgaattacaccactttattcacacttacattatgtgtttacttttctgagtgtcctattaatctttattccttaaaggaaagcctgagggcatcttgtttaacaatgcatctctctcttcatcaatcaacgctgcaggtgcttacaagacttataacttaaaaaaattataatacaaggctcagcgcagtgcctcaagtgccaacagtttctgtgggcctggcaggcggatcacttgaggccaagagttcgagactagcctggccaacatggtgaaacaccgtctgtactaaaaatacaaaaattagctgggtgtggtggcacgcgcctgtagtctcagctacttgggaggctgaggcaggagaatcacttgaacctgggaggcagaggttgcaatgagctgagattgcgccattgcacaccagcctgggtgacaagagtctcaaaaaaaaaattataatacaagtaattactttcgaattctgccatgggtatctttttattattaagaaaagcctgtcatcaagggattcatttatgatattcctaaatatgaaaatattttgtgtaagtatatatttatctccatattagaacttagcaacagtgctcagataaactcaaaagtattacttgagtttagaatgcattttgtatctaatattttaatatgaatgtgcctgatattttcggaagtcacaacactatacaaataatgaaggcatgtacagaagattatgtgtaggaggaaaattgagtagctaatttaatttcatttaatattttacttagagtgtacacatgtttatagactgcaagtctatgggatttaatagatattacagcaaattacactgcgaaaacattgatagttctacactgtaattaaatgttatatatattattaaaattattaggttggtgcaaaagtaattgaggtttttgccattgaaagtggtggtgcatgcctgtaatcccagctactcgggaggctgaatcagaattgcttgaacccggagggcagaggttgcagtgagctgagatctcgccactatgctccagcctgggcaacagattgagactctgtctcaaaaaaaaaaaaaagtcaagtacagttagttaaaggaatgtgcatttaaaaattaatctatgattaggctattaatatatagtctaataattttattgcattataattataaagtagttttataattttataaaattttattgatgctgtaatttttataaaattttatttattttataattttacaaaaaattctaatacctgtaatacactttttagtgccttttctttctaaaagttaatgtttgaaattacaatgtgtaaatg

SEQ ID NO: 725067 - DNA, 620 bp, Homo sapiens
atgaactgtttcattctgtcctatgcatttttaattcagtttttagtatttccaccagataggtaatactgaacttttatatatatatatatatgtataattattaaatcttaccaagtaattaaaagtatggttaaaacactactttttaaaaaggtttggggattataagtgaatttaacgtgagtatacttctggctattatccttccaatgacaaatgaaagttgattacaagcatggtgtctatataattcattctctatggcagtaccctttcgcgagtgaaagrtggtgttaactggacataacagaggaacagcaggcataaactacaattgtccaaggcaaattggatgttatggtcacaacagccaaaactatgttcatccacaaaatcatctttttatgaatagatctgggtcatatagttcgtaagagggtaaaagaaaagggggcagtatttctataccgttgcagcttccaatgtctttttttcaaatcacagaccagacaaagaacagactttgcaggaatgtacataactgcctacatatgtcagctgatgaactgaaagcatcaaattcaatttcattatttaccagtattactcctatctca

SEQ ID NO: 725068 - DNA, 620 bp, Homo sapiens
atgaactgtttcattctgtcctatgcatttttaattcagtttttagtatttccaccagataggtaatactgaacttttatatatatatatatatgtataattattaaatcttaccaagtaattaaaagtatggttaaaacactactttttaaaaaggtttggggattataagtgaatttaacgtgagtatacttctggctattatccttccaatgacaaatgaaagttgattacaagcatggtgtctatataattcattctctatggcagtaccctttcgcgagtgaaaggtggtgttaactggacataacagaggaacagcaggcataaactacaattgtccaaggcaaattggatgttatggtcacaacagccaaaactatgttcatccacaaaatcatctttttatgaatagatctgggtcatatagttcgtaagagggtaaaagaaaagggggcagtatttctataccgttgcagcttccaatgtctttttytcaaatcacagaccagacaaagaacagactttgcaggaatgtacataactgcctacatatgtcagctgatgaactgaaagcatcaaattcaatttcattatttaccagtattactcctatctca

SEQ ID NO: 725069 - DNA, 649 bp, Homo sapiens
aataatgctcacatgtaatactatttcctatagctgaaaatcagtataataaatttatattattatctatttcctaccaaagcaatgatttcgactgtgccatgaccagcagtgtgctggcaaatattcagcaatcagctttccaagtgtcctttgtagtattacttgatgtttttctttatgtcactgatgtcaatgatgtgagcgacttcttagctgaagtaatcattttttaagaatggaagaatatatacttttttttagttacaatataataactaaaggcatgacacatttttattagcagcattttctccatcactttaagtctagacaatcaagaaataagaaatcaagccctatttatggcatttgacaatctctgtagcgtaaacattcttcccatagctaatttctagttatcattgtgasatcaccaaatatagagttggggaaaaaaatgtacaaaagcacaccattctattatttcaaccagaggtatgatatacttacataaatagcttgaaaagcatagattataataaaatgtagtaaaataattaggaagtgatgagtttgaagtatttattagcttttaaaatgtaattttaatagtaagcctatgttctttagtttttaataatagctg

SEQ ID NO: 725070 - DNA, 473 bp, Homo sapiens
aaggccatcccccacccaaatgggacccatggcatggaatatcacgctgactgcaaggcaggacttggtcacccagacctgcctgaggggtggccctggctctaattcctgtggttcttttgtgagctttagtttgcttagcagtgaatagagamcagcgggccaggccccatcgtgggtggatccccagttagagcaagagcagcactcggcagcctccccatgggaccctgcctgggccaagggccgtccagcccggcttatggggcttccctaaacccagagcaccctgactctgcttctgtgccctgcactgatgtccccaaaggcagccagggccctgggatggcgggcaatgacctcagtccactccctgaacagagaggaccatccccagtaccctgcaggtccacttggggttctggccctgaacttccctaagactggccctcaaacaggccaccctgagatgt

SEQ ID NO: 725071 - DNA, 1390 bp, Homo sapiens
ggaggggaaaatcttaaaaacttgagcatggagactgcactaattaaaatttatgggttgtaaaataaatctcttctcactctatcattctgcttatcctacctatttggtcaactgaaggcagctacctgggttcatataagattcttatttttgaatgtttgctttcctttaaaaacgatcataaagaatatctcccatttctcctgtcaccgcaatcctctttcaccttgctctcttctccctatccttgtgtccacgaatttcctgaacctcattgcttctccccagaaggaatcccatgatataagaattgttacatgacccttagcctaaaactccctccagcagaagtatctggctttaacagaatcttcaaccgccccattccttatgaatctgtctcccacacattggtgtgtaccatttctgaggttttggggctgttcatcttggttgttctgttgctcatcagatctgttgatctcatccccctggagtaatgatttctataggttcaggttcacagcctgttcactcaacggatgctctgaatgctaatctgtcaagcttctaggagagcttcctatcttcagcagatcaggtaaacaaatccagctcctatttttcacattcaagatttcagaacatgtttctcccccagcttttgcctttccaaggcaaagagccccaagagttttaattggtctttatggtacaaatccccacttctgattagtttgaaagctgtgaaccctccctggcctggttaatgttcccaaactacaagattcctattctgaatacttgcttttccttttaaaaattccacagataattctcccatttctcctgtcaccccaatcctcttccattaaactttcttctccctgcacctgtccccaccttctctctctgtgttgttactcagaggaagacattagggttttatgccaccaactctgcaaactctcactcaccacctttagacgggacgccgggcatactttcggcgatgctgctcgtccactcgctccaggtaccaagtacctgggaaaaggctgtttgtgtcaccaggtggggagaaattcactgtggaatgaggagaagaggcagtactcacaaagagttatatgagtttttggaagagaaaatagtaatgaagatgtctgccccttcacagtgaagctctcttggctgggctgtaaggggctgcaaggtcacccttagtccaccaaatagaacactggacccacagaacaagaggggcagccatcttgaatctagcacttaaggccttaataaaagkctattaagacttttattataagagtacaacattttcctacagtaaacatagccttcctccattgaaatcttcatcccatcc

SEQ ID NO: 725072 - DNA, 903 bp, Homo sapiens
taggcacatgaatagtctttgaactgctgggttgctatgcaggtctacaagtactacagatatgccaagccaggtgaccattaaaataacattttcttggtcaagggtggtggttcacatctgtactcctagcactctgggaagccaaggcaggaggatcgcctgaggccaggagttcaagaccagcctgggcaacatagtgagacactgtctctacaaaaaaattcttaaaaattagccaggcatggtggtgtgggcctgtaatcctagctactcaggtggctgaggcaggagaatcacttgagcccaggagttcaaggctgcaggtagccatgactgtaccactgcactcctgggtaaaagtgagaccccaactcaaaaaaagagaacattttcttttgtatggttgaagagttgaatccaaactgcaatgaaaaagtaatgaaggcaataaaaacaatacctttccaagaagtctggcaataacgatgaggggaaaaaaaagaattaaggaaaaccttttttaggaaggagaagtttcacataaggagagaagaagtcagaggaaggggcaaaatctgaagagagatgaccagtgaagcaaaaagatgagaaagacatgtaytcgtccataggctaaaagacagaagtgatgaaaagtgatgaagactcaaaaaagtgggatggttctctgaagtggtggggatcaagtacacatacgagaagatgcactttggaaagggaacagccacttcttccttaggtttcccaggaaggaaatgaaaagtccagagaaaatctgagatgacgacttcgggaaatgtgtaagataacctcggtcttctcaataaatttttagaaacattagcactgagtatatttgcataaatttcactgtttgat

SEQ ID NO: 725073 - DNA, 1402 bp, Homo sapiens
atccctaactctattttaaaaaccgtacatagcagatacgtaattaatgaactagagctatttataaaaatatcaatgaggccaggtgcagtggctcacgcctgtaatcccagtgcttcaggaggccaaggcaggtggattacttgaggtcaggagtttgagaccagcatggtcaacatggtgaaaccctgtctttactaaaaatacaaaaattagcctgggcctggtagcgggcacctgtaatcccagctactcgggaggctgaggcaggagaatcccccctgaacccagcaggtggaggctgcagtaagctgagatcgttccagcctgggcaacgagagcaaaactctatcacaaaaaaaaaaaaaaaaaatcaatgaattaaacaaatatttattgaatgttatgtgtgatcattttagagaactacagagggaataatatgtggcccatacaatcaatgttttaagagtcgtagaaaggaaaaattcagagtacaatgaagtaagattcatggagaaagcaggtcttgggtgggaggtggcaacctatttagtaaaaataaaacaactccccactctgaaaaaaaaaaaaaaggcagtcaaggaaagaataggtcttcaaaaggatgatcttttatttctggaatcccttctaggctaaactcaatcactaaagcatgaaagtataaaaatgcaaaagaattaaaaaccaataataaatgacaagtcttattcctcttaagttgttcaatccagcaatgagtaaagaaatgctctttgttaaggattaattgtggatgtagatatactaaacgacttcacttcagcaggcaaaagggaattacagctttttgttttttctccttggttagtcttcaggcagcaatgttaaaaaacaccaaaattattctgaaaagtaaatttccctaaagaatcaagtgcattgcttcttatgttaaggaccaagtgctgcagtttgagggaatttcttgggtgctaaattgtgaaatcatggtgtgtgtgtgtgtgtgtttgtgtgagtttcttaagaaagccctttcacttatacctcttggctaagcttctgttgcttcattacttcctccaggtgcttttcycagaaaacataactatttcattacttactctgaaagggtattatgaagctgctatggaataacttgtgtcccttcgaaattcttatgtgaagccctaactctcagtgtgatagtatttggaatggagctttggacagtaattaggtttagatgaagtcatagggttggggccccatgatgggattagtgcccttataagaagagaggccagataacttgccctctttctctccctgccatgtgaggatacagcaagaaggcatcttctgcaagctagaaaaa

SEQ ID NO: 725074 - DNA, 630 bp, Homo sapiens
ttttttttttttttaggccacttaccaaaaaggtaaagaaaaacctctcgtggtgtgattgcttctacatatgggaagcccacttagatgacctggaaatcaaacctgatgaaaagtgtacttgactttaatcagacacaggaagaatgtgtctrgaattatgtgtgtaccctacattatagagtaatgtaaacaaaaaactaataccttaaggaggcaaatagagtaacaacataggaagtttcctagttatatggaacaattcgaacacatcaagaaaagccaagagtgcagaatcaagttatactggaggaaaatattgcttttccaggacttcagggtaagcattttagtgtcaggctataacagcagaataagaaccagaggaaaaaaaaaagaagataatgagagttaacaaaaaagttgaaggagatagttatcacctcagccaagcaaaacaagatacctattgaaggggaaaaaaactaaaggtatgatgtatgacctgcaaatcacatgcagcaaggtacaggaaaagttgaacttctgagatataaatctgagatgcttccaaattttttttaccttagtaaataaaataagcattccaaataacaaagacagtatttt

SEQ ID NO: 725075 - DNA, 630 bp, Homo sapiens
ttttttttttttttaggccacttaccaaaaaggtaaagaaaaacctctcgtggtgtgattgcttctacatatgggaagcccacttagatgacctggaaatcaaacctgatgaaaagtgtacttgactttaatcagacacaggaagaatgtgtctagaattatgtgtgtaccctacattatagagtaatgtaaacaaaaaactaataycttaaggaggcaaatagagtaacaacataggaagtttcctagttatatggaacaattcgaacacatcaagaaaagccaagagtgcagaatcaagttatactggaggaaaatattgcttttccaggacttcagggtaagcattttagtgtcaggctataacagcagaataagaaccagaggaaaaaaaaaagaagataatgagagttaacaaaaaagttgaaggagatagttatcacctcagccaagcaaaacaagatacctattgaaggggaaaaaaactaaaggtatgatgtatgacctgcaaatcacatgcagcaaggtacaggaaaagttgaacttctgagatataaatctgagatgcttccaaattttttttaccttagtaaataaaataagcattccaaataacaaagacagtatttt

SEQ ID NO: 725076 - DNA, 630 bp, Homo sapiens
ttttttttttttttaggccacttaccaaaaaggtaaagaaaaacctctcgtggtgtgattgcttctacatatgggaagcccacttagatgacctggaaatcaaacctgatgaaaagtgtacttgactttaatcagacacaggaagaatgtgtctagaattatgtgtgtaccctacattatagagtaatgtaaacaaaaaactaataccttaaggaggcaaatagagtaacaacataggaagtttcctagttatatggaacaattcgaacacatcaagaaaagccaagagtgcagaatcaagttatactggaggaaaatattgctttyccaggacttcagggtaagcattttagtgtcaggctataacagcagaataagaaccagaggaaaaaaaaaagaagataatgagagttaacaaaaaagttgaaggagatagttatcacctcagccaagcaaaacaagatacctattgaaggggaaaaaaactaaaggtatgatgtatgacctgcaaatcacatgcagcaaggtacaggaaaagttgaacttctgagatataaatctgagatgcttccaaattttttttaccttagtaaataaaataagcattccaaataacaaagacagtatttt

SEQ ID NO: 725077 - DNA, 1379 bp, Homo sapiens
tgaatatttctcttgcggcagagttggaggtaagttgattccacccccttgacctgcccctaccctgtcacaaaggaataaaatagttcccccgtagaaggaatccaggccttgaagcaaactccaagtggtagtggctgcccattcaggcctttgtagagtaggcagagyagagcaagcccagggaggaggcctagagggcctatggccaagccctgtaggggaaacaagcaggaggctgaggtcagaggtgtatacggaacaggaggacactgctggtcagagaccaggccagtgaagcctgctacatgtgttccaaataagccagagcccaagagcaggaatttgcagccagaggtccagggacagtgccgctcccaaggcaggggctatttcctgtccccttgcagcttcagagtggcattgggtagaggtgagctgtcagttcggttcaacagacatttatgaagcatctactgcataccagacactggcctagccatgaggattcagagaggagagaatgagtgcaggtcctcccttcagggtagtgcaccccatttcccaagacaagacacatactttgagactgtggcattttaaaatctgtctgcataatagttaatattcttcccttcataaattccttgaatgagcctaattcccttgaatgtgggctggacctagagatttttttgtagtccagagaaagtgtggtgggtgtgaccatgtgtgacttcccaagctgggtcataaggacattactgcttccatcttcttgtctcttgaattgatcacggtgggggaagtcagatagtatgttgtgaggacacccatgccaccttggaagaaggtgacatgagggagaactgtggcatcccaccaatagccagcatcaagtggccagccatgtgagggagccaccttggaaagggctcctccagcccagatcaaacctcaggtgatccacccctgccccacatctcaactgcaacctcaggacagaccccaagctagaaccatccagctaagctgcatccaaaagcctgatccaaaaaccaagagagaaaatattgattgttgttttcagccactgagttttagagtgattcattacacagcaataaataacaaatacaatggtggtacggaataccagcaccccagcgaaaatggcccttcttggttccacctaaggcacatattagcacaatgtcacaataaaaataacagaaaacttggctctaaaagcttttgaaaataatgggcagctttgctaaaggttttctggaggtgaaaggaatgaagtgggaattacatttcacagcagagagcaaaacttctttaacatcctttttaccctcctcttccttccagaa

SEQ ID NO: 725078 - DNA, 1379 bp, Homo sapiens
tgaatatttctcttgcggcagagttggaggtaagttgattccacccccttgacctgcccctaccctgtcacaaaggaataaaatagttcccccgtagaaggaatccaggccttgaagcaaactccaagtggtagtggctgcccattcaggcctttgtagagtaggcagagtagagcaagcccagggaggaggcctagagggcctatggccaagccctgtaggggaaacaagcaggaggctgaggtcagaggtgtatacggaacaggaggacactgctggtcagagaccaggccagtgaagcctgctacatgtgttccaaataagccagagcccaagagcaggaatttgcagccagaggtccagggacagtgccgctcccaaggcaggggctatttcctgtccccttgcagcttcagagtggcattgggtagaggtgagctgtcagttcggttcaacagacatttatgaagcatctactgcataccagacactggcctagccatgaggattcagagaggagagaatgagtgcaggtcctcccttcagggtagtgcaccccatttcccaagacaagacacatactttgagactgtggcattttaaaatctgtctgcataatagttaatattcttcccttcataaattccttgaatgagcctaattcccttgaatgtgggctggacctagagatttttttgtagtccagagaaagtgtggtgggtgtgaccatgtgtgacttcccaagctgggtcataaggacattactgcttccatcttcttgtctcttgaattgatcacggtgggggaagtcagatagtatgttgtgaggacacccatgccaccttggaagaaggtgacatgagggagaactgtggcatcccaccaatagccagcatcaagtggccagccatgtgagggagccaccttggaaagggctcctccagcccagatcaaacctcaggtgatccacccctgccccacatctcaactgcaacctcaggacagaccccaagctagaaccatccagctaagctgcatccaaaagcctgatccaaaaaccaagagagaaaatattgattgttgttttcagccactgagttttagagtrattcattacacagcaataaataacaaatacaatggtggtacggaataccagcaccccagcgaaaatggcccttcttggttccacctaaggcacatattagcacaatgtcacaataaaaataacagaaaacttggctctaaaagcttttgaaaataatgggcagctttgctaaaggttttctggaggtgaaaggaatgaagtgggaattacatttcacagcagagagcaaaacttctttaacatcctttttaccctcctcttccttccagaa

SEQ ID NO: 725079 - DNA, 1162 bp, Homo sapiens
agcccctctgccccaacgcataaggcccagctacctcacccctctactctgctttgccgcccaaaatgtcatgcaaattgccaagcagaagcrtttgacaggtcctgctgagttcaccgcagctggctgcagaactgccaagaataggattgtctcaatcagaagaagaaaggcacggcagccaattaggacctgcaatatttgactaagtgtgccagattaatcgcaattattaattacagggtatggagagcagaaatgtaattattgacaccttccctttgtggaaattggccttgggcaatggaaatctgagaaaccaatcaaagataactaagaacatctttctagccaggggatagagggtggaggggggcaagttttcctcaggctgggaaggggaaatcacagggccattcccaatggatttttgagaggaagcaccaacccactgctgccaactggcctgcccctacaggtggtccacaatctggcttgggcccccacgtggtaaagattggtggttaagataggggcttggctcttgtcctacttctggcctgatgcaccaagtgaatctggactcatcactttatttgggactcagttccttttctgttaatgtgggattgtgctgtaattagtgtttctcaaaacagaggctgattaatttttcctgagtaggactattcaacacatgataagagccatacattgccaagggggcacacttactaggaatccttcctgccccctcttccaaccccagtgtttccagccagcatgacaacccaaaagcacacacccatgttttaacatgtcccctagggagacagtaccaaacctggctgagaaccactacctggtaggtggcatacttgaagagttgtgtggcctctctgcacctcagggtcttcatttgagaaatgaggattctaatgcaccttcctcattgagctatgatggctatgataattaaatattactaagcacagtgtccagcacatagtaagcataatcatttttaccccttttaacatatggagccaagtagttatgatctgatttcaaccctgaaaactatatactattatctctgttttacagatggggaaactgaggaactgagaacttaaataacttgccagatttcaacaatgga

SEQ ID NO: 725080 - DNA, 2363 bp, Homo sapiens
ttttccaraaacttacaggtgtaaaatgtatcattaaaggcagatttaattgcaccattaaataagtattataagaaatacgcttgctttagatgatgtgaagctatctttactgcaggggttatagcaactaacgtgaataagaaagacgagcttattaacttgtaaattttattaagaacaacataatggtcaccaaccaatgtaatgcgtgcaaaacacaagcttgtgttacttgtgctattgattctactgtttaatgtgtcagtgaaaatttcacattcaaatagcctgctgagttatttttcttttaaatgtgtaaaatgcttatgatgaaatagtgaaattaagaatttcttaagaaatctgttaaattctgaattttatttatcaaactctggctcaagtttctaatatccttttaaatgtaaatgagaaatatatatacattattccattgaacatgaaggaatgtgtgccatggatttggcccagatatacacaataaaacaaatgttgtaaaaggtataattatttaatagctaatttgtgcaattctgtgaatttgctatatcacaagtagatgagatatctaaattagaattacttcattttttatatcatgtaagaattgagtatgaaaatcctaggtcagagaaattaaaaacaaaacataaagtgaccagcttgtaaattttactcctctttgtgtggggttcagtctagtatccccaaagtccaatgtattacattactgcaaaaataagtatggtgttgtcataaaaggctgtgcagtaataaatggctacgttagcatgcttatcgtttgtacttccccagagaccctaccactgaaaccctcaggtgacctcatcaacaggcaggtggcagttgatcaattctagacaaagttattgggagaataatttcaattacaagaattttgctgcctatagtgtagacagaagagagcacaggtcatccatctttctgaatttgcctgccaagtagtatttattttttgctcttataaagaatagggaaagatgtattactgggaaactccaaaaggactctggagctggaaattctcatcatgtctagcacttggatcccagtcagaaaagtgtaggtgcaagagaagaggctagtgctcccttatatatcaggacattctggagttctttttaaaatataaattccgcagtcagttctgctcatatagcagcttcattagcagcttaacttagcaagagactagcaacaaaaacaggagctaatgtctagaatttggaggagaagagggcttaatacaaagttacataccagcctaactacttcgtatctgttgtatctcagtgaactttcctatagatacaggaaagttgcctgtgttaggaataaaacagatatgagtccccctcacccaatcccatatctagatttccaggaaaattagaattttaaatgccagttgcaaattagaattagaaatttaaatgccggttgcaaaaatcgtctttttcttaggataaaactactctccttatgacctcatggtctttcgtcttatatttatggtgctaatatgtgtgtgtcacttattatgaaatgcttttaacactttctggaaaaagtaggtatataattaataaatcaccgttttactagacttaccatcgtgaggttttgaatccattttcagcccagtttgtagattcaattgtcagctgtagaatgagacctatataaacttaatggaggaggtttcactgttaggaagctaaaaaaaattgttcttttgtatatctataccagcacactgtccgtgaagaaacgatgatggtgatgactgaagacatgcctttggaaatttcttatgtgccttctacttatttgactgaaatcactcatgtctcacaagccctattagaagtggaacaacttctcaatgctcctgacctctgtgctaaggactttgaagatctctttaagcaagaggagtctctgaaggtaaaaccaaagcactttcattcgtattttacaaggtgatcatactgatcattcatagtgccagaacaattgacttaaattgtatgcatcatgatggcattttgactttcacatggaattcttaaaaatacttgatagtgtggttggcttcagaaatctagggtagaaagacataagttagaaaatgtattttacaatatttagctttgagagacatcctaaaatgaagaaatgcacaaaaatgatcatttttacatgcagtagggacagaaaggaaccaccagtaaataaactttgatggaagaacagtttattcctagttaatggatgacttctgtttcattttccaa

SEQ ID NO: 725081 - DNA, 2363 bp, Homo sapiens
ttttccaaaaacttacaggtgtaaaatgtatcattaaaggcagatttaattgcaccattaaataagtattataagaaatacgcttgctttagatgatgtgaagctatctttactgcaggggttatagcaactaacgtgaataagaaagacgagcttattaacttgtaaattttattaagaacaacataatggtcaccaaccaatgtaatgcgtgcaaaacacaagcttgtgttacttgtgctattgattctactgtttaatgtgtcagtgaaaatttcacattcaaatagcctgctgagttatttttcttttaaatgtgtaaaatgcttatgatgaaatagtgaaattaagaatttcttaagaaatctgttaaattctgaattttatttatcaaactctggctcaagtttcwaatatccttttaaatgtaaatgagaaatatatatacattattccattgaacatgaaggaatgtgtgccatggatttggcccagatatacacaataaaacaaatgttgtaaaaggtataattatttaatagctaatttgtgcaattctgtgaatttgctatatcacaagtagatgagatatctaaattagaattacttcattttttatatcatgtaagaattgagtatgaaaatcctaggtcagagaaattaaaaacaaaacataaagtgaccagcttgtaaattttactcctctttgtgtggggttcagtctagtatccccaaagtccaatgtattacattactgcaaaaataagtatggtgttgtcataaaaggctgtgcagtaataaatggctacgttagcatgcttatcgtttgtacttccccagagaccctaccactgaaaccctcaggtgacctcatcaacaggcaggtggcagttgatcaattctagacaaagttattgggagaataatttcaattacaagaattttgctgcctatagtgtagacagaagagagcacaggtcatccatctttctgaatttgcctgccaagtagtatttattttttgctcttataaagaatagggaaagatgtattactgggaaactccaaaaggactctggagctggaaattctcatcatgtctagcacttggatcccagtcagaaaagtgtaggtgcaagagaagaggctagtgctcccttatatatcaggacattctggagttctttttaaaatataaattccgcagtcagttctgctcatatagcagcttcattagcagcttaacttagcaagagactagcaacaaaaacaggagctaatgtctagaatttggaggagaagagggcttaatacaaagttacataccagcctaactacttcgtatctgttgtatctcagtgaactttcctatagatacaggaaagttgcctgtgttaggaataaaacagatatgagtccccctcacccaatcccatatctagatttccaggaaaattagaattttaaatgccagttgcaaattagaattagaaatttaaatgccggttgcaaaaatcgtctttttcttaggataaaactactctccttatgacctcatggtctttcgtcttatatttatggtgctaatatgtgtgtgtcacttattatgaaatgcttttaacactttctggaaaaagtaggtatataattaataaatcaccgttttactagacttaccatcgtgaggttttgaatccattttcagcccagtttgtagattcaattgtcagctgtagaatgagacctatataaacttaatggaggaggtttcactgttaggaagctaaaaaaaattgttcttttgtatatctataccagcacactgtccgtgaagaaacgatgatggtgatgactgaagacatgcctttggaaatttcttatgtgccttctacttatttgactgaaatcactcatgtctcacaagccctattagaagtggaacaacttctcaatgctcctgacctctgtgctaaggactttgaagatctctttaagcaagaggagtctctgaaggtaaaaccaaagcactttcattcgtattttacaaggtgatcatactgatcattcatagtgccagaacaattgacttaaattgtatgcatcatgatggcattttgactttcacatggaattcttaaaaatacttgatagtgtggttggcttcagaaatctagggtagaaagacataagttagaaaatgtattttacaatatttagctttgagagacatcctaaaatgaagaaatgcacaaaaatgatcatttttacatgcagtagggacagaaaggaaccaccagtaaataaactttgatggaagaacagtttattcctagttaatggatgacttctgtttcattttccaa

SEQ ID NO: 725082 - DNA, 648 bp, Homo sapiens
ccatgcccagctaattttgtattttcagcagagatgaaaatacaaaatttgatcatctttatcaggcttgtctcgaactcctgacctcaggtgatcccccgcctcggcatcccaaagtgttcggaatacaggcatgagccactggtcctggcctatatccttaaacatatattttgctaagactagatttttgtctacatctaacagacatattacaatggagtagcacatgagccatgaccaaaagaagcttagtaatggtacctgaaaggctagctaggttgagtattctatgacaaagtaagccttctaaaacacataatcatggactgcatctagttgtaaatttcagaagtagttggaatctactaacaggcgaaaatgaagtcagaaatgcgcagatgggtaaagcacaggaacagagctggagtgctggagacaaaggtacagacactgctttcagagtcagtccttaygctggataagatgctctgcattttttttccaaaactttctaaccctcatttccctcatcagtaaagtgggggaaaatagtgcttaccttgtgatatttctgcagagattaaaatggggttagtcattcaaaatacttagcatagtgtaagatgtaaaatgaatactagatta

SEQ ID NO: 725083 - DNA, 617 bp, Homo sapiens
cagtgcctggggcctggccactggctcttcacagtggaccccagcacctcggggtggcagagggacggcccccacggcccagcagacatgcgagcttccagagtgcaatctatgtgatgtcttccaacgttaataaatcacacagcctcccaggagggagacgctggggtgcactgggtgcctgatttcctgcagggggacacaggggcacccagtgagggtggggagggccctcaccccagggacacagctgaggtgggtgcacctaactccaagggagctgaggccccactgccaggctcagggggctgtgttagccccagggctcaacaaacaccctgagaaaaggccagccttggrggcagggctgctgtgtgcccattctcccagagaggtcccatcactatgcctgttgtacaggtgagacaagagagagacagagtcacccagaaccaagaggctgggttgggaggacggttgggagggcagacatccgcctctccatgcaaaagaggagaggcctgcgtgggatgtgtgcgtggaggtgggggccactcccagccacaacagtggcctggacagaaaggggatgcaattcagcagagtcttcctggatg

SEQ ID NO: 725084 - DNA, 1000 bp, Homo sapiens
ttgagaatcagaactatagagtgaaggagaaaaaataaaaatcttcctagtgaaagatgtatacgtaatatatctatccaatacacaccacacatgcttgtatacgctcagtctctggaagggtaccaaaggagtactagtagcagctgcctctcttagagagaaagagactaactttattcttcacttatttttaaatatttttattatatagtctctttccagaacaatgtataaaattaaataatcttacatttcaaaggaacatatcctctcacctacacttgtaggaatgtgatctactaaatatgctcccatgcatataaaattatgtattcagttattatttgtgacattgtttgtaatagcaaaaagaataaataactggattcaatgataaaatgctgtgaaatatgtaatcccataaatatwacataaattcatcacatgatacaattttcaaaataaatcatgaggttaaaaaggcaaggtaaaaaacagtgtgcatattttaggcatacacaagaaaatgcacattctcatcaccctcttttatacaaactgacggaagtcgttgattccaaaacagggaaccaagtggtaggaggccaaggcagaagagaggctacatgttcttttgtgcgttgacatttaaccacatgaagatcttacttatttacgttaaaataacacatgcaccctgtgaatgtttgtcctccagtagttctcctgggttactttctcaactagcaaccgaggcctcagaaggcctccttgtgggagcagtcacagccccatgcctatcatgtagaaactgttgtttctgcaaggatatgctccaaggaaacttgacaaagaggccggttatgcctctgaatggcattttgcattgactgcaaagaaatagttatctttcttctttcttctcccagagagattcacggtgttaagtataatggttgaaaacaaataaagaacataattaattccaaaaaatctt

SEQ ID NO: 725085 - DNA, 1446 bp, Homo sapiens
ttgctcttgaaaaactaattgtatctttgttaaatacaagttaaaaatgttaaatacaagttaatatctctgtaaagggtcaaatgtcatttgagggtaggaarcaaaagcaaaagttaaatgaaagtgtatcattgggctgggcatggtggcccacacctgtaatcccagcactttgtgagactgaggtgggaggatcacccgaggtcaggagttcgagaccagcctagccaatatggtgaaaccccatctctactaaaaatacaaaacattagctgggtgtggtggcgtgcacctgtgatcccagctattcgggaggctgaggcaggagagtcacttgaactcgggaggtggaggctgcaatgagccaagaacgcaccactgcactccagcctggaccacagagtgagactccatctcaaaaaaaaaataataataataaataaataaatttgtatcattggtgcctttcatctgctcgagggctacatagctacgttttggtattagaaactgagtacttcagaaatgaggttccgaattttggcatataaacctattctgtcttgttccaacaaaatgaggataggtacagaaaaggaaaaaaaaaacaacactaaatttcaaagtagaggccataatggaaaaaaaaatgtgattacatgggctttcaaggtaaagatttttcatgtaacccatgcaggagaaagtaatcaaccaacaaatattgcacctgcaggcataaagaaaataaaatacaagaaagtgtgcattattttttcaagatcattggaggataaagttactatcaaagggccttagcttaaatgactataaatttggattcccaccacacagatgaaataagaaaagtttctgcatctagagaaagaaccatggaaatatgaggccggctgcaaagatgtgtgtgcatcattaaagaccagcacagtgtagctttcaccacttgagttcatgtgttactgcccagaaggcatcctttgtcatcagactggatcctattgtggtgacatgctattgctctggtcctctgagagtcagaactaagtgacaattcaaatgtgatcacttaaaagccacatgacagataaaagcacacacaggtccatatgggaactctaatttaaaacttaaagtagaaggtatacattaaaaggttggtttggactttttaaatgagagaattcctaatggtcattcctaaaaaatatatttcatcaggcttgctattttagggaaatatcttgtcttgttctaccaaagatttgaaaacaaatgtaattgggatgctggtttcacactgccctaaataggccatatgtaataggcatgaaatagttaaacaacacccaagcctttatttaattaactaagctctgccacaaggaggtgggtactacacagagagaatatttcagtgactga

SEQ ID NO: 725086 - DNA, 630 bp, Homo sapiens
ttctactcttcccaagactaacaatgtttttgaatagtttaagttaaacattaaaatgtacattgattcctggagataattaaatacaaactatttatttaacaaatatttatgaagcggctactatctcatcagatgctatgcaagatgcttcgttttatggaccttgaagtctattttccctggggcaaccttactaaaactgtatgtattaaaaacagatttgattaaaacatatcacctactatgacagtayaggaatggaacactgttttgagaactgagtgaacaaaatgctgtgtctaaagaagagtagctacccagattaaaattcagtcaaatttccagctgcctatctatagctgattggaggtaaatgtctagtcacttctctgcagtagaagagtaattccttgcttcataatgctgagaaatttggatgataataatgtcggtagaggttcattgattgtaaccctggtttgcggatgttgctagtggaagattgcagagtgtgggggagaaggtagatgggaattttttgtactttctccccaatttcaatgtgaatccaaaactgatctaaaataataaagtctcaatatttaaaaatattaataaataacacac

SEQ ID NO: 725087 - DNA, 1792 bp, Homo sapiens
cccattactcccagcgtcaacttcagaatgattttcatcacgcctgcttttgtgcagctaagctgcaaaatgtgcgctgcgacagactgaagcagataaagaacaaatttgcatgttactgggttgcaagagccctttgattgttggagaggcccgataatgctgtcaagagctcggtggactgagcggcggccgagacgcaccagatctgcactaagtgtagctgacagcaaacgatttagagtcagcacggaatcaaagcgttggaaatatctcaagtaaaaatgttaaaaacacaaagaagcctgcatcttgataagaggacatcagtgaggagagatatgcacagaaagaaagaaaatgaccttgagtttataaaaatgctacacgtctcggaattgtaaaatgcctaaaatgaaaagaaaatgggcagctcaaatcagacttcaagctaggaaagcctgaaagttgtgtgcttgccacagttgaagaagagaaaaagaagcaatagctaactgcacggattattatagagattacgcttctgttttcgagaccagtcatttgctcgtacaaatgagcctaatgacttaaagcaccaagacatacatgtctctgctgtgcacacctccttgacatgaaatgcaagactcaaaatacaaaaataattttaggaaggaaaaactgattagtggcaatgatcaagacaaatcttgctatttgaaaaaacaaataaaaatactggaaatgaaaccttaagtagtattattaaataataatatcagggtggggcacggtggctcacgcctatatttccagcacttcgggaggtccaggcaagtggatcacctgaggtcgagagctggagaccagcctggccaacatggcaaaaccccatctctacttaaagtacaaaaattagcatggcatggtggtgtgcacctgtagtcccagctactcaggaggctgaggctggagaatcgctcgaactcaggaggtggagcctgcagtgagtcaagatctcgccgctgcactccagcctgggcaacagagtgagactccatctcaaaaaataataataataatttaaaataataatacatttgccgcattggaaaataggtcttcagcaaagtatgctatatagtgtatcagtagggagtaagctaatggttcttctccaggaaagactgcatcttctgtcagcatttgatgtgattcaaatcagactcttcagtttcttcacttatgtttttccctttcctttctctccataaaaacaatgactatcaccaggtctgtaatcttcttccagagagaaccaccagaaaagaagagcaggtagacatagctggaaaatcgaagccccaattttctgacaaacaaaactagccagaataagcaaataaattacatgtgcaygtgtttctctttagtctttacctgtgtatttccctagaggggaaaggtttataaaaactagaaagaggccatgttttctttatcacttgagtttatcaatcacctaacataaagccaccatgggctcccagttttgaaaagcgaattttccacactaaaggacatcttcagacactgctcaacccacacctgagttcaaatatttatatatagttttaatacattgatccaacatttgttttaaaaaacgttccccaaatttttcttgttgatgacggtttttaatagaaaaaataagtttccccagtttccagctgcaatgtgatcatataaataatatttaactaaattatattctgtgtgtgtttgc

SEQ ID NO: 725088 - DNA, 1792 bp, Homo sapiens
cccattactcccagcgtcaacttcagaatgattttcatcacgcctgcttttgtgcagctaagctgcaaaatgtgcgctgcgacagactgaagcagataaagaacaaatttgcatgttactgggttgcaagagccctttgattgttggagaggcccgataatgctgtcaagagctcggtggactgagcggcggccgagacgcaccagatctgcactaagtgtagctgacagcaaacgatttagagtcagcacggaatcaaagcgttggaaatatctcaagtaaaaatgttaaaaacacaaagaagcctgcatcttgataagaggacatcagtgaggagagatatgcacagaaagaaagaaaatgaccttgagtttataaaaatgctacacgtctcggaattgtaaaatgcctaaaatgaaaagaaaatgggcagctcaaatcagacttcaagctaggaaagcctgaaagttgtgtgcttgccacagttgaagaagagaaaaagaagcaatagctaactgcacggattattatagagattacgcttctgttttcgagaccagtcatttgctcgtacaaatgagcctaatgacttaaagcaccaagacatacatgtctctgctgtgcacacctccttgacatgaaatgcaagactcaaaatacaaaaataattttaggaaggaaaaactgattagtggcaatgatcaagacaaatcttgctatttgaaaaaacaaataaaaatactggaaatgaaaccttaagtagtattattaaataataatatcagggtggggcacggtggctcacgcctatatttccagcacttcgggaggtccaggcaagtggatcacctgaggtcgagagctggagaccagcctggccaacatggcaaaaccccatctctacttaaagtacaaaaattagcatggcatggtggtgtgcacctgtagtcccagctactcaggaggctgaggctggagaatcgctcgaactcaggaggtggagcctgcagtgagtcaagatctcgccgctgcactccagcctgggcaacagagtgagactccatctcaaaaaataataataataatttaaaataataatacatttgccgcattggaaaataggtcttcagcaaagtatgctatatagtgtatcagtagggagtaagctaatggttcttctccaggaaagactgcatcttctgtcagcatttgatgtgattcaaatcagactcttcagtttcttcacttatgtttttccctttcctttctctccataaaaacaatgactatcaccaggtctgtaatcttcttccagagagaaccaccagaaaagaagagcaggtagacatagctggaaaatcgaagccccaattttctgacaaacaaaactagccagaataagcaaataaattacatgtgcacgtgtttctctttagtctttacctgtgtatttccctagaggggaaaggtttataaaaactagaaagaggccatgttttctttatcacttgagtttatcaatcacctaacataaagccaccatgggctcccagttttgaaaagygaattttccacactaaaggacatcttcagacactgctcaacccacacctgagttcaaatatttatatatagttttaatacattgatccaacatttgttttaaaaaacgttccccaaatttttcttgttgatgacggtttttaatagaaaaaataagtttccccagtttccagctgcaatgtgatcatataaataatatttaactaaattatattctgtgtgtgtttgc

SEQ ID NO: 725089 - DNA, 1209 bp, Homo sapiens
tgagcacatttcccctgaggacagagtctcttggcacctttctagcacccgacaggaaggcatgatgagcccatgaccaacttattccccttctgcatcagcttcatatctcattcctccatgaagaagccaacctttttctttcctacctactggatctctatgtgagggcatttcctagagaccagraaagagacaatcttttattttcatggtcagttgcaccatgctacacaggctgtacctcccaggcttaggagaacattactggggtgttcttggggctttgtattggcatagacctcttgtcaagggctaaaggatatcagggcaggttagcttggcccatgaaaccaatccagtgataccactggtcgaggagtcctactgagaaggaactggcttctaacataggccaaggaggtctggaatcctggaactgcatatgttcgctgagctcagatgcttagtttttgggtagcccttttgtaaagaaatatactccacgttgcatagcgctttaggctgggtatgtttaaaccttaccagtagaactgaccatctgtttagtctttatgacagcttggctaccactttcttgtcctctggcaaccccaggaagtaggcagagcagccatgtttaggcttattttagaggtgacattctgagaggcaaaatgactttctcaagagcagtcaaaggaaggacttttgagcccaaagttactggaaatttagggcgtttaccctcgttggattatatattcaagatgatgaaagggaccactagcgtgcttgtgtgcagggggtggtgggagcttcctctaagggagtacatggatgaacctaggggtttgtggaattcacgtgaggaaaactccatgcttatagattttacatcataccataacagctttgccctgggactattttaaagtcttaaaatatgaatggaaatgaggatatagcttatcaaatacactaactatattaaggcaaaagaaatggccatttttgtaggccaaaaatggtaaaatgttaacagtttcttatggttcaacctagtatttcctcccaatctttcagtgtattttggttgattcagttattgccaaggactcattaagcctccaccacatgtgaaatttgctttctaattcccaagacttgggatgtcacaaaaacaagggataggtcactgtgcttaga

SEQ ID NO: 725090 - DNA, 991 bp, Homo sapiens
tttaaattctggtaggagtactgtgctgtagttttctttagtgctatagttggatgtttcgggaagacttttcatcagctaaaattttttaaaaacttttttccttattttttgtagagactaggtctcactatagtgcccaggctgggctcgaactcctgggctcaagtgatcygcccaccttggcctctcaaagggctgggattacagctgtgagccactgtgcccagcccagttgaaatgttttgactatcattttgttttccagctaaagtaactttatatggatgttgcctgccatcttctgttcatcttgaaatattttatttttcctaaaccagatatagttgtgtataggcagaagcaaggaatttagatgacttaactggatttcttagtaaatagtacctaataaagtgtttttttgtttgtttgtttttaattaatgactcctttttgggtgggagaaatgagtatctattttctattctggttcaccaagatccttaatttctactaccccttctctctatcaccaagcctccaggtagatggtgacccttccaaggcaccctctttcctttccccagaagcagtactttcatgagactgcgtctttggtctcattttctttcaagtctcttattttgtctaatggatcttacacctcttctcacttctctatccagggtggggctttctctttctgggaattatctgtattctgctacccctaggtcctgcaacctctcctctttttttacagtctccaccttgcttgccacttctccatggattctgctagactgcagtgttgatttccctgcatgcccatagacattttgctagctattaatgtatgcttacatatcaataaatttgtatgggttttctcttgttaacctactgttagtttagttcagccaactcagttatcaaaccttcagaagcgaaatttaagcttccctgcaaattgctggttattatttaa

SEQ ID NO: 725091 - DNA, 1893 bp, Homo sapiens
cagctagctcattccgtctgagcagttttcactctatcttacccttttttcttgcttggtgggaagctggggactgttaatttgtgtccccggtaggtgggacccaaatccaagaaacagaaattaaagaagaaactgatcagaatgtgaaataaacgctagctccaaatgcagccttctgacttggtgaaatgaaagacctaacttaaagagacagagaagagatctggataacagaagagacttagggatcacttaagcagttaacctcatctaaattgaaaacttttcccattaaatggtaaaataaatctttctttcaaaactaaaatttgaaaattataaataaaagctgttttctactacagaaaatcaaaggaagtaagaggatgaacattgcaatgggcaaaaaaatcttaaacgaattcttgtggccaaatagcaaataaccagttcaaaaactttgcctcttactgacacatgggtggagatctcaacagctggctttcttctccctctctctgcctcttgccttttcttcctacctcttcttcccttagatttctttccttttttccattcttcgccttaaaaaaaaaatctacttcctaccttcatgtatctttcctaatcatgatattgaattaaagcacacttaaagtacattgctcatttatgtctttaattctcatagaatttatttttgaatacagtatggcattaggattctaactttttaaatagataattaaccagagcactatttcttaatatgccattgttttcttcttcatttgtagtgacaataatgattattattgagagcttgctatgggcaaagcagtgttttgagaggtttgcctgtatttaaattcctggttgtgtttcttgaataaaggtcttcctcattttggccaggcacagtagctcgtgcctgtaatcccagcactttgaaaatgccaaggcagaaggatcacttgaggccaggagcttgagaacagccttggcaaggtagcaagaccccggtctctaaaaaaaaaaaaaaaaaaattagctggctttggtggcatgcacctatagtcccagtgacttgagaggaccacttgaggttgggagttcaaggctgcagtgagccactgcactccagcctggtcaactgaacaagcctcttgtctctacattttaaaaagaagaagttatcctcattattaggcatttagaagtgaactcattaattcttttcttctattagcatagtaaaaaataaaaaataaatagctttttcacttgggtccccaatattttgtctctctgggaattaagactctctcataaaaacaagtgccctgccttccacttgaagactggaagaggagttagtgagaccaagaaattccacttttccatttctcaccagggatattacttataggtgtctttcaggttgcagaaaagatggaaaaaaggacatgtgcactctgccccaaagatgtcgaatataatgtcctrtactttgcacaatcagagaatatagctgctcatgagaattgtttggtaagttacttgaaaacatacttcaaagtacatgagtacttttagtgtaggacacataagaatagataaacaacactttggacacaaagaataacaagttggccatggtttgagcttttaggtgaagattggggagcatttctttttttttttttttttttttttgagacggagtttcactctgtcacccaggctggagtgtggtggcgcaatcttgaatcactgcaagctccgcttcccgggttcacgccattctcctgcctcagcctcccgagtagctgggactacaggtgcccgccaccatgccaggctaattttttttgtatttttagtagagat

SEQ ID NO: 725092 - DNA, 891 bp, Homo sapiens
tgcctgtggatggttcaacttttttaacgttcagaagctgtttagtatttgtgtgcctaacacagcgcatggcacacagtagtcactgggtaaatcctttttaaaaatgcttgatacaggaagactcatttttacatggactggttttaaacttttggtgattactgacactttcaaaagatttctaattattaatttaaggaatttttctacttctcaaatgttcatttagtttagcaattctttttctaaatgggattttacagacacatcaaagttaaaacaatgtttctaagattttgtttttacatgatagaacattgtgtctcctcagaatgttgagttgyatgtttttcccaaataaaatagtcctttttgcatcactaaggcaatgcttgtctactctgaattttaactcaatcaatcataatacttatgctaattactcagagagcaaagacagtttgataaacttctttattatttcatttttaggctctatataattcttcctgttttccctttatccacttagccaaatgcccagtagtcattttatacttggaaggtttcaggtaccctctcgaattcttctaattacttttctcttagttttttttttttttaactaggtctttaaatatatgtgtgactctatacttagtccttcagctcctccatcaacagatgattccccagttattttctttgtgacaaaatacatgtgtttcatccttagaaaccaacaagtgtactttccttcatacatgaacctatttacaatttgtcattgaattgcagtggtttaaatgggcacacatttgattttactgcatttgagaacatacttattttttgtaacatctgagtgctccttaaaatagagaatga

SEQ ID NO: 725093 - DNA, 657 bp, Homo sapiens
tttttgtatttttagtagagacggggtttcaccgttttagccaggatggtctcgatctcctgacctcgtgatcygcccgcctcggcctcccaaagtgctgggattacaggtgtgagccaccgcgccttatattagcttttataatggagaggtaactgtcctagaaagtccatgtaaattccagttcagataatgaacaattacttattctatgaagacatttatatttcctggactgtacctttcacatctttccctatgtgaatgggttccctgaagaactttttctgcctgctgagcacttatttggaggtaagtctaacaatgagatgatatccaaacttatcactagactactgaacgatattctattttccctaatggataccaatgcttattccagaattatattctatagttttaaattttcatgctttcaaaagtatctgacatttagctgtgaaattttctgctgccaaagaccttgtcatatgatccacggacagatacacagctaggctttttaaattttgtattaattctgttattcaacacacatctaataaataactgctgtgatccaggaacagcattagacaataggaaattttttttaagataaaaaaaattgtctttggtttaaaatattccattaaa

SEQ ID NO: 725094 - DNA, 657 bp, Homo sapiens
tttttgtatttttagtagagacggggtttcaccgttttagccaggatggtctcgatctcctgacctcgtgatccgcccgcctcggcctcccaaagtgctgrgattacaggtgtgagccaccgcgccttatattagcttttataatggagaggtaactgtcctagaaagtccatgtaaattccagttcagataatgaacaattacttattctatgaagacatttatatttcctggactgtacctttcacatctttccctatgtgaatgggttccctgaagaactttttctgcctgctgagcacttatttggaggtaagtctaacaatgagatgatatccaaacttatcactagactactgaacgatattctattttccctaatggataccaatgcttattccagaattatattctatagttttaaattttcatgctttcaaaagtatctgacatttagctgtgaaattttctgctgccaaagaccttgtcatatgatccacggacagatacacagctaggctttttaaattttgtattaattctgttattcaacacacatctaataaataactgctgtgatccaggaacagcattagacaataggaaattttttttaagataaaaaaaattgtctttggtttaaaatattccattaaa

SEQ ID NO: 725095 - DNA, 592 bp, Homo sapiens
ggctgaggtgggaggatcgcttgagcctgggaggtggaggttgtagtgagctgagattgtatcactgcactccagcctgggagacagtgagaccctgtctcaaaaaaaaaaaaaaagttgtwttatttaatctaggggtgtgtggttcaatcaatgtgacctttcaggccctctgaagtctaaaatgatacaatgatgtgaccgtatgacatgactgtataataatatgatattatatgagtgtgaccatatgccagcaactcaggacatagatatggattatgtctctactgggattgaatcagaagtttttttgttgttgttgttttgagacggaatctcactttgtcacccaagctggagtgcagtggggcgatctcggctcattgcagcctctgcctccccagctcaagcgattctcctgcttcagctgcctgagtagctgggattacaggcatgtgcaccaccatgccctgctaatttttaaaaaatatttttagtagagacagggtttcaccatgttggccaggctggtcttgaactcctgacctcaagcgatccacctgtctcggcctcccaaagtgctgggatt

SEQ ID NO: 725096 - DNA, 762 bp, Homo sapiens
ttccttgagggaatttgaataaagtcatgttggaattctgccattacatacaatgcatttctttaaaaagcatcttaaaggaagaaatgtattgatatttactttccagatgataatttgtgctaattctaatattattgtggggaaaatatgtaactactctattttctctaagtaaccacattggcagttaatataaatgttcttttaaaaaactgtattaacaagaaacaccgtgttctacggtatctagtagtttctacgtgcacgtatttcaaatattcttctttattcacagaccataaaattgcatgtatcatttgcaaytgaattttttcagaagtcccctcaaagggaatagggaaaggtaaaaatgcattgaataatttttttaagttggctttattccagaatacagagaatataactcctgcctctgtcagtaactggctggatttgtaaggatgataaatcattcttggatttttcatccaaagttccttctctttggtttcttcctctctgctttacttttggcttataaatttggatcctcccatcttccaaaaccaaactgacgatcacttgtgaaaataactaccttcatgcctagtctttcctaacacacagggactaaatctataatagtatgcctatacagcacttgaaatggggctaactcacattgaggtttgctgtcagtgtaatgattcacactgtgttttaaagattttgtacaaaaaagggaaaatatttcagttt

SEQ ID NO: 725097 - DNA, 762 bp, Homo sapiens
ttccttgagggaatttgaataaagtcatgttggaattctgccattacatacaatgcatttctttaaaaagcatcttaaaggaagaaatgtattgatatttactttccagatgataatttgtgctaattctaatattattgtggggaaaatatgtaactactctattttctctaagtaaccacattggcagttaatataaatgttcttttaaaaaactgtattaacaagaaacaccgtgttctacggtatctagtagtttctacgtgcacgtatttcaaatattcttctttattcacagaccataaaattgcatgtatcatttgcaactgaattttttcagaagtcccctcaaagggaatagggaaaggtaaaaatgcattgaataatttttttaagttggctttattccagaatacagagaatataactcctgcctctgtcagtaactggctggatttgtaaggatgataaatcattcttggatttttcatccaaagttccttctctttggtttcttcctctctgctttacttttggcttataaatttggatcctcccatcttccaaaaccaaactgacgatcacttgtgaaaataactacyttcatgcctagtctttcctaacacacagggactaaatctataatagtatgcctatacagcacttgaaatggggctaactcacattgaggtttgctgtcagtgtaatgattcacactgtgttttaaagattttgtacaaaaaagggaaaatatttcagttt

SEQ ID NO: 725098 - DNA, 1274 bp, Homo sapiens
tattacaaagatgagactggctgaggctgagagatttgcaagcagtggtatgtcattatccccagctcagttttttgtgtaattggtgtgaagagattgctgctgatgaatcagcctgctgctcaacagaaaataatgattcttttgtgacgtgagtcagtgtacgtacgtgtacgtttgtggttgtttatgaaaggtatgtgtgtacataaaatgcttatcaagatggataatgtcattttaaagtggtaaataataaaaaatagtcctgagcaaaactgattttacaattgcctgagaatgcagcacttcattttaacactatgcaatggctagaaattgattttttttttttwaatccaattaagcctcaaggttggttatccatttaaaaggtcggatgagttaaacaatgacagtaccttcagttcgtgctaataaatttgcacagaacttcagcacttacatcgtgtgcctcacagaggcatacattttgtatgtgcacaacactgaactaccaaagtcccagcagtggtacagatacaccagcagaccctggaccccaactgggggagtccctgagctgaccgccggccctatcacctcttccacttagatccccgaagcaccccccaccccagagtgctgagtccttccatctacctggcccccttttctgtggccccaagagcactgggagatgaaaagttgcctctcatttaaaaggggggaaaaagatgtattcactacttggttttgtgtgctgctgagtttataatgtaacaaataaatcctgttttaaaaatagtactttatagtgtgtatttactgtgtattcatagtgcattaagaaaaagacttcggccgggcacagtggctcatgcctgtaatcccagcactttgggaggcagaggcaggcggatcacgaggtcaggagatcgagaccatcctggctaacgtggtgaaaccctgtctctactaaaaatacaaaaaattagccaggcatggtggcgggcgcctgtagtcccagctactaaggaggctgaggcaggagaatggcgtgaaccagggaggtggagattgcaacactgcactccagcctgggcgacagagccagactccgtctccaaaaaaaaaaaaaaaaaaaaaaagaaaagaaagaaaaagacttcggctgggtgcaatggctcacacctgtaatcccagcactttgggaggctgagatgggcagatcacctgaggtcaggagttcgagaccagccttcccaacatgg

SEQ ID NO: 725099 - DNA, 1170 bp, Homo sapiens
ttgcctcctcaaggagcccttttctccctattcctgttaaattgcatcctctcagccttcttctccttcctgctatattgatctccatggcactcatcaccctctaataaactataacgtttccttattatttgggttacttctttcttctctttattagaatataaactctgtgagagcagtaatgtttgtctgtttgctcagtgatgtagtcttggcccctagaaagtgcctggcatagagtaggtactccatagacacatatggaatgaaacaaacatgaagtgaggtggagaatcctgggggtgagggagaggaaagcctggtggacaggtgtcaggggaagtttgctggaggaggtaacagttaagtttggcccagaaggataagaataggctcattggctgaaggtgtggcagaaagggtatcccagatggaggggacatctgtgtacagaacttgccacacacgagaaacttaaaggagaccaatgtggagtggtaggaatgggggtggggtagtgacacaagatgagactggagagatggcaggagtgacattgtacaaagaaagatgtggctctttgtaagagctatgtcataggaaggaggaaagcatttgccagtttcctaatagagcaaaacatcaagctttcttctatgcccaagtgtacccaagacccctaaaaggtttgcctggagaggaggcacagtgactctacgtcatccaagatcccctagaaatgcatactcaacttgatcacttaaatattcaaataacatttcccaattatcttctcttttgagacagagtcttgctctgtcgcctaggctggagtgcagtggtgtgatctcggctcattgcaactgctgcttcctgggtycaaatgattctcctgcttcagcctcccgagtagctgggattacaggcgcccaccatcatgcccagctaatttttgtatttttagtagagatggggtttcaccatgttggccaggctagtctcgaactcctaacctcaagtgatccacccacctcgacctcccaaagtgctgggattacaggcgtgagccaccacgcccagccaaataaacagaatttcaagccacgtattttacaagttaaaaatcccaactggcaaagaaactctcagttctttttatcccctagc

SEQ ID NO: 725100 - DNA, 652 bp, Homo sapiens
gaaaaaaatggttttatcaccctcagttataaatgattataattggcaactcaattttctcaaagtaaatttcaagggaacattgtttgagtgtatttcaagtttgaccaaatgctggttttgtttttgaaatggtcatttccaaaattcaactattttaacaaatattcagacaatgttactcttagaaaacaattaaagacacaatttcacttcttaatcatttctttggacttttaaagtagacatttctaattgaaaaaccttaaaagcataagctacaagttagattaatttcctttctcatcacaaatgccataatccttcagtcatttataactttttcctggcacagctgccctaaagcatttatatgatcttttcccaactcctggccaagtttctgtggagytgctttccaggaattactggaattaaaaccgtattttttttttttttttttgctggtttcttttttttcttcagtaaattctctcttttttttctctcacactctattggatgtgctggctaaaatctcagtgatatttttaaaagaaaaaaccttttatttcccatgttttgggcaatcataaagcttcaagaataaaagctatatgaaagtaatatatttcaaaactttttataagga

SEQ ID NO: 725101 - DNA, 652 bp, Homo sapiens
gaaaaaaatggttttatcaccctcagttataaatgattataattggcaactcaattttctcaaagtaaatttcaagggaacattgtttgagtgtatttcaagtttgaccaaatgctggttttgtttttgaaatggtcatttccaaaattcaactattttaacaaatattcagacaatgttactcttagaaaacaattaaagacacaatttcacttcttaatcatttctttggacttttaaagtagacatttctaattgaaaaaccttaaaagcataagctacaagttagattaatttcctttctcatcacaaatgccataatccttcagtcatttataactttttcctggcacagctgccctaaagcatttatatgatcttttcccaactcctggccaagtttctgtggagttgctttccaggaattactrgaattaaaaccgtattttttttttttttttttgctggtttcttttttttcttcagtaaattctctcttttttttctctcacactctattggatgtgctggctaaaatctcagtgatatttttaaaagaaaaaaccttttatttcccatgttttgggcaatcataaagcttcaagaataaaagctatatgaaagtaatatatttcaaaactttttataagga

SEQ ID NO: 725102 - DNA, 1610 bp, Homo sapiens
ctttggctttatcggagcctccgactttggtacacttcattccaaagagcgcaaatatggaaccaaagaagcccaggctgacagcagcgatcataagtcctctacatgcctgtatataacctgcaattagagtaggtcatttacgttacataaagcatgtggctgtccagggagaaatcctcattttacgttgtcattctggatgtttgttttccaaaaagataactgtgatggtgaaaacatgtggcaagacaagcaagaaaggaaagcaagttaatctacagggagtgcctattctaggtcacacactgtgaagtgcggtttatggggaatcctcaggatagatctgagtgttatttccatattcaccagtgaggaaactgaggcacacaaaggttatgtgacttaccagaggtgagttagaaagtggcagacatggattccatcccaaatcagactacraattccatatagtgaaattccacagtgaaaggtgcctttcactgtgaaaaaacatcatctgccaccatcacaactctgtagctcctccgctcattggactttaaaagggtgttttaatggttttgacattatcaaatgataagatttataactgggtggcagaaagagatccaaagggtcaaaccttccaatattagtggacgcttattaatagcagactaactggaatatcatcatgaaccatggggggtctaagggaatactttagtgaagtactattgttttcagggtgtatataataaaactgggttttaaaaagcactattttgtagaagagtaatttatagtgattaagtcaactgttcttttataaatgaatgcctttaaagtaccctaacgagtatgttctgtcagttcgtttgttcatccttcctgtgctattcatgttcttagtcatgtatttttatttgcacagccagggtacacggtaaacttcagtgtggcttttgtccaggtttttacattaacagggtttaaactaataagcttttaccacataagccattttcatttcagcctgaaacaatgccatatttcgatctaaaatagtgatagtagcacataccgggtgtaagtaagtatctgctaagcaaataaacatatatacctacatcaggtttacgtttggaattaaactttttaactggaaaaaacctcttatgtgtcaatatatgataagtcatttattattggtgttcaagcagagccatgataaataataattccgagaccatgataatcatgaatttagggagtacatactagtggcctccagttcagtttctttttttcttttctttttttaacacaggatctcacttttgccacccaggctggagggaagtggcataatcatagctcactgcagcctcaaattcctgggttcaagagatcctcctgccttagccttctgagtagctgaaaccataggcgcttgcccccacctatggctaatttttaaatttttatagagacagtgtctcgctgtaatgcccagattagtctcgaattcctggcctcaagcgatcctcttgccttggcctcccaaaatgctgggcttaaaggcatgagccactgcacctggcccc

SEQ ID NO: 725103 - DNA, 668 bp, Homo sapiens
taggactataggcgtgcaccaccacacctaattttttcattttttaatttgtagatatggggtgttgctatgttgcccaggctggtcttgaactcctgacctcaggggatcttcccaccttggcctcccaaagcgccggggtttttttcttaatgtcgcataatcaaatttttaaaaaataacagattttttttattttctgaatattctttttcttgctgttgaatcaaattaaaaggtractgataagagagcaggtagctgacattgagactgaaaatatgcctgaagagaaacattcaggggtactatgaagagtgcttggcatggagatcacaagtttatcagaaacatttaaaagaaaattgggttactttggttctgctcctggacagttgggtgattatagttactttccaccatttttcagtacctatttgtaacaggtaaaaagcagtgacacacatttctttctttcttttttttttttgagacagagtctcgctctgtcacccaggctgtagtgcagtggcgccatctcggctcacttcaagctccgcctcccaggttcacgctattctcctgcctcagcctccggagtagctgggactacaggcgcctgccaccatgcccggagtgacgtacatttctattctacatgatacatc

SEQ ID NO: 725104 - DNA, 962 bp, Homo sapiens
taggtttcactatgttgctcaggctgaactcaaactcctggactgaagcaatccatccacctcagcctaccaaagtgctgggattatagtcatgagccaccatacccagccaggttgtagcttttaaaatattgatttaaagctttctaagatgagagccagggccttaactttgagagcctgaggcagtaggattgtttgaggtcatgagttcaagaccagcctggacaacatagcaagactgcatctgtacaaaaaatgtaaaaattagcctggcatggtggcaacgtgcctgtagtcctggttcctcaggaggttgagatagataacaggatcacttgaatccaggagtttatatttacagtgagctagsaatatgccactgcactccagcctgggcaaccgagctaaaccctgttcctaaaaaataataaataattaaaaagctctcttaagatgcatagtaatgttctcgaggattctcagtagtctgtaatttgtatacagcaagttgtaaatgatacagagacaaatatctcccctgtaccttttgttaagtttttctccaaagtgaaaattagagaagggtggctaggtgacttcacctgattagaagccaggtgacttcatttccacagatgtcattggtatacatgacagtctccataagctgaggagtgcagcctccatgctagaatagttcctatttctcagttactcttagtgaattgtgtagggcaggaaaaaaaatggtttcctctgtcttcttaggtactgtagctggggcctgtgaatcacactgataaaagatagattctttttttctctttttttgaggtggagtcttgctctattgcccaggctgtagtgcagtcacgcaatctcagctcactgcaacctctgcctcccgggttcaagtgattctcctgcctcagcctcctgagtagctgggattacaggca

SEQ ID NO: 725105 - DNA, 962 bp, Homo sapiens
taggtttcactatgttgctcaggctgaactcaaactcctggactgaagcaatccatccacctcagcctaccaaagtgctgggattatagtcatgagccaccatacccagccaggttgtagcttttaaaatattgatttaaagctttctaagatgagagccagggccttaactttgagagcctgaggcagtaggattgtttgaggtcatgagttcaagaccagcctggacaacatagcaagactgcatctgtacaaaaaatgtaaaaattagcctggcatggtggcaacgtgcctgtagtcctggttcctcaggaggttgagatagataacaggatcacttgaatccaggagtttatatttacagtgagctaggaatatgccactgcactccagcctgggcaaccgagctaaaccctgttcctaaaaaawaataaataattaaaaagctctcttaagatgcatagtaatgttctcgaggattctcagtagtctgtaatttgtatacagcaagttgtaaatgatacagagacaaatatctcccctgtaccttttgttaagtttttctccaaagtgaaaattagagaagggtggctaggtgacttcacctgattagaagccaggtgacttcatttccacagatgtcattggtatacatgacagtctccataagctgaggagtgcagcctccatgctagaatagttcctatttctcagttactcttagtgaattgtgtagggcaggaaaaaaaatggtttcctctgtcttcttaggtactgtagctggggcctgtgaatcacactgataaaagatagattctttttttctctttttttgaggtggagtcttgctctattgcccaggctgtagtgcagtcacgcaatctcagctcactgcaacctctgcctcccgggttcaagtgattctcctgcctcagcctcctgagtagctgggattacaggca

SEQ ID NO: 725106 - DNA, 962 bp, Homo sapiens
taggtttcactatgttgctcaggctgaactcaaactcctggactgaagcaatccatccacctcagcctaccaaagtgctgggattatagtcatgagccaccatacccagccaggttgtagcttttaaaatattgatttaaagctttctaagatgagagccagggccttaactttgagagcctgaggcagtaggattgtttgaggtcatgagttcaagaccagcctggacaacatagcaagactgcatctgtacaaaaaatgtaaaaattagcctggcatggtggcaacgtgcctgtagtcctggttcctcaggaggttgagatagataacaggatcacttgaatccaggagtttatatttacagtgagctaggaatatgccactgcactccagcctgggcaaccgagctaaaccctgttcctaaaaaataataaataattaaaaagctctcttaagatgcatagtaatgttctcgaggattctcagtagtctgtaatttgtatacagcaagttgtaaatgatacagagacaaatatctcccctgtaycttttgttaagtttttctccaaagtgaaaattagagaagggtggctaggtgacttcacctgattagaagccaggtgacttcatttccacagatgtcattggtatacatgacagtctccataagctgaggagtgcagcctccatgctagaatagttcctatttctcagttactcttagtgaattgtgtagggcaggaaaaaaaatggtttcctctgtcttcttaggtactgtagctggggcctgtgaatcacactgataaaagatagattctttttttctctttttttgaggtggagtcttgctctattgcccaggctgtagtgcagtcacgcaatctcagctcactgcaacctctgcctcccgggttcaagtgattctcctgcctcagcctcctgagtagctgggattacaggca

SEQ ID NO: 725107 - DNA, 962 bp, Homo sapiens
taggtttcactatgttgctcaggctgaactcaaactcctggactgaagcaatccatccacctcagcctaccaaagtgctgggattatagtcatgagccaccatacccagccaggttgtagcttttaaaatattgatttaaagctttctaagatgagagccagggccttaactttgagagcctgaggcagtaggattgtttgaggtcatgagttcaagaccagcctggacaacatagcaagactgcatctgtacaaaaaatgtaaaaattagcctggcatggtggcaacgtgcctgtagtcctggttcctcaggaggttgagatagataacaggatcacttgaatccaggagtttatatttacagtgagctaggaatatgccactgcactccagcctgggcaaccgagctaaaccctgttcctaaaaaataataaataattaaaaagctctcttaagatgcatagtaatgttctcgaggattctcagtagtctgtaatttgtatacagcaagttgtaaatgatacagagacaaatatctcccctgtaccttttkttaagtttttctccaaagtgaaaattagagaagggtggctaggtgacttcacctgattagaagccaggtgacttcatttccacagatgtcattggtatacatgacagtctccataagctgaggagtgcagcctccatgctagaatagttcctatttctcagttactcttagtgaattgtgtagggcaggaaaaaaaatggtttcctctgtcttcttaggtactgtagctggggcctgtgaatcacactgataaaagatagattctttttttctctttttttgaggtggagtcttgctctattgcccaggctgtagtgcagtcacgcaatctcagctcactgcaacctctgcctcccgggttcaagtgattctcctgcctcagcctcctgagtagctgggattacaggca

SEQ ID NO: 725108 - DNA, 962 bp, Homo sapiens
taggtttcactatgttgctcaggctgaactcaaactcctggactgaagcaatccatccacctcagcctaccaaagtgctgggattatagtcatgagccaccatacccagccaggttgtagcttttaaaatattgatttaaagctttctaagatgagagccagggccttaactttgagagcctgaggcagtaggattgtttgaggtcatgagttcaagaccagcctggacaacatagcaagactgcatctgtacaaaaaatgtaaaaattagcctggcatggtggcaacgtgcctgtagtcctggttcctcaggaggttgagatagataacaggatcacttgaatccaggagtttatatttacagtgagctaggaatatgccactgcactccagcctgggcaaccgagctaaaccctgttcctaaaaaataataaataattaaaaagctctcttaagatgcatagtaatgttctcgaggattctcagtagtctgtaatttgtatacagcaagttgtaaatgatacagagacaaatatctcccctgtaccttttgttaagtttttctccaaagtgaaaattagagaagggtggctaggtgacttcacctgattagaagccaggtgacttcatttccacagatgtcattggtatacatgacagtctccataagctgaggagtgcagcctccatgctagaatagttcctatttctcagttactcttagtgaattgtgtagggcasgaaaaaaaatggtttcctctgtcttcttaggtactgtagctggggcctgtgaatcacactgataaaagatagattctttttttctctttttttgaggtggagtcttgctctattgcccaggctgtagtgcagtcacgcaatctcagctcactgcaacctctgcctcccgggttcaagtgattctcctgcctcagcctcctgagtagctgggattacaggca

SEQ ID NO: 725109 - DNA, 2106 bp, Homo sapiens
cttttcagaattaaagtatacatttactacacttttgatattgtttagtttcttcactcttttcctttgcaatttacttgttaaatttctagtgacattttaagtgcatggtttcatttaaaagctgagccagctctaatgagcagtgtgcccaaagattgctcaatgtttatactgcattgcttttgatttctcatgcatttccatttgattacttcttagtattttcatctctcagtcccctatctagtcctgcattatgtccacagtttcttcaagagatttttacatatgaattatagttacattatatatcttatttaattagttataatacctgtatcttttataaatccctttctgattatttctttattgtgactttggtatttctcattaatatatgtaataatcattgttgataaccagacatgttgggtttgacagttgatactggcttatttcattttatccattttctgcctgtatttgaccacactttatctttgccaggcaattattgtggaaatgtccgtgaatcttctcacagctacatttgacatttacttttgcagtggacatcagagttgaagtctgttctgtgtccaccagagacttcagatgctccagtgataccttgtttttctttcctgcttggctttgtctcatcacctgttccctcctccagagaatctctttcagctccttcaggtgggttaaaatgttatatttaactgacaatagtgaaattggttgaaggcaatagaataaagggagattttgcgacttttcctgggtccatattgtgatcctgagtctgggtgtgagctttccagtgtttctgaacttcctccagatgagatgttggtctgcgtgttcttgctcttttcctgggtagagtcctcttgttttccccagttgttccctcccacagctccagtgttctcttttggtgttatcaccttccagatttgatgacctgaggttcaaattaaggctctgattaaataagaaggcagcaaaggccgggcaaaaagccgccgcaacaaaaagctgcgctgacaggcggaaaaagccgtggcggcggagccaaaaagccggggcggcaaaaagccacggtggcgggcgcaaacagccgcaaaaagccgcggtggtgggggcaaaatcagtgggagcaggggcaaaaaaacacaaaaagccgcggcggcgggggcaaaaagccaaagcggcgggggcaaaaagccgcggcgggcaaataaccgcggcaccggaggggggcaaaaagccgcagcrggcggcaaaaacccgtggcgggcataaacccgaggcggcgggggagcaaaaagccgcggcgccgggggggcaaaaagccgccgcgacggagggcaaaatagtggagatggggtagaaggccggcacagcttggctttgctggagtgtgatgtgataggaaatgtgcagccaaagacaaaagaagatgtaagtaggcttgactcattgcagctaagaacccagatgttaccttgagggtattaactaataagcagtttaaatcagaatggcacattctgatttgttttttgtatgttcacatttggcaggcatagatactgtttgaaaagagaaaagtcagtacatagaggtaacaagcttaaatatgtgccaagtctagaaacaagagactagggggataaggacctttcgaaataaaatgcaagatttgaaaactgattggctgggggatgaggcaaaggcaggtctttaaggtcaatccctgttttgctttaagttgttagcgggtggttttatcatatattgtagaatatgtcatttcagttttgaacatcttgagttaaattgtcctaacatatcttacgaatttgattttcttccctgggaagctaatatttcaaaaacttaaagagtatagatttccaactggtatccaatttataaaactatctctaggctgctgatttcaggaggaggctcatgaatattctctttgcagagaatatatcaggagttaacatcagcttcaatatttgtggacgaccagttaactaagccacctcttagtgtatttagatgggaaatcttagctga

SEQ ID NO: 725110 - DNA, 2106 bp, Homo sapiens
cttttcagaattaaagtatacatttactacacttttgatattgtttagtttcttcactcttttcctttgcaatttacttgttaaatttctagtgacattttaagtgcatggtttcatttaaaagctgagccagctctaatgagcagtgtgcccaaagattgctcaatgtttatactgcattgcttttgatttctcatgcatttccatttgattacttcttagtattttcatctctcagtcccctatctagtcctgcattatgtccacagtttcttcaagagatttttacatatgaattatagttacattatatatcttatttaattagttataatacctgtatcttttataaatccctttctgattatttctttattgtgactttggtatttctcattaatatatgtaataatcattgttgataaccagacatgttgggtttgacagttgatactggcttatttcattttatccattttctgcctgtatttgaccacactttatctttgccaggcaattattgtggaaatgtccgtgaatcttctcacagctacatttgacatttacttttgcagtggacatcagagttgaagtctgttctgtgtccaccagagacttcagatgctccagtgataccttgtttttctttcctgcttggctttgtctcatcacctgttccctcctccagagaatctctttcagctccttcaggtgggttaaaatgttatatttaactgacaatagtgaaattggttgaaggcaatagaataaagggagattttgcgacttttcctgggtccatattgtgatcctgagtctgggtgtgagctttccagtgtttctgaacttcctccagatgagatgttggtctgcgtgttcttgctcttttcctgggtagagtcctcttgttttccccagttgttccctcccacagctccagtgttctcttttggtgttatcaccttccagatttgatgacctgaggttcaaattaaggctctgattaaataagaaggcagcaaaggccgggcaaaaagccgccgcaacaaaaagctgcgctgacaggcggaaaaagccgtggcggcggagccaaaaagccggggcggcaaaaagccacggtggcgggcgcaaacagccgcaaaaagccgcggtggtgggggcaaaatcagtgggagcaggggcaaaaaaacacaaaaagccgcggcggcgggggcaaaaagccaaagcggcgggggcaaaaagccgcggcgggcaaataaccgcggcaccggaggggggcaaaaagccgcagcgggcggcaaaaaccygtggcgggcataaacccgaggcggcgggggagcaaaaagccgcggcgccgggggggcaaaaagccgccgcgacggagggcaaaatagtggagatggggtagaaggccggcacagcttggctttgctggagtgtgatgtgataggaaatgtgcagccaaagacaaaagaagatgtaagtaggcttgactcattgcagctaagaacccagatgttaccttgagggtattaactaataagcagtttaaatcagaatggcacattctgatttgttttttgtatgttcacatttggcaggcatagatactgtttgaaaagagaaaagtcagtacatagaggtaacaagcttaaatatgtgccaagtctagaaacaagagactagggggataaggacctttcgaaataaaatgcaagatttgaaaactgattggctgggggatgaggcaaaggcaggtctttaaggtcaatccctgttttgctttaagttgttagcgggtggttttatcatatattgtagaatatgtcatttcagttttgaacatcttgagttaaattgtcctaacatatcttacgaatttgattttcttccctgggaagctaatatttcaaaaacttaaagagtatagatttccaactggtatccaatttataaaactatctctaggctgctgatttcaggaggaggctcatgaatattctctttgcagagaatatatcaggagttaacatcagcttcaatatttgtggacgaccagttaactaagccacctcttagtgtatttagatgggaaatcttagctga

SEQ ID NO: 725111 - DNA, 1899 bp, Homo sapiens
tttttattccttttctttcatttgttctcctttctttcttttttctttttacttctcctagacaggcaaattcaaagagcatcagtagctaacaagttcccaaatactctacaagtagtcagtactaatgattacactaccaagattccagtgatttagtggttcattgctaatctcactcttacactctctacatggcttagttccatcccatgacttgagttactctttcatccaatgacagcaccactcactgcattatgttgccaattacagcagaattttatagctgagataaaagccaaaactttctagtttagatctcaaattttcctagtccacaattgtggttctgagagagtaaaaaaagtttgaaggtggaatgagaatacattttgatgatttcaatgtctgaagtgatgaagttttgaagctctgttgtgtctcctactatctgtgacactccggatgtgtttctaaagttctctaaacctcagtgactctatgcgaataaaagaaaatcatggaggggggataaagtatctgacacacgatggatcagcaaatgtgtggctattataatttttaatcgaaagggctatgttcctatgaagtgacagaattgtgataattcaggcttcttgactttttagtacataattctttcattattccatattctctcatatttgtctggaagtagggaatcctgtaataatgtacacttgsaattgccaaatgagaggtgtagttttggttcacggcaagcctcaaaaatactagcatataaaaatattttaatatgtttattagggaacgccaacagatacagattttaaaaatgtgaagacagcttacaaagtaacatataaaaatatggggaaaatattataatttatttcaatactgcagatttgaaaatactttgtgaataatgtttgcactaagaagaatttctttaaattagcaactggattttcttgcatttttaaagcagtatttccttaagaaaaaagcaggcttagtttctctgtgacacagaaaattcctatcattttcactttgttccaaaattatattaatggagtttttgtcatgggaataaattaaaatggggcataccgcatgtggaacgtgatggtatttctgcagcatgcgatttacaagaaaacaatctcatttagatcatatcactgaccgcgtggccgacacgggggaccacctggggcccatgtggaacctctccacgcaaatgggttcattcagtaagaaacatgtgatttttaagagatttcatttagaattcttcagaacaagtttatgaaaggatcacttatatttagattagaatgggctatttcttgcagctgtgcaaatttcacattgtatttaagtcctggagatttctgacagaaacgtaagttgaatgacagtgacagagaaagaggcaccttagcaaaaagagccgaaatcatgacctttacatttaaaaatatctaagttttaggaccttcctgcataaccctgctgctcttagatgtgtgactttccaatataaagaataaaatataccattatataaagctttcatgatcgtgcccttttatcatcaattttaatctacttgtaaactaacaagagcaataagaatgtatctaaaaacaaatcacagaatcaaacaaaccaaattcagatacaataatatgctggcaatattaaaatatcagaattggcatcgaagtatttatttatttttaaggaacttataaatgtaaaaagagtaggacatacatttttgaaatgtttctaggatttggaagattgctttagtttttattgtaggcactttcccatagcaattcaaattgtgctctaaatctacatacatcaaaccaaaac

SEQ ID NO: 725112 - DNA, 946 bp, Homo sapiens
tctagatgtattatcttctagggctgtttcatcacataactaatctcatcaatatcatgatagaaaggagagtggttttggcaaggaaattactgaagtagttcaaataatccatcccataatttcatttgagtaagaaataaagataatcctttaggagtaaagaggtgaaattgcaactttgtccccaggttctgtaactaggccttcccttatctttccatgtcatgactataggtctatcttatgttccatccaaataaaatttaaaaaataatatatgaaagtyttcattataagcaccccatggttacaaaatacatataaccattataagcagtaagtagctttaccttctaaagcatatataatgatgaaaatttatttcttcaaacaccttgcacaatttgtataattcaatgctacttaagtatctaagatacaaatacagctccacaactggtatgtcacatgctatgaactttttaaaagttgacagctataactttcagtgaataaagtagaaacaaagtatgaatgaaaactgatgcttcaatgaataaggtatgcttttacaacggtactgcctaaaaaatttctaaacataaccacatcctgacaataaaggcaactgaaaagaagaaaacctatttctttctaatttattgttatattttcctaaagaaacatccatatcctacataaaattttctcaccagtgtaaggaaacaatttttttttattttagttgaaccagtacatgatgtgattccagaaaacacagaaacaggaaatctaataaaactaaagacttattcatcttcctgagttactgttggagaataacaagatcagacataaattcctgtccacatacatatcttcagaagaataatcacaaaaagggcaatcatttggtattcgcttttaagctaacagtacaata

SEQ ID NO: 725113 - DNA, 453 bp, Homo sapiens
  misc_feature 450: n = A,T,C or G
tagtaagaaccatgggcagctggaggtgagggaccatctcctgtccccatacttcagaagggcctgggaaaggtaggaagaaagtgtcacctttgtcctaccagtgagatacactaggtacttaggcactttggcttatatcarcactgttggagttatgagttcagtcttggaaaatgaggtctcttcaggccctttctttctcctttatgaaatgtgttaaacttgtccggccggggtaaattcccatcctccaaagcctttgagtatctccctgttgcctatgagggtgacggtttttaaggtctgggtaggaaggatcagtgcctgggtggccccaggcattaagggtttggagggttggattatcctcagggcaggctctgcttttcttttcctttattatagtaaaacatacataaaatttaccatttcaactatcttccaatncag

SEQ ID NO: 725114 - DNA, 453 bp, Homo sapiens
  misc_feature 450: n = A,T,C or G
tagtaagaaccatgggcagctggaggtgagggaccatctcctgtccccatacttcagaagggcctgggaaaggtaggaagaaagtgtcacctttgtcctaccagtgagatacactaggtacttaggcactttggcttatatcagcactgttggagttatgagttcagtcttggaaaaygaggtctcttcaggccctttctttctcctttatgaaatgtgttaaacttgtccggccggggtaaattcccatcctccaaagcctttgagtatctccctgttgcctatgagggtgacggtttttaaggtctgggtaggaaggatcagtgcctgggtggccccaggcattaagggtttggagggttggattatcctcagggcaggctctgcttttcttttcctttattatagtaaaacatacataaaatttaccatttcaactatcttccaatncag

SEQ ID NO: 725115 - DNA, 453 bp, Homo sapiens
  misc_feature 450: n = A,T,C or G
tagtaagaaccatgggcagctggaggtgagggaccatctcctgtccccatacttcagaagggcctgggaaaggtaggaagaaagtgtcacctttgtcctaccagtgagatacactaggtacttaggcactttggcttatatcagcactgttggagttatgagttcagtcttggaaaatgaggtctcttcaggccctttctttctcctttatgaaatgtgttaaacttgtccggcyggggtaaattcccatcctccaaagcctttgagtatctccctgttgcctatgagggtgacggtttttaaggtctgggtaggaaggatcagtgcctgggtggccccaggcattaagggtttggagggttggattatcctcagggcaggctctgcttttcttttcctttattatagtaaaacatacataaaatttaccatttcaactatcttccaatncag

SEQ ID NO: 725116 - DNA, 453 bp, Homo sapiens
  misc_feature 450: n = A,T,C or G
tagtaagaaccatgggcagctggaggtgagggaccatctcctgtccccatacttcagaagggcctgggaaaggtaggaagaaagtgtcacctttgtcctaccagtgagatacactaggtacttaggcactttggcttatatcagcactgttggagttatgagttcagtcttggaaaatgaggtctcttcaggccctttctttctcctttatgaaatgtgttaaacttgtccggccggggtaaattcccatcctccaaagcctttgagtatctccctgttgcctatgagggtgacggtttttaaggtctgggtaggaaggatcagtgcctgggtggccccaggcattaagggtttggagggttggattatcctcagggcaggctctgcttttcttttcctttattayagtaaaacatacataaaatttaccatttcaactatcttccaatncag

SEQ ID NO: 725117 - DNA, 1575 bp, Homo sapiens
tgctctgttgcccaggctggagtgcagcagctcaatcagctcactgcagccttgatttcccggactcaagtgatcctcccacctcagcctccggagtagctgggaccacagacaggcaccgccgtgcaccgctaatttttttttttttttaattttggtagtgatgaggtgttgcccagcctggtctcaaactcctgggctcaagcgatcctcccacctcccaaagtgctgagactacaggcgtgagccaccgcaccctgtcattctaagggagtcttatgtgttggataatcatataatgtattagccaaatttggagagttctaagagtaaaaacaagtgctattaagaaatacgtcaggctgggcatggtggctcatgcctgcaatctcagcactttgggatgctgaggtgggaggattgcttgggcccaggagttcaagaccagcctgggcaacaaagtaagatcccatctcttgaaaaaaaaatattttaaaaaaaagtagtatgtcagaacaacaggcctaagccaggctgtgtggctaccctgatttaatttattggatgttgacttctgggatccctttcctgcttgcaccagtacctctcaaccagtctacacagtccaatctcctctgcagcttttaagaatcccctgcttgggaatattgctttccttgggaattctggtttacttggtggagaagagggcctggttgtcccccttttttttcttataactctccaagtagttctaatgtacagtcagagtagacaacgttgcctcaggcacaggatagtggtagtccaccaaatggctcagcgtgtcccggcagctggcaaattaagaaataataatactaaggctgtgtagagaagataaagggacagttttcttctgtatgagtttctatgtatttgcggggaaacatgccctgtgcatgaacctgtacttccatgttcctcttgtatttcaaagtcttgtgcccagttcatggattcttgtctgttgagcttttagctctgacacttatgttggatgtttttaattttggttattaaaattatcttagttatccaaacaagatgaccaaccatcctggcttgcctgggactgtcctgcttttcacctcaaaagtcccacatcccaggaaaccagcgtctctggcaaacggagatggttggtcactcgcagtaaaacacattattctggaatagttctagtggccacatgatttaaggaaattagattgtggatctggaaactgctawgaattcgggaaaatctccagccccagcactgcagacccaatttagataataactctcttccacttttccaaattcctgtccactgtgtgtgggaagctcagcctcaggccacactggccagtacagctgacaggcccagggacattcctgtcctctcccatctcacctcccttccttctgatattgtgtgagcaccaagataactcatgcacttctacttcccaccctgtgtgcagcagagaaacatcgccagcgtctctctgcctgtaacaagcccacctttgcttccagctctgagaaagc

SEQ ID NO: 725118 - DNA, 1282 bp, Homo sapiens
  misc_feature 470, 471, 472, 473, 474, 475, 476, 477, 478, 479, 480, 481,482, 483, 484, 485, 486, 487, 488, 489, 490, 491, 492, 493,494, 495, 496, 497, 498, 499, 500, 501, 502, 503, 504, 505,506, 507, 508, 509, 510, 511, 512, 513, 514, 515, 516: n = A,T,C or G
  misc_feature 517, 518, 519, 520, 521, 522, 523, 524, 525, 526, 527, 528,529, 530, 531, 532, 533, 534, 535, 536, 537, 538, 539, 540,541, 542, 543, 544, 545, 546, 547, 548, 549, 550, 551, 552,553, 554, 555, 556, 557, 558, 559, 560, 561, 562, 563: n = A,T,C or G
  misc_feature 564, 565, 566, 567, 568, 569: n = A,T,C or G
cggcgcgggcggggctccccctcgcagatgcctcggagacccagaggggcggcgtcaggccagggccccgagccctacgccccccatccccccaactccagcgcctctgaggtgcccctctcgcaattccgaggcatcaccgtgtctcccccgcctccgttaaaatagtgaaactgcggagtgaagtgatggaaagccgggggcggggagtcgcccgcggcgaggggctgcaggggagggggcgcggtggccgaataaggtggcccgcgagcaacgggacgattgggatcgcasccagtcgcggcctcccggacccttcccctcgggcagcccggccctcccatggcccggggcgccttgggagggcgtaaggcaaacctggggctgcggtggggggtggggaggggactccacctccattcatcccgggatggcaactgcggtcaccctgctaaagtctgggcgggggnnnnnnnnnnnnnnnnnnnnnnnnnnnnnnnnnnnnnnnnnnnnnnnnnnnnnnnnnnnnnnnnnnnnnnnnnnnnnnnnnnnnnnnnnnnnnnnnnnnngcccacctccctccctgtgggagaagaggaggaggggaagtgactgcggagttgatgaactttgcacatccagaaacgccattttgattccttttccggaacaagtttgcatctctcctcggtctctccctgaagcccaccggtccccaacgcatcatgccagggagccaagcgtcctgcccggccgtaagtacgtgccccggattccgactcgcggtacgccggcggcagcgagaagtctggggcacagccggagcgaccttttaaagaactttggggatggggagggtgaagtctgcagagcgcgttgtacttttgaaactcggtgtgtcccggagccggggacccgcacgccccactccgcgcagcgtgcgctcgggccggcggggcggccagggatgagcggggcagccctctcccctcgggctgcgcgccgggccattcctcctcctcctcctcctcctccccttcctccgctcttttccctttcccgagcctgcggctctgccaaccagctcccagcgcgagccgtcgcagcgccccgccagcaggacctgatgcgcatccatattagccgtccgagcgcaggaatccggaccgacccgcgccgccgagtttatttttaaccagcaccgccgggactcggatggtgcgcgcaccgccggccagaaacatcttaccagcgctgctctccatctttcgacctctctccc

SEQ ID NO: 725119 - DNA, 1881 bp, Homo sapiens
ggaaacaagggaaaagatgggaaaagaatgaactcaaggagcgcctctgagcttgcatgccagcagccaaaaagccagaaggccccttggcttaaaagcagccagagccagcccactcagtctttgctttgataagcaaagtccctcctcctaagcacagaaagacagacttcccttcaaccccagactaacagaaggaaagaatgcacctgaaaagggagtagcatttgggcaggtcaaatgcacaaagctcttatctgcctcaaaatgtcactgatcctttataaaaataacaactggaaagaggttccagtgcaacctttataaatctttagagctgacactaaggcccaaggagagcagatgggaaaggagactttcccaaaaagcggattgcagagaacagatggccctgagacgcagagcggaggggctggaaaggacctgaggtcaattatatcattgttaggcaagaagacaattttttcaggatgactttttggctggggtgaaggggggtgatattggaacccagtacagaggtaaaaacaaacaaacctcacaaccgtaacaaccatatgaggagaattaaagctctcctgagttatttcccttttaaccaatagcctctttggcttcagtagcatacattaaaacataaattctcccaaaccgagaagtcggctgacacctctcacctccaaaatcatccagtcagtgaggtcataagtccatccctaaccttatagcccattgagaccatcacaacagctggaaacagccttatcactctggaaatgtaatacaggtttatgccgaatttaagaaaacctgatayaagaaaattaactctagctgtacaattattataaaaggctttttatagggctgctttgctgtgacattctcctaggacatttaaaatacaatattcacacttaccaaacacacaattacacattttccaggcctataattgccgcataaaatggggtatatctaaggccacaggccgtggaaatgctagaaaacaggcacacttcactatgacaagctgactttgaagcgagtcaaaatttatactaggggttgaaggttgggaaactgctttaaaaaacaaacacacttccaggggaaaaaattccacaaaagcaatttcgtgcaccatagagggctggcaagaagcatccccacctagtccgtatgactctacaggagaaaacaaaacacctgttccagcacctgacactccccttccctctgcaaagcaaccagactgaccttcaactgggtgtaaggggaattgctaaagcctaaaggggaaggaatggagtgaggcaaataacctcctctcaacaaagtttcttttgttcactgtgatatcagtttaaccaacgggttaaattcgtgtgctctttcattcatcacacgccggtgttatggtgatttgtcctcattacctactcctgttcctgaaatcctggaggaagcagttaagtcactgactcacccattaaacgttgcggggggtggggtggcggagggtagagagacaacagctggacaatgttcctgttctgagggttacacggcaagccatcaatatcaatgaggtgccccaacctaagccctggactgtcctagagcataacagcaggccagtctacctctggagaccgcctgggtgctggccccaccccagggcttggccctctacactgggtggggattgtttctcatttgttcctttctggccctcctctgagctcaccggctatgggcagaaccgtgtgagacaaagatttctgaccaggcagccctttcttaggggaagataagtcaaagagagaaagaactatgcattgaactgtgaacaaaaaa

SEQ ID NO: 725120 - DNA, 988 bp, Homo sapiens
tgatctcatatatactgattttgaattaactatgtgacatacatgagcataactgatgggcagggggataggtctctagctcaaaagaatgattttggttggatataaaaatctgagggtcatggttaagagttgttattgctatggattttgatgagatcaagaaaaatatgttgattgagcattaagattgaagctcaacgttaaaagagatttacgataggagagcaaccctccaagaaaatgataaagttgccctgagacaggaaaactagaatagtggaatatcttagaagccagggaagaagagtttttccaataggaaggaccgatcaacaatcaatactacagagtggtaagatgaggcctgatgtgacttgggccgtgacaaaatcaatttcagttgaaggatgtggaagcagccggattattggtgtttgaggtagctacgtgagtaaggaagtagatacaatgagcatagaaattgttaaagaagtttagcttcaggagtggaaaataacaagtcggtaggagattaaaaactaatagcagaatgtcctatttgttactacaggcaacactgtattgcaagttaaaataaattagttaaacctgacacaaatgcctgaacgcaagaaaaaaaattaaagggtttcttcaaccagacatttgtattttaagcattttattttggcaatcaattggggaaatgagatattttctcctcaaaggtaatgctgtagcagttataattgtattccaggacttgcgggytactattacaaatactcatggaaattaatgaatttttatccccctggctctggaggagtggctgaaagcaccgtgttttatagtctgacaaatttgggttctattcccagtatctctggataccagctatatgaccttgaacaaaatactgagcctctttcaaagcctcagttttctcatttgtaaacaaagcagtaacaatagctcttttata

SEQ ID NO: 725121 - DNA, 650 bp, Homo sapiens
ctcgtctaatattcttttatcccttattcagagactctcatattattgtgactgtaaattttcttagctaaaataatttccctctatctctctctgyctcactttctttctctctctctctctctctctccaactcccaaagatatataagtcggatttattgggcacagctaccaggaaaaggggttcaagaagggttacagagcaaatgaataatcttttgctagggctgaggagtccaactcatggcctcgatataatttttgagaatggaagctgggaatagaagatgtcagggaaccctggggttgttaatagtattgaaacaacctaccttgcagtacttttgagagagatataaaaccatcaccctgttctgaagctcgagccctagcttattattttccctttatcaattcacaaataaaagcaatgaatttcctacaaatacttcttcttggttttgaaggtatgttatagaatagaaaaagtcttacaaaggtgtattttcacatagtggttggtgatggtggacagaaatttttaaaaatcatatgtacccttcatttcatatttttataacaaaatgacaatttaatcaatgtattaaattttcaaaagaaaatgcaaatatctgttctacatagatt

SEQ ID NO: 725122 - DNA, 650 bp, Homo sapiens
ctcgtctaatattcttttatcccttattcagagactctcatattattgtgactgtaaattttcttagctaaaataatttccctctatctctctctgtctcactttctttctctctctctctctctctctccaactcccaaagatatataagtcggatttattgggcacagctaccaggaaaaggggttcaagaagggttacagagcaaatgaataatcttttgctagggctgaggagtccaactcatggcctcgatataatttttgagaatggaagctgggaatagaagatgtcagggaaccctggggttgttaatagtattgaaacaacctaccttgcagtacttttgagagagatataaaaccatcaccctgttctgaagctcgagccctagcttattattttccctttatcaattcacaaataaaagcaatgaatttcctacaaatacttcttcttggttttgaaggtatgttatagaatagaaaaagtcttacaaaggtgtattttyacatagtggttggtgatggtggacagaaatttttaaaaatcatatgtacccttcatttcatatttttataacaaaatgacaatttaatcaatgtattaaattttcaaaagaaaatgcaaatatctgttctacatagatt

SEQ ID NO: 725123 - DNA, 592 bp, Homo sapiens
ggcttgagcccaggaacagcctgtgcaacatggtgagaccttgtctctaaaataaataaatgaataaaagatagccatgcttggtggtactcacctgtattcccagctactcgagaggctgaggtggaagaattccttgagcccaggagtttgaggctgcagagtggtatggtcatgccactacacttcatcttggatgacagagtaagaccctgtcttttaaaaaacaaaacaaaaaaagaaatcaagaaatcaagatctggatgctagatatactcattgctactagggtgttatagggtgtcattgcctgtaggtccctcartcaacagcacaagcaaagcaaggagatatatgtgtgtatacaaacccgtgtatatacatagatctataaatatttccatgtacaactctctatatttatactaaagtaaacatgagtttatattgatgtctccaactctaattcattaccacatggatcattctagcctcttccccttccctatctgtaatctcccactccaacagtgagaaaactggctcccaccattcaccctctatgtattaatacttaattgttcaattccag

SEQ ID NO: 725124 - DNA, 1734 bp, Homo sapiens
gttaaataaattttgatatatgcatactgtattgtaacaaatatatatctgtttttttggaaattactaaatgggcacaggaagatagacaaccaaaacacaatctttttgaagtggcagaatctgcctcttgaaggaaaatagaagtctcccaggtgcagaaaaatgaggacttggattccaggcagaagaagattctgtgcaatagaggtcaaaaagctaaggactctcatggcctgggaaggtcacctaatccaaagcagttagagtatagaggtcccaggaggaagcaacaagatgcaaagtgaaaaaactaggcagctccaggtagtaaaagcctgtacaggctgggcgcagtggctcatgcctgtaatcccagcactttgggaggccaaggcaggcggatcacctgaggtcaggagttcaagaccagcctggccaacatggtgaaactccttctttactaaaaatacaaaaattagctaggcatggtggtgcgtgcctgtaatcccagctactcgggaggctgaggcagaagaatcacttgaacaatccaggaggtagaggttgccatgagctgagatcacaacattgcactccaccctgggcaacaagagctatcccaaaaaaaaaaaaaaagaaaaaagcttgtacatcaggctaatatgtctgaactctttttgcaatcacaaacctttagagctcgtaagaagaggcttaacacaattgtttgactttagaaagcaccttcagcaggtaggaacatctcattttcctcctttggacatttaacagatggaattagatatttttaaaagaagcttaaaaatgaatagtgggggttatctaccaagctcagtacactaagaaggtggttacaaatgcagcaagaggcacagtgatttaaaacacctcctcgggaactcacamatatttgttgaatccactgttttcaaagaaaggcaattccattattgccaaaacccatgtttgttgtttggtttggatgattttctagcaaagacttgcttcccctactttgatctgtttttctccccttcttggctgttctgtcccacttttcgagcctagtttcacctctggtatttctcagtcatatttctttattctcgataggttaatcagctaacacctctgccgtgtggtatcccaaaacagcaacccagttaagctgagcctttcccctttactttccaatctttgaatcatcattttgcaaaatggcagtcactgcttctaaacagtgatcaaggcttggggtggttacaccctgggcgaaatacaagtctccttggccaaacttttatcagaaggcgttgcagaaactcattaaggcacttgagtcaaagatccaggtgaatcattctaaacctccacccagttcaactttccctctggtaataattaattatgtttttcccctctcgcactcccacctccaccagcactcaatcacatgttccaccgggccacacactcagtctgagttgcaaactcacctgaggttcacttgcttggcacttacaggagacagataagaaagaaaatgtctatggcttgtctacatcatgcctggcagtaggaaaaaaaagtctcaaaacctagccctaagagtcatgcagcttgatcttaaacagcacatgctattcagcttcacagtttaatgctctaataaggagaatgtaaggaaaatacttcacctgaaaatattca

SEQ ID NO: 725125 - DNA, 494 bp, Homo sapiens
ttactggggataaagaaggtaatttcataacgataaagggatcaattactaagaggtcataaaaatcctaaatrtttatgcagctgaaaacaagcaaaaacggatagaatttcaaggagaaatagacaaatccataagtaagagagtgactaattgttaacacattcattcaacaaaaatatactaaaatcctccaaacacaagacattgtgccagatgcgaaggagactacaaatgactttagactcctcaggtacataacaaaaaatttgtgtgataatctctactcactcttccaattcttccatgattttgttttttacaagttcacaaatccttataaaaataataataataattaatacctctcaaatttggcatgatctaggtgcccaggtgtgatactcagttttatgtatcagctttcctgggctacaggatgcccagatagctggctaaacattatttctggatgtgtgtaccaaggtgtttcc

SEQ ID NO: 725126 - DNA, 494 bp, Homo sapiens
ttactggggataaagaaggtaatttcataacgataaagggatcaattactaagaggtcataaaaatcctaaatatttatgcagctgaaaacaagcaaaaacggatagaatttcaaggagaaatagacaaatccataagtaagagagtgactaattgttaacacattcattcaacaaaaatatactaaaatcctccaaacacaagacattgtgccagatgcgaaggagactacaaatgactttagactcctcaggtacataacaaaaaatttgtgtgataatctctactcactcttccaattcttcyatgattttgttttttacaagttcacaaatccttataaaaataataataataattaatacctctcaaatttggcatgatctaggtgcccaggtgtgatactcagttttatgtatcagctttcctgggctacaggatgcccagatagctggctaaacattatttctggatgtgtgtaccaaggtgtttcc

SEQ ID NO: 725127 - DNA, 1361 bp, Homo sapiens
gaaaaaaagtaaatacaatgtcaatctttaaaagaaaggaaaagaaatattggtcagcctaaaacacagtgccagggaagttacgaagataaatcatcaaaatgatcaatttgcaatcacccagaagaacataacagactgggtagcaaccaacatggcttttagaggaacaaatcatgccagaccaatttaatttccttctatgatagagtgacaggccttgtagataaaaaggatgcaatagatgtaatctctctagacttctgtaagcctttgattctgtcctacctgacattctcatcaacaaactggggagatctaatctaaaccacacaactattcaggggatgcacagccaaccagacagaggcatccagagagcacttgtcaatggcttagcatttacccaggagaacattactggaatagccttgtcatggtgcctaggatcaattgactcttttacagccaaatgaaaggttaaagtataaatagagatgtgtatataataaacgatatgtttacacagcaacatctgcaaattatttgaagttcgagtagtgtttctgcatagaactacttggcatacaacaaatggatcagtaaacaaatatgtgctttgagagtgacttatgttcatactgaagagattgttttacctaaaaattgcagccctaagtccataatagtaccctgggaagcactgtaacaccaccaccagcagctctgcctatactgttttcttgagtgaagtctctgctaatcaatactctgatatctccttctatcatgtttgttctgcatcatgtggattgctgttccatcttctgccgtcctcttcccagcatcctccactgtccaaatgataatttcagcctgacttcccccttcccattctatctcacagtatctaccttcgcccataacatctgaccatccattcttacccatgttttcttcccctgctcaatatcctgtaggtacgggtagatgagatagaatgaagggaaactcaagctaataaaaaagttaataaaatttagagatgagatagaccagagaccatcagggttacacaggattttttttttttttttgagacagagtctcactctgttgcccaggctggagtgcagtggcacagtctcrgctcaatacaacctctgcctctccggttcaagtgattcaagtgattctcctgcctcagcctcccgagtagctgggattaccggcatgcaccaccacacccagctaatttttgtatttttagtagagatggggtttcaccatgttggccaggctggtctcgaactcctgacctcaggtgatccacctgccttggcctcccaaagtgctgggat

SEQ ID NO: 725128 - DNA, 653 bp, Homo sapiens
caacgtgctctcaaaaactaatccattctcagggaagggagaactcaccccaaaggasagcactaatttattcacgaggatcctgtccccatgacctccctctaggccacacctcccaacactgccacattgggaaacaaatttcaacatcagttttggcagagacaccacatccaagccatagtgcacagtgaaataaagcagtattcggctgttagatgatactgttattatcactactgtacagagatgacttccctttaggggtcataaaaggcctcagagaagctgtactgctgcgattttatgattttgtgtaactcgtggactaaagataaagcaagggctgctctgccctctggggaaagaatcttaactctaaaagggccaattagattaaacatcctttcttgaaagaataaactaacaactaaatggaatttgtattttgtaaagaaaagcaagttaggttttgcttaagatgaacttagaatccatttccaggtctttttcttcatagaaaccattaagctagactctagaagtaaatataacaggtggtaatagtgtatatgaggtaaaatagagaattgtggttttattgagaaaatacaagccagaaatagttctaaagcacttcttcattctagaca

SEQ ID NO: 725129 - DNA, 1187 bp, Homo sapiens
attcattgctcaactgcatggacagtacgttgaaaatagtaaattagtatcacctccctaatcacttccccaatgttgttgaaatgtgtcaatatttgaatatatacaaactgagtgatttctacagttaaacctcaagtagagaccaagatcaataatacattaaattttaataacttggattaagtcgtgtttgggttaacgataaatatcaaaagataactattacacctattccagataataaatgtattactttccataatatctggaataggtataatagttatcttttgatagattccttgatggagaatctggtggcaaggggaagttaacgtttttagtaggaaactgagtttttcctttcagaggtcgaagagggaaactggttccctggggccctgaataaggccccagtaaaggcaatattcaataaatacctggtgctggcaatttttaatttggttgagtgatgtttttactcctagttattttgattctaaatgactttatggagatacatgaacatatgtccaaagtctttggacaacacttttcatagctgattatatccgaagcatttaatgttcctgttgaagtgaagagcttgaaatatagggccttttgagactattccaaagcaggtgataaaaacaaaacaaaacaaaaatccaggagcaaaaaacgaaggatcagggtgggtggctcatgattgtaatcctagcagtttgggaggttgaggcagaaggattgcttgaggccaggggttcgagacgagcgagggcaacataattygatccctgtcgctataaaaaattaaaaagctcagccaggtgtagtgaccgacgcttgtagtcccagttactctggaggctgaggcaggaggatcgcttgactttaggaggtctaggctgcagagacccatgattgtgcccctgtactccaggctgggtaacagtgagatcctgtctcaaacaagcaaacaactcccacccctaaaaaaacgtgcacatgaccttaaaagtgtaggaagattacatgataaggagagtcagagaaaagagaaattaggacaggaaagcactacaagctatgtatgtttattttataattgagtctttaagggtacggagtattcgtactcaacttgtacccccagtgtctagtacgctgcttggtaaaca

SEQ ID NO: 725130 - DNA, 1223 bp, Homo sapiens
ctcaggctccaaattgctgggattataggcatgagccaccacgcccagccctgttttttcccttctccaagccaagtgtgaagtcaacacagtaaactgaaaatcaaggccaagtatggtggctcacacttgtaatcccaatactttggagtttgaagtaaaagaatggctggagcttaggaattcgagaccagcctgggcaacatagtgagacctcatctctactaaaagtacaaaaacattagccaggcatagtggcacatgcctgtagtcccagctactcgagaggctgagatgggaggatcacttgagcctgggaagttgaggctgtagtgagcagtgattgcaccactgcactccaacctggaagacagagtgaaactctgtctcaaaaaaaaaaaaaaaaggaaaagaaaatcaatatatagatgtgattgatttctacagctctaatttactgcatgagtattatggcccaggctataacaagatgctttgtacatacattgctcacattataggatccttgtaagaccgggcgcagtggctcatgcctgtaatcccagcactttgggaggccgaggcaggcagatcacgtgaggtcaggagtttgagaccagcctgaccaacatggagaaaccttgtctctactaaaaatacaagaaaaaaaaaaaattagccaggcatggttgcacatgcctgtaatcccagctactcgggaggctgaggcaggaaatcacttgaacctgggaggcagaagttgcagtgagccaagattgtgccattgcactccagcctgggcagcaagagtgaaactccatctcaaaaaaaaaaaaaaagaamttcccccatttctccattttctcctttgccctgacattttttcttccatgttcacaccagtacccaatgtcccaggcatatggaattcattgtttcatgaatagagtcaacacattttaactgccacacatttactcaaaccatctggccacctggcatttcctaccatcccccataaaatttaaattaaaaaatttccagtgttctgtcctccgtgaagatgtccctgaacctttattgaaactcattgacgtatcctgtgattcccacagcctttattgtatatgtcataatttagcatttacattatcctaccttacattttagtaagttaatgacctgtctctctccactgttaaaatagtgtcaggattttttca

SEQ ID NO: 725131 - DNA, 1223 bp, Homo sapiens
ctcaggctccaaattgctgggattataggcatgagccaccacgcccagccctgttttttcccttctccaagccaagtgtgaagtcaacacagtaaactgaaaatcaaggccaagtatggtggctcacacttgtaatcccaatactttggagtttgaagtaaaagaatggctggagcttaggaattcgagaccagcctgggcaacatagtgagacctcatctctactaaaagtacaaaaacattagccaggcatagtggcacatgcctgtagtcccagctactcgagaggctgagatgggaggatcacttgagcctgggaagttgaggctgtagtgagcagtgattgcaccactgcactccaacctggaagacagagtgaaactctgtctcaaaaaaaaaaaaaaaaggaaaagaaaatcaatatatagatgtgattgatttctacagctctaatttactgcatgagtattatggcccaggctataacaagatgctttgtacatacattgctcacattataggatccttgtaagaccgggcgcagtggctcatgcctgtaatcccagcactttgggaggccgaggcaggcagatcacgtgaggtcaggagtttgagaccagcctgaccaacatggagaaaccttgtctctactaaaaatacaagaaaaaaaaaaaattagccaggcatggttgcacatgcctgtaatcccagctactcgggaggctgaggcaggaaatcacttgaacctgggaggcagaagttgcagtgagccaagattgtgccattgcactccagcctgggcagcaagagtgaaactccatctcaaaaaaaaaaaaaaagaaattcccccatttctccattttctcctttgccctgacattttttcttccatgttcacaccagtacccaatgtcccaggcatatggaattcattgtttcatgaatagagtcaacacattttaactgccacacatttactcaaaccatctggccacctggmatttcctaccatcccccataaaatttaaattaaaaaatttccagtgttctgtcctccgtgaagatgtccctgaacctttattgaaactcattgacgtatcctgtgattcccacagcctttattgtatatgtcataatttagcatttacattatcctaccttacattttagtaagttaatgacctgtctctctccactgttaaaatagtgtcaggattttttca

SEQ ID NO: 725132 - DNA, 421 bp, Homo sapiens
  misc_feature 225, 343: n = A,T,C or G
tcactacaccaagtcaaccaacttatgaatgggtttcctgtgctccaatggttgtcttatggctagcaaggggtgtactgagacttagatgtggacttaccattatggaaaagcagaagaaaacagaacttagcttaaaattaaagccatatatgatgcagatttcaagttggctctgcttctatgaaaagctgaggtgatctgcttgttcctgcatcagttggntttcacctcatagtattttagtttgcctcccttgaaaggagtgtagtwttataccttctctgcagcacattctctggccccatcactctttttcaccataccttaaaatctttgtggncagtttgaatgtctatagaatcttctggtaatctatagatctgctggagctcagtagaggtaatctgagatgggtccc

SEQ ID NO: 725133 - DNA, 1304 bp, Homo sapiens
gaattcatattcaaaaggccttatattttttaaatagcaagtgattctacattgatatatttctgataaaatattgaaatattttaagatatgtataatgttttatgacttcctagcataagacctttttcttttttgagacaaggttttgctctgtagcccaggctggagtgcagtggcgtgatcagaactcgctgcaactacctccccagctcaagcaatcctccctcctcagccctggaagtagctgaaactacaggcacgtgccaccacacctggctgattttttatattttttgtagagatggagatttgcctgcctcagcctcccaaagtgccagtattacaggcatgagccattgtgcccggccttaagaccttttgattaactgatcaactattgtcctgactatatcaaataagaggatttctaactcaggaacctctcaacatctagcaccattttccagaacttagttcatttaaagaggaaacaggaaatcccagagacacaaagtaatacaaaaagtttcacacttactgtcagttccttcatggtaatgttcaaatactggcaaagtaacacctgttaaacacagaagcatacatggattcataaacctttaagttctctcttttttttttttttctgagacggagttttgctcttgtcgccgaggctggaatgcaatggcgtgatctcgcctcaccgcaacctctgcctcccaggttcaagcaattctcctggtcagcctcctgaataggtgggattacaggcatgcaccaccacacccggctaattttgtatttttagtagacacggggtttctccatgttggtaaggttggtcttgaacttccgacctcaggtgatccacccgcctaaacctcccaaagtgctgggattacaggtatgagccaccgcgcctggcctaarttctgtttcttaatcactgttttctgtgtttctttttcatcaaactcaaaaatcaagagcttaagtatggaattgtaattggtttcaattaatgaatttaggaacttgccttctttttttttttttgagacagagtctcactctgtcgcccaggctgcagtgcagtggtgtggtcttcagctcactgcaaccaccgcctcctggggtcaagtgattctcccacctcagcctcctgagtagctgggacaacaggcacatgccatgcccagctaatttttttttttttttaaagatgagtttcgctcttgttgcctgggctggagtacaatggcgcaatctcggctcaccacaacctctgcctcctgggt

SEQ ID NO: 725134 - DNA, 311 bp, Homo sapiens
tgacgatggggcggtctcaggagaacgctgtgacaccgtaactcttaaccccrgctcaggacgctgagcactttgctttttccaggcttgagaattccatcttttcttccgccccaacagctctaccaaaaatttcccctgcgtctcagtggaaaccaaactggcctcttacctgagaaacctgtgggacgggcaccgtgttggaaagagcggggtccgagtagtttttcatctgataattgaatgagtcaccccttgaaccaaaactaaatgagacttgagtttattactgttactatcagtttgtcgta

SEQ ID NO: 725135 - DNA, 570 bp, Homo sapiens
taaaactataaaacctttttaatctatcacttttggggcatttgaaattacaattgctcaaaaagaataatctgatcaaggaatctggtgatttttctctaatgctatcagggccagaggtgttgaaaacaggattaaattttctacctttcatggagagttctagtttgatttcctattgcactagaaaatgaaccatgttcttagggccttcraaggggcctcacacttttggccttaccaggctcctcctcacctactcccgggctctgctgacttcaccttcgtaaataccatcccatccctctgaggggccattctgaacagatgtctccatcacctaacccacttccccagttactgacatcaaacatttctcaaggttctagcattaccttatctaaacaacccatactttttcttgcactgatatggttcagctgtgtctccacccaatctcatcttgaattgtagctcccataatcgccacatgttgtgggagggacccggtgggagataattgaatcatgggggctgtttcccccatactgttctcttggtagtgaataa

SEQ ID NO: 725136 - DNA, 587 bp, Homo sapiens
tatatctccatttttaataacattgaacctatttatcatagctgttttaaagtcattgtttgataatttccacatctgggttttcttgaggtctatttctattgattactcccagctcaattgattacaggtcacattttcatgcttccttgaatcaatagatatattttattttatgttggtgatatgggttgaactgtgttctctaggaatttaaatgttgatgtcctaaatcccaaagccttggaatgtaacattatttggagacaaaaatgtttacagagttaattaatgtaaaatgaagttattcagcatgtatggtatttttacaaaaaaggagaaatttgaagagagacacacactcaggaggaagaccaagtatgtattggtgatatgctcacagcccttaaaagtaacttatygtgtggacatcttgattttgacctagcctccaaaacttcaatacaaaatgttgtttttttaagtcatttagtttgtggtactttgttatagcaaaatatgacagctgaacattgtgaatgagattttatagagtgtcggaattattttaaatttttttttgttag

SEQ ID NO: 725137 - DNA, 631 bp, Homo sapiens
aacaaacatcctgtttctgccagttttctttctgaaatgcaaatttaataatataatttttattgttgaaatcttactataaattccttaccgtcctgagaataaaatccaagacccttaatataccacagaaaaatcrttttgttttgaactcttctatgtctcatacaaaatatagaccctgcagtatagagcagcataaatatatctgcatttccaaactctttagcttatcatataatgttcccctttggaaatttcctcctccacgactgttatgcactgtcatatttgtccagcagaatctagctcaatgtcctctcttcctggatggcttttccaaaatccacatctgccaaagacaattgactcttctttgtataatgtcttaaagttagttttggttttgtgctaacaatgatgcattctctatatttttataatttcttcttgttgaccttatacaaattctaaaactatacagtttccttaacatctagcttagtgctgaagtgaaagaagccaaagatatatttattgcaatctactgcattcttacaattttctaagatacattatagcattatttattttgcattaaagttttaatatttttaagacttgtgaatta

SEQ ID NO: 725138 - DNA, 602 bp, Homo sapiens
atatatttgaaaaattaggtgacaatttaagaggatattggtataactttgcttagtgcaagaaacttttttttttaaatggtacaatgtttttcttttaatgatcattgggacatcttaaaataactactaagtaaccacataaataaggaaacataaaaaatgccataacccaagtacttttgaaactacttctaagttccaagccccagcatgtatcaattgtatgaattaattttttttattcagaacctggatctttgttttaagcctagtataaccaaaaataaaatgtwaaccaacttgttattaacataatagctgcagttattaactgcaagaatacagtaaaaaagtcatactaaatgttaatgttcttgtaacagaattatccatatcaccttatggtagcaaattctggcaagaaatgatcattcatttcttattaaaaatacttatttccaagatcagttataccacaaataaaaccacagtttattcaatagagcccttacctttctctttttttcctgaaagatctgccatttacagggaactactaatttcagatcagttactcaaaccagggttattcctgtaaa

SEQ ID NO: 725139 - DNA, 638 bp, Homo sapiens
tgagataatcatagattcccatgcccttgtaggaaataatacagacaaatctcgtgtattctacccagtttccactaatggtgacatcttgaaaaactatactacaaatcacaacaaggatattgacattgagaaagtcaagatacagaaaatttccattactacaaaggtccctcatactgctttgtatagctatacccattccttccctccccacccattcttaagccctggcaactactaatttgttctccatttctataattttgtcatttcaagaatattacataaatgaggtcatacagtatgatrctttatgggattagttcttttcactcagcatacttctcagttggattcatcctgttgtgagtacccagagtttcttcctttttgtcactaatattccaccaaatggatgtaccacagtttgtttagccattcaccatttgaagaacattcctgttttcaacttcattgatttctgctcttattatttcttttcttctgcttgatctttatttctaatatatgcattcagtgctataaatatccctctaattgctgtgtcccacaaattatgatatgttgcattttcatttaattcaaaatagtttcaaattccccttaagacttat

SEQ ID NO: 725140 - DNA, 788 bp, Homo sapiens
ggagaactcaagagtaagcctcaaaatttacaataaaaaactgacacacagaagaaattctctctagtaagcaaatggatgcattacaataaaagtctgctggaagaaagcccgggttcctggctttggaacactggtctgtgctgttggcccccagcacctagaacagccctgggctggcaggcactcaactcaaatttgttctaaggagttgggagcagaaagaggaagggaggtaatttttggttttaaaattgaagtttataattctgaagagcccctttcagaaccccctgacctgtgaatggctgatttaggcatacttaaccgtcaggccaccgtggagtctattttctattttttgagacagggtttccccagactggagtgcagtggtgccatcatagctcactccagccttggccttctgggctsaaccgatcctcccacctcggcctcccgagtagctgggatcacagacgcacaccaccactcctgtataatttcaaaaaattatttgtagaaacagggtctcactatgttgttcaggctggtctccaacttctgggctcaagtgatccccctgccttagcctcccaaagttctaagattacaggcatgaaccaccatgcccggccaactgtggagtctaataattacagctctgattaattgacgtacatattttgtataaagcaattaaatctagagaaagaaattttataggtgctacagaattataaaaagcagagaatgtcaggctgtgtcagtgtttttggtaacaaata

SEQ ID NO: 725141 - DNA, 788 bp, Homo sapiens
ggagaactcaagagtaagcctcaaaatttacaataaaaaactgacacacagaagaaattctctctagtaagcaaatggatgcattacaataaaagtctgctggaagaaagcccgggttcctggctttggaacactggtctgtgctgttggcccccagcacctagaacagccctgggctggcaggcactcaactcaaatttgttctaaggagttgggagcagaaagaggaagggaggtaatttttggttttaaaattgaagtttataattctgaagagcccctttcagaaccccctgacctgtgaatggctgatttaggcatacttaaccgtcaggccaccgtggagtctattttctattttttgagacagggtttccccagactggagtgcagtggtgccatcatagctcactccagccttggccttctgggctgaaccgatcctcccacctcggcctcccgagtagctgggatcacagacgcacaccaccactcctgtataatttcaaaaaattatttgtagaaacagggtctcactatgttgttcaggctggtctccarcttctgggctcaagtgatccccctgccttagcctcccaaagttctaagattacaggcatgaaccaccatgcccggccaactgtggagtctaataattacagctctgattaattgacgtacatattttgtataaagcaattaaatctagagaaagaaattttataggtgctacagaattataaaaagcagagaatgtcaggctgtgtcagtgtttttggtaacaaata

SEQ ID NO: 725142 - DNA, 2430 bp, Homo sapiens
ctgcttgctgggtatccttgggcaagtcattgaactctttaactgtaaaatgggactatcaacatctatctcataggatggttgtagggattatatgagatcatgtataccaaatatttagcatggtgcgtgacaggtagtatgttctcagtaactgcctgagctagggagaaaattgtttctctcccttattattcttagcagagctgtgttggaggtcaccggcttgaagattgaaccagggacagtggggctgtgatggagaaagacagccaaaggctttcacactctacctgttactgtccatgggcttttagaactctgatttaggctgggcacagtagctcacacctgtaatcccagcactytgggaggccagggcaggtggatcacttgagctgagttcaagaccagcctgggaaacatggcaaaacttcgtctctgcaaaaaaacaaaattagccaagcatagtggtatatgtctgtagtcccagctacttgggagtctgaggtgggagcatcgcttgagcccaggaggtagaggctgcagtgagccatgatggcaccactgcactccagcctgtgagacacagcgagaccttgtctcgaaacaaacaaacaacaacaaaaaaccccctgatttagggaactttcaggagttggtcatcctcaaaccccaaatcagtggactgcctataatttaaaaccactttcatctgtctggtttgatcaggtcttccaaatgacaaaaacaaaacaaaacttccatgtcccagcaaggttattgaggggacatgtgaagtaaaaatgaaaagaggtggtcatctagatgttataacatttggagaatcttgtaaatttcttattgcctcaaaaatatttgtttaaaaagctccatccaaatttggttattatgatatgcatccacttggtggtctcagcctctggtgaccagagctaggtgtatgggctgagtcccgtggtctgcatgcaaatatgcagagtgaggtcacggaaggtagaccctggttgccatctgcaagaggaacaagccatcagaaccctctggctttcagcctaggtctcagttatttgtctcacagggtgcagttgatttaaaaagttataaaagtacccaggggtgatgctcacatggaatcagaaccttaggactataaaataaagatcaataaaaaaatcttttatggatccgttagcaactttctgtgggatgtgttctggccttccttgtttttgactgggcaagctgcattcatgccctcctacgggggtggatagatggcgaggcattttcttaaacacagaaagcaggattttcctggcacgaacaaagagtgatctcaaaaaaataactcgtcctggtgttcaagtactgccaactaaaagggccacagaggcagtgccctaaaatgcaaggcatcatttttgaaatttaactggctttagctaataactctatgtggtcatttaatttattcacatttaatctatgtgcgtattaaaaattattataaaattaatatatttgatgaagaaaaatgaaaaaaaaaaccaaatagtgcaaagtgaaaaactcttattatgtcaccatccagaggctatggctgttcataaagtgatgtagatcccctcagtgtttttctatgcccttaatcagagctttcgttatttagtggtgtacaaaagttgaagctacagcaaacatgctggcttgcaacccatcctcctccttattttaacttcacaatttcccttgaacattttcctatgtcatcatgtcattcatctgtgactctaaaagctgatggatataccacaatttttcttagcctgtcctctattgctggagttgcatgcttttcccaatattttactattatacacaacagtagctatagaagttatctacatatacatctctgcatatatttcagattattcttttaaggaattactggcaaagatatgctatatataaaaggcattgacaaatattgctaggggctggttcccttgaatccctgcagtagtatatagggtacttcttgtctacacctggcctatactattgcactcactttttaaaatccttgcagtttgatgtgtaatgctgaggtttggggtgcaattgaacctgtcacccaggtagtgagcatagtacccaataggtagtttttctaccctggcctccctccctctctccttcctcctgtgtccccagtatctgttattctcatctttctgtccatgagtacccactgtttagttcccatttataagtgagaacacacaatatttgattttctgtttctgcattaattcgcttaggataatggcctgcagctccatccatgttgccacagaggacatgattttgttcttttctctgactgtgcagcattccatggtg

SEQ ID NO: 725143 - DNA, 868 bp, Homo sapiens
aatgcacgttttggtattgtcttctcctcctccttttctttttccttttctaggagcattgtgtctatcrttggctgtgtgggggttttttgaggtgacggggagaaaagggagatgaagttgtggcaaagagcatttacgaatacgtttccttggttcttagttgctgcctaaactgctgctgtactctccaaacacaaaaccgcgtcgtgggaaggtggagatgtggctgcttctgcagcatcccgtgttagagaaacagagcctgagaatgagacacatcattgtcaaaagaagcttcttcttttcttcacacaagggatgattagatgcttagtatctgttgcaaaaactgagaaaatcaaaacttctaaaaatttcctttcaaatttctttatgatccaagatgatacctaattgcatattttccaaacattcatttttccaaaagtagaatgggtgaaattccttatgaaagaaaccctcaatagtctgtttttttttgttttgttttgtttttcatttctagttttaggctacagtgataacgtaggaccctttttaaaaaaaattaagaccaaagccgggcgctgtggctcacgcctataatcccagcactttgggaggccgaggcgggtggatcacaaggtgaggagattgataccatcctggctaacacggtgaaaccccgtctgtactaaaaatacaaaaaattagccgggcgtggggtgggcacctgtactcgggaggctgaggcaggagaatcccttgaatccggcaggtggaggttgcagtgagtagagattgtgccactgcactccagcctaggcaatagagcaagaatcggtcttaaaaataaataaaaaca

SEQ ID NO: 725144 - DNA, 1948 bp, Homo sapiens
ttcagggttatggtcagggtttagggttagggttaggtttagggttagggttagggttagggttaggattaggctcccaaccatgcctgtaactcagcagtggaatcaggaagggaaggtagcctcccccttcctgccactgtgatgacagcttcactttgttcaggccctgatcttaggtgcacccacactcccacctgcagctccctgcaccttcactgtctctgcctcactccacaggcctccccaacagaggtacacactctctgctaacaatccttcctcacactccattagaaagtgaaaagatttgtttaggaacatcctggtttttccaacactgtgactgcctgcacacggcgttgctaccctcactcgtgccttcctcgtgtcactgtaagtcgtcctgccctcggcaaaggtcctatcctccccttgcgttttcagcccagccaagcgctccttgtcttctcaagaacgtgactgataattttccttccccttctgcaggatgagtgtccctcttctctagcatcaccatctacaaacccacgtggcttagtaacctctgtcatttaaacaaaacagaggaagacccagtgtcactgcacacacacctctctccacagtcccacgactttgctaatcttcatgcgctcaccccttagggaatcacctttccttgtcctctccgaccccccacccactccaaaagtctgctctggccatgtcccagggaaactgctctggccagccaagccccagggacaccacgattccagagccagcagtggcatctcacttctgaatctgcttgacctagcagcattaagccccttggttgctcagtacctttctcctgaaacattttcgtctccttcagatttttctcgcatgtggctggctactctgcagtttcctggttctcttcctggatttgtcttctgcagaggcagggacctagagcaccattcccttctctgtgctgggtcgcagggccttcaatacagctctctctagaggcagtctagagtcctgttcccccaaattctgcgtgctcggatyttaccacatacttgtcacctccctggcttggtgtctccctgaatgtcttcttctctgagttttctcagtaaaccagctgataatttaatttatcctggtccctccctctttcttttagtctgaatacttaatctttgagcaatcctatcaactttgagatcacactgagtcagagcccttccctgtaatgctgatatcatgccttactcggagtcaccgacatctctctcgcccgggctacagagcacttttcacaaccttgttctctgcttgccttttcccttcttttcctgtctgcccgtccctgtccccctttcctacattataagcactatgggcaccttcttgcccttcccctcacccccctccatggctctggcatcttgagcagctctggggaacctagtaggcctcagtttttgttcatggagtgaacaacaaattagtacattgtgaagtgcatcaactgcgtcttggtctcgaagccggcccagctaaaatgcagcctttcctgtgttttgggggctatacaaggaagcttgcagtggttcaaagagtgatgccatgaaatagcatcgtctgtgggattctctggcctcaggcaaagcgtggagaggcagcagcaggctggcagcagctctagaaacaaaggcagaggaggcctgtcacgtatcttccctccttccttccttcctttccttgtttcttccctttcctttctttccttttttctctttcttcctccctcccttcctttctgcctgcctctctctctttttctttctttctttcttcctttctttctttccttccttccttccttccttccttccttccttctttctttctttctttctttctttctttctttctttctttcttt

SEQ ID NO: 725145 - DNA, 633 bp, Homo sapiens
aggattaaataaggtggcagacatggagtgctcagcaggggctttagctgctgcttctcaccccacacaaaagccccttatccaacctcaagtcacagggccacctgaataaactgattcttcactagtaactgamtcagccacttgggaattaacgccaatattggccacttcgatcagcatcactccttataactctctcaccacagtggcaatgactacgcttttaacctctgggaagctcaatattttcaccaggatcttatgctttgttatttttgtcctaacattttttcccttaatttccagactcatagcccatgagctaccaactgagggtggctccgcaggactcttgatgatttctcacggtctcaggtgacgtgcaaaaccatcccggttgtcagtgctgcgccctggtcttcctttcctagaaacctactacgggaatccctaggtccagattctgagaagatggagggagcagcttcactgtacacgaacttggggaagctaaagggcaaagtgaggggcgggtgtgctggtgaagatgagggtgaatctaaaatgagaggataaggtacccaaagtatgagctggggaataaagaccactttcctcccccaggcactg

SEQ ID NO: 725146 - DNA, 633 bp, Homo sapiens
aggattaaataaggtggcagacatggagtgctcagcaggggctttagctgctgcttctcaccccacacaaaagccccttatccaacctcaagtcacagggccacctgaataaactgattcttcactagtaactgaatcagccacttgggaattaacrccaatattggccacttcgatcagcatcactccttataactctctcaccacagtggcaatgactacgcttttaacctctgggaagctcaatattttcaccaggatcttatgctttgttatttttgtcctaacattttttcccttaatttccagactcatagcccatgagctaccaactgagggtggctccgcaggactcttgatgatttctcacggtctcaggtgacgtgcaaaaccatcccggttgtcagtgctgcgccctggtcttcctttcctagaaacctactacgggaatccctaggtccagattctgagaagatggagggagcagcttcactgtacacgaacttggggaagctaaagggcaaagtgaggggcgggtgtgctggtgaagatgagggtgaatctaaaatgagaggataaggtacccaaagtatgagctggggaataaagaccactttcctcccccaggcactg

SEQ ID NO: 725147 - DNA, 633 bp, Homo sapiens
aggattaaataaggtggcagacatggagtgctcagcaggggctttagctgctgcttctcaccccacacaaaagccccttatccaacctcaagtcacagggccacctgaataaactgattcttcactagtaactgaatcagccacttgggaattaacgccaatattggccacttcgatcagcatcactcctyataactctctcaccacagtggcaatgactacgcttttaacctctgggaagctcaatattttcaccaggatcttatgctttgttatttttgtcctaacattttttcccttaatttccagactcatagcccatgagctaccaactgagggtggctccgcaggactcttgatgatttctcacggtctcaggtgacgtgcaaaaccatcccggttgtcagtgctgcgccctggtcttcctttcctagaaacctactacgggaatccctaggtccagattctgagaagatggagggagcagcttcactgtacacgaacttggggaagctaaagggcaaagtgaggggcgggtgtgctggtgaagatgagggtgaatctaaaatgagaggataaggtacccaaagtatgagctggggaataaagaccactttcctcccccaggcactg

SEQ ID NO: 725148 - DNA, 1141 bp, Homo sapiens
tttgacgaaagcactaccttccagggtctctctgggggctggctgctaactagattagcaaaggacgtttccccagatccttacccatgatatgaatgaagcatgtctataaagagaggctcagaatccattctccacactaacgatctcagcgtgctctgctgcctaacgttcacgtgcagaaaaataaaaactggaattagaaaagtcggaaggagatgaaattctagccccaaaacccaactggccaattactagccacagtaagtgtaatcattcatttttttttctgagactaaaattaaaactattattatttccccacttaatggtytaagtttaacaaatggttgtaaatattttagcatgcaaaaagctttttcttaataggagctcattcaaaatataggatagtaattaaagaaaactgctggtgtttatagtctgatactctcactattaaaatgaactatgtataaaaaaaaagtgtaccgtaaatggcaattatggtgtgggagctaaatgcagataattcatacttctcccataatagcacatgtgatcttggatgtttgatacaattcataacacaaagaaactgataacattgccaaaagaaagtcatacagatatttctagtttctattttctactgtaaaaaaaaagttcttaattatttagagtgagagtcttttttttttgctgaaatttctgtaacaaaaccacttcctttaaagatgcatgataaagtacaggccactgctcattgcaaaacacatctgtgcaaaattgctaaagaatcaattctaatatttcctttctttttagattgtgctagcttgtgctataatgctcatgaaaagtgcttctaaagttgcaaaagaaaattttgtgtggaacattagtttaggtagagcattggtttaggaaaaaaaatacacctaaatatttgaaaagatttaaccagtcatatttatactatgtggactccaatattttcttcttattaatttgtaccacagatgcttccaataaagatttgcagtggattcacataaaacacacagatagaacagacacaaagaccattaaaagaagactaaaaagaaacgagggtcaagcagtgatcttcacagactcc

SEQ ID NO: 725149 - DNA, 1141 bp, Homo sapiens
tttgacgaaagcactaccttccagggtctctctgggggctggctgctaactagattagcaaaggacgtttccccagatccttacccatgatatgaatgaagcatgtctataaagagaggctcagaatccattctccacactaacgatctcagcgtgctctgctgcctaacgttcacgtgcagaaaaataaaaactggaattagaaaagtcggaaggagatgaaattctagccccaaaacccaactggccaattactagccacagtaagtgtaatcattcatttttttttctgagactaaaattaaaactattattatttccccacttaatggtttaagtttaacaaatggttgtaaatattttagcatgcaaaaagctttttcttaataggagctcattcaaaatataggatagtaattaaagaaaactgctggtgtttatagtctgatactctcactattaaaatgaactatgtataaaaaaaaagtgtaccgtaaatggcaattayggtgtgggagctaaatgcagataattcatacttctcccataatagcacatgtgatcttggatgtttgatacaattcataacacaaagaaactgataacattgccaaaagaaagtcatacagatatttctagtttctattttctactgtaaaaaaaaagttcttaattatttagagtgagagtcttttttttttgctgaaatttctgtaacaaaaccacttcctttaaagatgcatgataaagtacaggccactgctcattgcaaaacacatctgtgcaaaattgctaaagaatcaattctaatatttcctttctttttagattgtgctagcttgtgctataatgctcatgaaaagtgcttctaaagttgcaaaagaaaattttgtgtggaacattagtttaggtagagcattggtttaggaaaaaaaatacacctaaatatttgaaaagatttaaccagtcatatttatactatgtggactccaatattttcttcttattaatttgtaccacagatgcttccaataaagatttgcagtggattcacataaaacacacagatagaacagacacaaagaccattaaaagaagactaaaaagaaacgagggtcaagcagtgatcttcacagactcc

SEQ ID NO: 725150 - DNA, 1187 bp, Homo sapiens
tgaaaatccctccagcttgattttctggcctcctgaaaatcctctctcagatacactgtgcagtcctccagatgaagcaggaattcagcttgttaacatataaatctttgtgtacaaagatgattggaactaaataattattttaccctgaagatataaaggtattacaaaaagcagatatttttctttatgtaggggttagagaaagtgaaaaaaactaaaagcattcaatattctgtctgacatattaaaatgtggatgcttaaattaatatggggtaaaaagtaaaagacatatgtatgtgtatatatatacgtatatatatatacgtatatatatacgtatgtatatacgtatatatatatacgtatatatatacgtatgtatatacgtatatatatatacacacacacacacacacacatgcacacacacacatatattttttgagacggagtttcgctcttgctcaggatgcagtgcgatggcgctgtcttggctcactgcaacctctgcctcccggcttcatgctattctcctgcctcagcctcctgagtagctgggattacaggcgcccaccaccatgctcagctaatttttgtatttttagtagagacagggtttcaccatgttggccaggctggccttgaactcctgagctcaggtgatctgcctgcctctgcctcccaaagtgcttggattataggtgtgagccgcrgtgcctggccaagagacaaaaatattaaggaaataatttacctttgaaaatatatcctgacatcggttttttcctttatttttctaaagagatcaacaatgacacaggaaactgctttgacataatcaacaaactagaaattgatgtcagtggtatcctttttaaaatgactaacttactttcagtgattttaaaattgttttcttctatatttatcatagactattattcctagtgcctgcctagtccctattactagaatttaatcagcaagctttcctccaaattaggcagtatatcccattcatttccaatagatacataaaatcaaaatgggtcaaattgtgcagcttattgcttagtttataataaatatttctatctgtaggcagcaatcatgatttagaaacagaggcacatagtacgtaacagcaaataactaaaataaactaaataacccttcagttca

SEQ ID NO: 725151 - DNA, 2328 bp, Homo sapiens
acttggatttttaagtaaaatactataaaagaagaaaaaacaaaaagaaaaacatcgttctctaaaaacaaaacaattctattcagtcaccacccctgctttcataaggaggcacatatgtatttctagtcaccaatgttgacattattaaaagttttccattgtcattttctattttgaggaagagaaatattgtgcaatatttatcattcaatgcagccaatgctcaagtgtccagctcaatagcccttcagctccctgcatagtggtccctgtagcacttcacgtttaaaaactattctatacgttaaatcagttcatcaccatcagaaccttaggaggcccaaagaatactatgccccagggcacctagcaaactgcaaagtacttgaattaaattatttcccctgaagcaaccaccattgcacctatgccatgtgataacctgatcaaagagatttgtgtttcatcaggagtcaaggataaaattggtaacggattgagagatgcttgtgagcagtgtgcagtaataattaggaatgaagtagttagctttttgtcacttggatgatcagcaattggccgctagatgcttttgaagcaacagtttatttgtatgtcatagatcttggtgaaaacaatctcactggtattatcagtgagcagatctttcaaaaatgaaatgggagccccatcaatgagttgcacacactacccttttaggacagaagggagacatacacttggtgttttgtgctgaggatatttgtgattgtgccaggagttcagagctgtaactcattgccataaaaccccatgttttttcttacaaatagatgggccaaaccagcatgctcactgtttgtagaatacttgtaattgtttacacaatccttgtaatttcttccagtgatgagggatgatgttccccagcggagagaggagggagaggctgaaccaagcgactgtgaggtgtctcagacattcgtgcagcaaacgtggtaccaaaggacttacgcaaggtcttctgtgcacacaggcacctgctcagtcctgttccagggtcaggttctgggcatagagacaagaagcagatgggactggaagctatgactgttccctccccgttccttccaactcctgctctaaccacacaccctgtgcactgtacagatgcagagatgatgtcaccactgtgggtgtttgaacactggatccagaagtggggatggcactcaggtcccccaccaccatccttgccttgggcaccttcctcgttgaggtccccatgatgagatgaagaaaagcttcaaggaccaacagtgagcagagatgttgggttcacccactaacccatttctctgcccctgagtcagattccagttctttggctgcctgcaccaggggcaccaggctgccaccacccagcaggctcatcagcctcagagaactatccagacctgagagtcccaaagggcaattccaacagggaaacctgtagaaccagcaatgatttaaaacaaaaaaaaaaaagcaaataaacccctcagaaatgcaggccgtttcctcatcttcattttggacctgtcttccttgcaaattccttccaagaagagaagactcttcccgctctagctgtctctgctttgccgaggttacttggtcattggtggtattacccacttcaatacggaattagcagcaatgtctcctccaatgtgtacttacagagaatgacaaatgcttcatgtgaatacaataagaaaatgcttgtgtactttcagcacctagcacctgcccctggggagtgcaaatgaagtggtacagttcccccgatttcaataatttattacatctttgctataaatgaatgaagaggaaagccactcattatccattttgagacgtgaacarggactaaaggcagagccatgggctgcacaaaacaaaaaatgattgggattggaaccttcggctctcagatgtttcacctgagagtgctcttccagcgcccaggagcccacggcagcagcgtgagccgagtcacgcacagccaccctcctaggaacctgatattttaaaatcaccaaggattttaattaaaaggaaattccatgtacaaaagtaaaatacatatttcctttttattctctcctcagaaggatctcatgatagagctttgttcaattctcttggggtatctttaagacatgagtcacaagtacggcaggagagcctcctttctgtgatgctattggtctgcagtgctcacgtgcaacgagtgagcccgtctttcccagtgagggccatgggggctcttcctgtgtt

SEQ ID NO: 725152 - DNA, 752 bp, Homo sapiens
tgttagaatcatcatactgacattctctcagtatgagcaatcagtaggatatgttccgaccatgctaggtgatgcaaacttaaaattaattcagaaaattgccatttgaagatttctgaagctatagttcatttcatctgagcgtgtgattttgagaattctaatcatctctaattactttttattttattcttcacaattgttacgaattgctcccatgaataggaggaccgtcgatgaatatttatcaagttttcacttactctaaagaatgtggttttatattcctatcaaatgtttagtcttccacccaccctctcattttctcttaaaggaatcttggcatgattgcttaaattctagttcactaaagaggctacatttgctaatggtagcatcaaaaatgtgctgattggaatagctccttaacttgatctatggcccaggattttgrattttacaagaaaaataagaagggtggtaggagaggctggaaagggtagcagggaggagagaataaagaggggatgattaatgggtacaaaaatacagtaagatagacgaaatgagaaggagaattcggtagcaactattgtaacagtgtattgtatatttcaaaatatgtccagaggcagggctcccctggaagcttgtggcctccagcaggacaacagtgcatacaggctactggccccccgtacccccagccttcccacctgcagcacacacagaggatccttggaaagatacct

SEQ ID NO: 725153 - DNA, 752 bp, Homo sapiens
tgttagaatcatcatactgacattctctcagtatgagcaatcagtaggatatgttccgaccatgctaggtgatgcaaacttaaaattaattcagaaaattgccatttgaagatttctgaagctatagttcatttcatctgagcgtgtgattttgagaattctaatcatctctaattactttttattttattcttcacaattgttacgaattgctcccatgaataggaggaccgtcgatgaatatttatcaagttttcacttactctaaagaatgtggttttatattcctatcaaatgtttagtcttccacccaccctctcattttctcttaaaggaatcttggcatgattgcttaaattctagttcactaaagaggctacatttgctaatggtagcatcaaaaatgtgctgattggaatagctccttaacttgatctatggcccaggattttggattttayaagaaaaataagaagggtggtaggagaggctggaaagggtagcagggaggagagaataaagaggggatgattaatgggtacaaaaatacagtaagatagacgaaatgagaaggagaattcggtagcaactattgtaacagtgtattgtatatttcaaaatatgtccagaggcagggctcccctggaagcttgtggcctccagcaggacaacagtgcatacaggctactggccccccgtacccccagccttcccacctgcagcacacacagaggatccttggaaagatacct

SEQ ID NO: 725154 - DNA, 653 bp, Homo sapiens
ccctactctcccgctgctccacatctgtccccggggaactgagcacagtgggaggaaaacacagatccctattgctagtctttctgtatgtgggcagccaacatcctgaaagggtctttggtggggccagggcctcccactatgaatcccttccgtccactccccgactttcccaaaagaccttgwcacaccttctcctctggctttaaacctcgaagccctcctccaaaatgctccctccctgataatgagctccttccaacttcatggagaaaccggaaacccttgaaatgaaatccgttctgtacccaccctcacgtttactacgtcagagcctctgtcttctctcccgttaagattcatctgttcttgtctccccaaagctaatccctgcacctgtgccaactccttccccctcccacacgctcaagggcaccatccaacaattgccacattttctctcgctcctgggtcattccgtgagtataaaaacatgcagtcatagccctcatcatttgtcagaaaatgtctttatttcacatatacatgaaagcaccctgtgtttgtgaatgacaatattagggtgagaacaatctaaaaatattatcccactcttttctggcttccatttttttctgttataaaacctacaa

SEQ ID NO: 725155 - DNA, 2012 bp, Homo sapiens
agttttagaagggtaaaatataaaaaccaaaatcactccatacctttactgagaatggattgaagtcttcccttctgtccccaaactctggattgggagtgatttcttacattgggctttatctggaaagtgagttttcgtcaattgcttcatttccaaacacaagacaggatgargaaggacatcagctacgcatggaaaacatttctgagcataaagctaattacttacaacttgtacttaagatggaaaaagtgcccattttcttgctcaatgacccattttatgtgctcttgtgggttgtgggcccccccacaccaccctgcgaatgagcagacacacaaagaaggctggtccagctcatgcactcatgcctctgtcagactttcaaagcccataaaagtcatgccaaaatggcctgaaagaaaaaactctgatcctcatcctggaggggatgtaaatcccaaacccacctcgatgggtgctgccacttgttctattctccaaaaatgatctgtagatctgagaagttaaaatggcccgttcattttattttccactctcattttactttaggtgatgttaatgcctctcctaatgatcctgaggacatttgaagatggagctctggattcaaacctcagccaagacaaaatgtggtggaagggccatcaagacacagggaaatcaagagtgttattagataaaatcctataatgcagaaacttgtgcttaatgatctagagttatatgcctgcaacatcctgaaaaggagattttttgcacacatttcttctggcacagagtcaaaatgtaccagctgagaatatgaggggactaagattctgtaacagcaagaagaaccccagatcatcctttggaatctataaggctggtgacatgatttcaaatccaacccgttggatgtacttccgttgaagtacatctccttccaagctcatatcattccttgaattccccaaatctcccaatagttgaaatttcccagccgccatcactctggaatgaatgtgaaataatcacgccagatgcagcggtctgatgccaattccaagctgtcagcttaatcaggaaagtgccgatggatctgtcctcccattacattatccgctcaagctcccttcaaggcatcatcaatttctataaaatactgtactctgcattgcccacagacaactttctgccgtttgaatcaagtgagagttgaatttcagcaatgctctgatacagacaatgtctgcacatctccagctacttcggtgaaaagcgaaggcttcacggtgagagtcacgtgactcaggaatgaagaaaaaatacctgaacgaggcagggagattttcatgtgtggatgaagcttctgacgaggcttaacaatgaggatccagaaaggatcaaaatcactcattcataaagatatttctttagttaatctctgccacgcactacatgtgaagagaagaatataaaatttaggcagcaaggattactattattaggctaatagttgctgtgactgggagctatgttccagctgctctactcagcacgctgtatggatcactgaattctcaaaataaccccagttgttctgttactatccttattttattggtgaggaaactaaggcacagagaaattaagtaacttgcccaaggtcataaacagtgagtggcagaattgaaacgaggaccaggcagcctgaccttcagaacccacactctgcagaccacaccctaaggagtaaggtgaggaccctgtcttcaagccattcacatcttaaactgggggaggagacagatatgaaaacattgataagagccactatcatgagactctcactctggtggataagagacaagatttagctcccttttgacagagctcccaaatagatgaaatatgtaacacactgtatgtcaagcaatgaaggacactggtcctgaaaagatgaaaaaacaacaaggtgagccctacgattgcccccagctctt

SEQ ID NO: 725156 - DNA, 1328 bp, Homo sapiens
attaagcagggtcgggcctggtgaggagttggatgggagacttaagttctactcccagtgttcctcctatttttcttcttatttctggattgattttgcatctttgtatcttgccagcatgagtatactctattaacaaatacttatttttttttctgtttgtaaatggaattatattcattgtagaaagctgaattcagagaagtttaggattaaaaataagttataatgttgctacataagttaaattgtgatattttctttttagtcttgatttcatgaaaaacaacatatacttatggctagaatttatgcttcttccttgaatttttctcctgctgtttcctcctaaaagcaggtagaagcccctgctcctccttaactgagtgagggtggctagtggcagggcagggcagcaggctagggtcgcctacaggacccttcttgggctgcctttgtgtccatatgaatggtcattgatggaagtaagggagaacttctgcagactagtgagtgagtgaatgcccagccctgggggtcccagaatggccctaacctgcattccacctggcaggtatggcaagaccagttaaggcggtgcttttaaaactgaaatatgcacatgaatccctagggctctggttgacatgcagattgtgatccagtcgtgcccaagtgatgcaggtgcagctggtccgggccacaggcagcaagtccccagggggaggtccaggtgctgcccatgcagctggaccatgaaccacatgtaccaaggccctagggaatggtccaaggctgggccctggggatcctgacstaaagttttcccaggcttgtgacctttcctggctctcacagaaagaccagagcagtggatctgacaggaccacaggggtggggcaatggatgtcttgggataatcactgtacacacatgagcaaagatacttgggtcttggatgagactcagaaccttgacaaaattccagagcatgggaggaggaaggtctgaggctgatcaaggctgaatttcttaaccttacaggactggggcttagaggtaaaattaagttgatttatagaaaataaagaagtgtgctctttcttacatacatgaaactgtgaactaaaatttttaatactatatttataatgtacatttaaatttgcatgttgcatgtacatttttaaaaattttccttccacttataatactatggacattttcccaacttatgaaatagtctctgaaaataccattttttaatattccattctgtgacagtagggacctggtccattgtgttcagtacagtatttgagtactca

SEQ ID NO: 725157 - DNA, 2451 bp, Homo sapiens
ttggatggcaaagatctacagcatctcattaccttgatattcagatgtgagaatacttttttgaagtgagtcagacaaaagaaggctataaatgtcatatattttgataagcactgttgacaattcatatccacccatttcacagccatagattcaaccaaccttggatcagaaatatttgaaaaataaaagcaataaaaaataacaatacaacaataaaaatattttttaaatacagtataataacttttatatagtatttacattgtattaggtattataagtaatctagtttgtttaaattatacataaatatttgcatagggtatatgcagatacagttttcctttgaacaacatgggtttgaactgggtcagtccacatatacatagatttttttaaaatataagttacattgagtatatcttcctctcctgcttccccctccacctccacctcttgcatctcttccttctctgctacccttgagacaagaagtccaacccctcttcttcctcctcctcctcatcactgtgaaggcaataaggatgaagaactttatgatgatctattttcacttaatgaatagcaaacatattttttcttatttatgattttcttaataacattttcttttctctaacttactttattgtaagatgtttatattattgcaaggcttccagtcaaaagtaggctatttgtagttaagttttgagggagtgaaaagttatacacagatttctgactgtgagaagggggtgaagtcctagaatccatcctctctcgatgccaagcgacaactctactggtctccatagaggcaacaaggttactggagacaagtataaacattagagcctacagtggctgagtcgatgtattagttagcattaactttggcatgttatctttcctcttatttgctcactttacccaacaataaaatgagaataatactaatacttatttcacggagtagtgaatccaagtatataatatttttaatacaatgtctggtacataggataattattgtaggtattcttgttttactcgacttgctatctttatgtagatcatttaacctatatcacttacttttatggttaaaaaatcagtttggagtaattattcattgtagaatgcattgctacacaataagcgtttyttggatgaatatgtgatggtcaagtaaaaggtgtgcattttcttttgaatatactctttgtaagtctgagtctctcaccttctcagaactattaaaatccaaaatcaccaactaaaattttggctatctcttcgatatatttaatattaaatgatatagtatcacaagatgctacatattttaataccaagtgtattagtcaggattctctaaagggaaccaataggataggtgtatatataaaggggagtttattaaggagtactgactcacattatcacaaggtgaggtcccacaataggccatctacaagctgaggagcagggaagccagtccaagtcccaaagctgaagagcttatagtctgatgttcaagggcaggaagcatctagcacaggagaagatgtaggctgggagactaagccagtctagtccttccttgttcctctgccagcttttattctggcctcaatggcagctaatgagattgtgctcacccagattgagggtgggtgtgcctttcccagtccactgactcaaatgttaatctccattggcaacaccctcacagacacactcagcaacaatatttcgcatccttcaatccaatcaagttgacactcagtgtgaaccatcacaccaagctatccattttttttccttccatagtatttaaatcaagtttctgaatattgtcatgtaattttttggttttcactggacaaagtgcttcatccttgtttatcctccactccattttactttatgtatgtatgtatgtatgtatgtatgtatgtatgtatttatttatttatttagagacagtttcactctcgccccccaggctagagtgcaaaggcacgatatcagttaactgcaacctccacctctcaggttaaagagattgtcctgcctcagtgtcccgagtagctgggattacaggcgcccaccaccacacccagctaattttttgtatttttagtagagacagtgtttcaccatgttggccaggctagtctcaaactcctgacctcaggggatccacctgccttggcctccctctccacttctttttaatctttatttgtcatgccacttgattcccatagtcattgtgggctttttttttctctctgaacttctaatctatctacatttctttgctactgaagcagtttaaactgaatggcactttgatgcagttcaacagaattacataaggaaggctatcacccatgtgtcccatggtgtcatgagtctttgcctgcagatcaaagtaac

SEQ ID NO: 725158 - DNA, 600 bp, Homo sapiens
tcccaaccggtcttctcatatcaaatgttttatcctttcaggcaacacccctcataatcttcatatgaacagcatgaaaaaagctgacatgtttaaggactaaatttcccaatctaccttccatcttgtttttcacacacagaacttccaagcagaatcaccctccaggttagaggacagaggtgagtatggagaagtggcagccacacaggccatctgaaagcactggtagggaagcagcttggttatccagtggcagctttcrtggatgtccttctgccctggttttcaaccttgactggtgcacaatcatcactcacagcttttttgttttgtttcaataccatggctgggccctgctccagatcaattaaatgcagtctctgggggtgctgaccaagtaccagtacttttgtaaaacactccaggtgattctgacatgcagccaggattgggaaacattactctgaggtccagctggtccctaagtttctagttgccaagcctaggccatggtagctgcagctcatcctgattcagcagctttcctgcatgaccagtgtagttcttgagtaggaggtggtggccacagacacagca

SEQ ID NO: 725159 - DNA, 600 bp, Homo sapiens
tcccaaccggtcttctcatatcaaatgttttatcctttcaggcaacacccctcataatcttcatatgaacagcatgaaaaaagctgacatgtttaaggactaaatttcccaatctaccttccatcttgtttttcacacacagaacttccaagcagaatcaccctccaggttagaggacagaggtgagtatggagaagtggcagccacacaggccatctgaaagcactggtagggaagcagcttggttatccagtggcagctttcatggatgtccttctgccctggttttcaaccttgactggtgcacaawcatcactcacagcttttttgttttgtttcaataccatggctgggccctgctccagatcaattaaatgcagtctctgggggtgctgaccaagtaccagtacttttgtaaaacactccaggtgattctgacatgcagccaggattgggaaacattactctgaggtccagctggtccctaagtttctagttgccaagcctaggccatggtagctgcagctcatcctgattcagcagctttcctgcatgaccagtgtagttcttgagtaggaggtggtggccacagacacagca

SEQ ID NO: 725160 - DNA, 582 bp, Homo sapiens
aatattcctgccaggaggtctctcatttgctctttcctctgcttgaaatgctcttcctcaaatattcacttggatcaccatcccacattcttcatgtcttgactcaaatgatacctcctaagaggacttaccagcccctactctagtctgatcatgattagcttatctagaattcttttctttggaatcattattacaatctgagattatatttaatttcaatcttgttattacaagcggtatgagagtagttcayggtcacatccttactgtctagaacagtgctcagcatatggtagtgtaaaatttattttaaaaatttaccttcagatacccctctgtgatcagtctgattttccatcttttataggaaaggtaactgagactcaggatgatcaagtcactttgtcaagatcacatagtaaatgatacagcctggatttgaagactgatctgacagtaaatcttacacttctagctgctataccatattgctttcctttttatgctatactgtcttcactcaataattttggaaattaagaatgctgaaatttccataaacattaacgtttttagaat

SEQ ID NO: 725161 - DNA, 1510 bp, Homo sapiens
taattacactgataagttgtatttatatgttcctttgtattttcccaagtcattttatatacattatgtcatctgaaagaaactaaaatattacacaggaactgacatttagaaagaatgctttatttgcacagctgtctgatagggaggtttgttgtagccaactatatttcctatgcacctggttcacctgtttttataggaatattttaattctttacttttcagtttaagtggcagcaatatttttgaaatgacagttcgacttgaaagtgaaaaaatatagttatttccacctggaggtcatttttgtccattttactaaatgtgctcatcttttttaatcttttagtggaaaaaaatgccaagagacctggtagtatcttctgtggcactcgtgatttttttttttcacactttctcaaaaagtgcttactacaaagaatccaacttcccttcaagtaatgctttttaatgaaaacaattattttctgaattttgactatctgctgaacagtttccactatgacaaaacccaagacaagatccgtaagagttttacattgctttcaaaattttgatttccgtaagatacatctgcttcttttttgaggagtttaaggaaatcaagcttttcatatcattaatttatttctcctctgctggtaaaaatacaggtactttatccaagtacgtgatgctattgccttgggaaacaacagagacaaacgctttaactcycattttatgtccaccctcttaaagattaaatattggtgggaaatttgaaatcactctggggttgcagctaacttcagtttctgtcaagctccctgttccttgtcttggacttcatattagccacatgtatcctggtcatttaccagtaatgaggtgaagatattttatcttcagacttttggggtttaagtcaggattttaacaacttaggtactgctctttatttcaatttcttcacctaaaatgggaacaataatagtccttaactcagagagagagagctattgtgaggagtaaatgagagaatgtttagaaatagttttgactaattactgccatatactcagggctagataaatatttccatgatagtcattttacctagtccataaattttactttgaaaaaaatacttgcatagttataatttgacagataatattaatgttaatacaattagtatctaacttttcctctgtattatgtacacttaacatatttaacctttgtaataattatttgaggtaattaatattttacagaaaaaaataacaagaggctaaataatatgtccaaactcatacagtgcttgtttgcttcagccccagagtcgatgagatttctgtaatacatactaaaatactgcctttctggtaatcgcattccttcctgaaaatacccactcataaatctcagtttattccctcccattttttttcttgtatttatgggtattatttgaagggcaatacaaaatctctggcttaca

SEQ ID NO: 725162 - DNA, 945 bp, Homo sapiens
ggaaaatatagaaggacaaaaaacatttaatgtccataattttaccaccaagagacagtcactgttaatgctttcctgtggaaccttccggacttcgttctatgtctgcatgtgtgtgtattttttaataagatgatgcattataaaacataggactttgtaatcccttttaatttaaatatatattaggcacattttctgtgacttaaaatacaagtcaacaaagttattgttcttgattaaagagtattacgttttacagatgtcccaccatttacttcatcactctcttattttagacattttggttatttccagcatttaaagattataactaaagcttcatgtgtgtctctcatagtgtcatgacctggctgctgtttaaatgctctgctaagaaaaatggggatggggtggaaggtcagtgaggaatcagggaatcccctaagagacagtggcaattaatccgggtcagaggtgatgatgacttygcttacgatgttagaggaggaggtagtgagaagtggtcggagtctggattcattttatctttctaaaagctaacagagcttgcacatggattagattgtggggtgtgaagagagaaagaagtcaaggatcatcacattaagaggacaaagaagaaaaaatgaacaacgcagtagatgcttaaaggggcattgttaagaggcaatatccatttcagatttaaaaataaaaaactcttggctaaaggaatggaacaaagtcttgaaatgataaataaaaacatcttatttattttgtctgttcagccactctgttaccagattaatgagtccttgttgtatacagccgcaggttggagcaaacacttgctatgaactgagaggggcccgctgttactatgggagaaatcttagagtaaggtcacctgtgacagcaaaagcaccttcatcttcaggg

SEQ ID NO: 725163 - DNA, 645 bp, Homo sapiens
ttttccagactccgctcccattctttctacatttatccctgcattggtaactgcttcatctttaaccacatcctttctagaagttaccaggctattttatgccatcatactttagttatactgtygcttctgcctagaattcctattatgattcccattttccattcctcatcccagccctgccttgcaaagtctgattccttttttttttttttttttttttgagatggagagtcttgctctgtcgcccaggctggagtgcagtggcacaatcgtggctcactcaacctccgcctcctgggttcaagcaattctctgcctcagcctcccgagtagctgggattacaggcacccgccaccacacccggctaatttttgtacttttagtagagacggggtttcaccatgttggccaaactggtcttgaactcctgacctcatgatccacccacctcagcctcccaaagtgctgggattataggcgtgagccacagcacccggccgattctttcttgattcctatccgagaagctttccctggtgctactctgcactccacaagtaaagtcatcatgctctcctttgccctcccattttgcagtgctcattcgttcatgcttcagcactgtctgttgagcgccagcc

SEQ ID NO: 725164 - DNA, 1321 bp, Homo sapiens
tcctactctttaacaacttattaacatttttcccttgtagttagtttttgagatatgctgtttaagtaggagagttaaggttgatttaggtaatagaagaaaatgtaagttttttgtttttttttcctcattaaagcataccagcatgtactgtgatgataygtgtatttatttggtattaagctttaaaatatttttattactatgcattattgaagcatcaagtaaagcatagtaggtacttctccaaaataagaagtatttgcttaattatttatttcagcatttgtcataaaaacagaaaacaataactttctatattcttttctataccagcaggatgaggtagcctaagatcaattagtgttttgaagcacttactcacttaattttcatttattttcctctctttggtctccatctatcactgttgccaaaaccatttttacttacaaggcataattgtgtcctaacctttagttaagaatatttggtcagttactattttttatttttatttttcattaaacaactctttttagagacagggtctcactttgtcgcccaggccaaagtacagtggcgtaatcatgtctcactgtagcctcaacctcctaggttccagcagccctcctgcctcagcctcccaagtagctggcactacaggtgtgtaccaccatacccagctgatttttaaatttttttgtagagatataggttcttgctgtgttgcccaggttggttagctaccatttttttaaaaatgtatctcaaattcagcatcagtcttttttttagtgaaaacacataaactgttattcaaagtctataataatttggttatggtaaacaacgagggtttagaatatatttgttttacaaaattgttttctggttgcagaacttgaaaccctgctccctatagttgcattaaaaaataaaatgtctcttttaaaattctgtcaaagaaagatttggcttggttgtttcacctgttaaagatgtagcataaatcagtaataaaatttatttgtactttccatgtttatgtaaagcatttgatttttgacattggagagtaatgtaaattaaatatatttgatattaaatattctaatttttagaattctaattttaattctcaatatttagaatattaaatattctaatttaataaatattctaatttttgctactctcatttttatcaggtattcctttcatatcatgtccccgatacctgattattttcattaatgccttggccttaaatataagtgatagttttttcactaactatactctgtaaatatagcatgcc

SEQ ID NO: 725165 - DNA, 1321 bp, Homo sapiens
tcctactctttaacaacttattaacatttttcccttgtagttagtttttgagatatgctgtttaagtaggagagttaaggttgatttaggtaatagaagaaaatgtaagttttttgtttttttttcctcattaaagcataccagcatgtactgtgatgatacgtgtatttatttggtattaagctttaaaatatttttattactatgcattattgaagcatcaagtaaagcatagtaggtacttctccaaaataagaagtatttgcttaattatttatttcrgcatttgtcataaaaacagaaaacaataactttctatattcttttctataccagcaggatgaggtagcctaagatcaattagtgttttgaagcacttactcacttaattttcatttattttcctctctttggtctccatctatcactgttgccaaaaccatttttacttacaaggcataattgtgtcctaacctttagttaagaatatttggtcagttactattttttatttttatttttcattaaacaactctttttagagacagggtctcactttgtcgcccaggccaaagtacagtggcgtaatcatgtctcactgtagcctcaacctcctaggttccagcagccctcctgcctcagcctcccaagtagctggcactacaggtgtgtaccaccatacccagctgatttttaaatttttttgtagagatataggttcttgctgtgttgcccaggttggttagctaccatttttttaaaaatgtatctcaaattcagcatcagtcttttttttagtgaaaacacataaactgttattcaaagtctataataatttggttatggtaaacaacgagggtttagaatatatttgttttacaaaattgttttctggttgcagaacttgaaaccctgctccctatagttgcattaaaaaataaaatgtctcttttaaaattctgtcaaagaaagatttggcttggttgtttcacctgttaaagatgtagcataaatcagtaataaaatttatttgtactttccatgtttatgtaaagcatttgatttttgacattggagagtaatgtaaattaaatatatttgatattaaatattctaatttttagaattctaattttaattctcaatatttagaatattaaatattctaatttaataaatattctaatttttgctactctcatttttatcaggtattcctttcatatcatgtccccgatacctgattattttcattaatgccttggccttaaatataagtgatagttttttcactaactatactctgtaaatatagcatgcc

SEQ ID NO: 725166 - DNA, 1996 bp, Homo sapiens
ggattacaagcttgagccaccgcacccggcctgttttaaacatttgtttaagttctctgaccctcctccaatttcttggtatctttagcctagtgtaccttcgttgaaaatagatatttcagcatatgtctttaagaataaggacattcttccaaataaccgcagtgatcatacttaggaattcaacattgctgtaacatgaatatatatagtttagattcagatttttctagttgtccccaaagtgttctttatagacattagattttttaaaaatttaaactgggatgagaccttgtgacattttctctgaccaactaaccaattaggtgccacctagtgacttatgtgctagtgacctagtgctcttatatgtgttgcagttgtttatttacatgcctgtgaactctgtggctgggacccaagtgtctttatttttttagtgtccctagcccactgtctagttcatagtcatcacaaaaaatatttgagtgtatgactttttgccaggcttatgctagttactcccctacccactaatttttattattattttgacgtataatttatgtacagtaagatgtacagcttaagtggatagctagattaatttttatgtatgtattcacctgtgtaaccatcgtctgcatcaagatatacaatgtttccagccctcagaaggctctcatgtcctctctcttatcaatactccctgacagaaggtagcaaccaattatgacttctgtcaccataggctaattttgactggttttgaacgctataaaaataaatcatgtaagtatatattcttgtttctggcttctttctctctacattatgtttgtgagattaatccatcgatgtgtgagccatagtactttttttctttttatttctctgtagtatactattatatacatataccacagtttatccattctcctgttgatgggcaatcagctaatttctgttttctgtctgttataaataagcctgctctggacactctagacatttttatgtgtgccttttgacagatgtaaggactaatttctattgatacatacccaggaatgggatttctgagtcagaaggtggaggtatactaaacagtagtttgagaggttgctgggtttttttttctttttttttttttttttaacttatttatttgtttttttagacagggtcttgctctgttgaccaagctggaggacagtggtgaaatcacagctcactgcagtctcaaactcctgagctgaagggatcctcctgcctcagtctcaggagtagctgggattataggtgtaagccactgtgcccagcttggttgctggcttttaatattgaagtgacactaaatcaaggaattgagctacctaggtcaaatgttaccaaggattttagcttgctaaakggatcagaaataagttgctattatatatgattgatttgtaagactagtagttctcataactgtagggttcttaagaatcaactgagtgacttgttatgaatgcagatttccttgggcccagtccagagattctaatagtgcagttgagaatgggtctcaggaatctgcagattacaagcacccagttaattttgaggcaaaagcttatgaacctactttaagaaacagattgtttctatgacctctttaaatttaattcttaggacactgtgtgtttcatatgaaccatgtttcagtatactgcattctgtattgagattatggaaatgcgtggataacatttaaatgtgtgattccattgaccagtcattgggtgcaggctgacagtgggaaggaggtgtgactttgggcaagtaggctccagtaagaggacttggctgagagctgtcagcaaccagcactcccagcagcagcagtgggggctatgaatgccttggtcctgaatggggagtgccagggagatctgggcagcatactgcaacatccactacagatgaagccatggttttgaatatcgag

SEQ ID NO: 725167 - DNA, 1392 bp, Homo sapiens
acattttctttgcttaaaatagaaggtagaactttattattattgaaattctaaaattattattattattattattatgagcacccataatgccagtgacgtgggagtcacttacattggcattaggaagctgaagtcctgtttttagttggaatataattatggggaagggaattctactactaccactctaactactctggagcttaaaggatggcagttgtgatgattcttcagggaaatggtgaaggaaaatcttagctgtttatgtgcttataaggagaggtccgtgcttccccctccatttttttgtcatgaaaaatatggaaccaaaggggaacaaaaagtagagtgctagaatgtaaactccttgagagcagagtttctttttcttttcttttttttttttttttgagacggagtttcattcttattgcccaggttggagtgcaatggtgcaatcctggctcactgcaacctccgcttcccgggttcaagggattctcctgcctcagcctcccgagtacctggtattacaagcaccaccaccatgtccggctaatttttttgtatttttagtagagacgggttttcactatgttggccaggctggtcttgaactcctgacctcgtgatctgcccgcctccgcctcccaaagtgctgggattacaggtgtgagccaccacatacagcccgagtttctttttcttatttgttcactgatatatcccaaaatcttagaagaatgcctgacacttaggtaatcaataaatactaaatgaataaatattaaatgaatttaatagttgcccatgtttattagcagattcctttattgataacrgaagccttaatagcttttgtcaatttgaattaatctcttaatcaaaaaataatttttgatttcagaaaataagcttacatttttaaagatttagcatgaaaaccatgagctgatgtactagctatacactgcagtttctttttagcagtattttaaatcccaccaattttacgtagattagcataaataatctctcttctatgtacatttaattaataggctttaaatatgatttggtgaatactttgcttttatattttttaagaaagatgagcattttcaaagtgattgaaattttaaaagtattcatcttgtgtagtacttatttgtatctagaatggatttttctttcaaaattaaggatatatacaagttcagaaaactgtcatataagctatgtttttgaatgagatggccatgatttccttgacttggaagcatgatttttcatttatagttttgttgtttttattgttgttaatcagaaagaattattttaaatcagattacaagcaaactttttattaagcaaaagctttgtataagt

SEQ ID NO: 725168 - DNA, 1392 bp, Homo sapiens
acattttctttgcttaaaatagaaggtagaactttattattattgaaattctaaaattattattattattattattatgagcacccataatgccagtgacgtgggagtcacttacattggcattaggaagctgaagtcctgtttttagttggaatataattatggggaagggaattctactactaccactctaactactctggagcttaaaggatggcagttgtgatgattcttcagggaaatggtgaaggaaaatcttagctgtttatgtgcttataaggagaggtccgtgcttccccctccatttttttgtcatgaaaaatatggaaccaaaggggaacaaaaagtagagtgctagaatgtaaactccttgagagcagagtttctttttcttttcttttttttttttttttgagacggagtttcattcttattgcccaggttggagtgcaatggtgcaatcctggctcactgcaacctccgcttcccgggttcaagggattctcctgcctcagcctcccgagtacctggtattacaagcaccaccaccatgtccggctaatttttttgtatttttagtagagacgggttttcactatgttggccaggctggtcttgaactcctgacctcgtgatctgcccgcctccgcctcccaaagtgctgggattacaggtgtgagccaccacatacagcccgagtttctttttcttatttgttcactgatatatcccaaaatcttagaagaatgcctgacacttaggtaatcaataaatactaaatgaataaatattaaatgaatttaatagttgcccatgtttattagcagattcctttattgataacagaagccttaatagcttttgtcaatttgaattaatctcttaatcaaaaaataatttttgatttcagaaaataagcttacatttttaaagatttagcatgaaaaccatgagctgatgtactagctatacactgcagtttctttttagcartattttaaatcccaccaattttacgtagattagcataaataatctctcttctatgtacatttaattaataggctttaaatatgatttggtgaatactttgcttttatattttttaagaaagatgagcattttcaaagtgattgaaattttaaaagtattcatcttgtgtagtacttatttgtatctagaatggatttttctttcaaaattaaggatatatacaagttcagaaaactgtcatataagctatgtttttgaatgagatggccatgatttccttgacttggaagcatgatttttcatttatagttttgttgtttttattgttgttaatcagaaagaattattttaaatcagattacaagcaaactttttattaagcaaaagctttgtataagt

SEQ ID NO: 725169 - DNA, 1392 bp, Homo sapiens
acattttctttgcttaaaatagaaggtagaactttattattattgaaattctaaaattattattattattattattatgagcacccataatgccagtgacgtgggagtcacttacattggcattaggaagctgaagtcctgtttttagttggaatataattatggggaagggaattctactactaccactctaactactctggagcttaaaggatggcagttgtgatgattcttcagggaaatggtgaaggaaaatcttagctgtttatgtgcttataaggagaggtccgtgcttccccctccatttttttgtcatgaaaaatatggaaccaaaggggaacaaaaagtagagtgctagaatgtaaactccttgagagcagagtttctttttcttttcttttttttttttttttgagacggagtttcattcttattgcccaggttggagtgcaatggtgcaatcctggctcactgcaacctccgcttcccgggttcaagggattctcctgcctcagcctcccgagtacctggtattacaagcaccaccaccatgtccggctaatttttttgtatttttagtagagacgggttttcactatgttggccaggctggtcttgaactcctgacctcgtgatctgcccgcctccgcctcccaaagtgctgggattacaggtgtgagccaccacatacagcccgagtttctttttcttatttgttcactgatatatcccaaaatcttagaagaatgcctgacacttaggtaatcaataaatactaaatgaataaatattaaatgaatttaatagttgcccatgtttattagcagattcctttattgataacagaagccttaatagcttttgtcaatttgaattaatctcttaatcaaaaaataatttttgatttcagaaaataagcttacatttttaaagatttagcatgaaaaccatgagctgatgtactagctatacactgcagtttctttttagcagtattttaaatcccaccaattttacgtagattagcataaataatctctcttctatgtacatttaattaataggctttaaatatgatttggtgaatactttgcttttatattttttaagaaagatgagcattttcaaagtgattgaaattttaaaagtattcatcttgtgtagwacttatttgtatctagaatggatttttctttcaaaattaaggatatatacaagttcagaaaactgtcatataagctatgtttttgaatgagatggccatgatttccttgacttggaagcatgatttttcatttatagttttgttgtttttattgttgttaatcagaaagaattattttaaatcagattacaagcaaactttttattaagcaaaagctttgtataagt

SEQ ID NO: 725170 - DNA, 624 bp, Homo sapiens
  misc_feature 524, 525, 526, 527, 528, 529, 530, 531, 532, 533, 534, 535,536, 537, 538, 539, 540, 541, 542, 543, 544, 545, 546, 547,548, 549, 550, 551, 552, 553, 554, 555, 556, 557, 558, 559,560, 561, 562, 563, 564, 565, 566, 567, 568, 569, 570: n = A,T,C or G
  misc_feature 571, 572, 573, 574, 575, 576, 577, 578, 579, 580, 581, 582,583, 584, 585, 586, 587, 588, 589, 590, 591, 592, 593, 594,595, 596, 597, 598, 599, 600, 601, 602, 603, 604, 605, 606,607, 608, 609, 610, 611, 612, 613, 614, 615, 616, 617: n = A,T,C or G
  misc_feature 618, 619, 620, 621, 622, 623: n = A,T,C or G
aagtatcacccaaggacagctctctgactcgcccacattgacatttggtaactggcctcgcctagggactcacccatcacccctcagtccccctgtgaagccttcagacagaggcccacctcatggagggctccagccgggtgctctccaatgtgcctgcccatttctgctcccaccagccaaatcaagcatgtcccaaaagccattatttctgtccccaaacctgtttgccagttgtgcttgttattgtaagtatgcagtttaataaaatatgacacaaaacaatgaaatatgatgtgaaaagaaagagttttcttcttttcttaaaaatccaggttgaacactttggaagagtttggtaacaggaaacagctgaaaaaattgccattgagcaaggcatagaagagacagactataaagaatggtgctggcgggcagggtggagggctrttctggaaggaatctacccttgattggttcttaagagccaggaagttctcactccactttaaataaaccaaaannnnnnnnnnnnnnnnnnnnnnnnnnnnnnnnnnnnnnnnnnnnnnnnnnnnnnnnnnnnnnnnnnnnnnnnnnnnnnnnnnnnnnnnnnnnnnnnnnnna

SEQ ID NO: 725171 - DNA, 1585 bp, Homo sapiens
  misc_feature 531, 532, 533, 534, 535, 536, 537, 538, 539, 540, 541, 542,543, 544, 545, 546, 547, 548, 549, 550, 551, 552, 553, 554,555, 556, 557, 558, 559, 560, 561, 562, 563, 564, 565, 566,567, 568, 569, 570, 571, 572, 573, 574, 575, 576, 577: n = A,T,C or G
  misc_feature 578, 579, 580, 581, 582, 583, 584, 585, 586, 587, 588, 589,590, 591, 592, 593, 594, 595, 596, 597, 598, 599, 600, 601,602, 603, 604, 605, 606, 607, 608, 609, 610, 611, 612, 613,614, 615, 616, 617, 618, 619, 620, 621, 622, 623, 624: n = A,T,C or G
  misc_feature 625, 626, 627, 628, 629, 630: n = A,T,C or G
tgtctgagaggggtattgggacaggcgttttacgtatctaattgtaacaacagccttgaaggaaggtaggagcaccattctgtggattagactaccaagacttagcaagattaacgtgactttccatcaaggtcatacgaaatgaatgaccctctaagtcacagaactcaggcttaggctctgtgacaccaagcctgggactctttcttcccccaccagactcccagtccttgagagctatatccattgattcccccaccatatctagtaccaagctcaggatttcataatatagtaataggtgttcaataaatattgtcgtcctgatgactttcaagcctacagtttcccttgtttagaaaacagctaacaaatcctaaggcacacctgcctggagacagtgtctatacctgggctctgtggaggctccattccagcccttctatccttaatctgctccccaaccccatagtcatcctgtaccatcgaggctcagaaagacttcaattctctcacccagaaataacaggnnnnnnnnnnnnnnnnnnnnnnnnnnnnnnnnnnnnnnnnnnnnnnnnnnnnnnnnnnnnnnnnnnnnnnnnnnnnnnnnnnnnnnnnnnnnnnnnnnnnctcctgctggtgtccaggaggcctgtcctccaggttctcaggctctggattgtgcctctagcactcacttcactgtggatcccaatctgaggatggctttaccaagcgtgcacaagcccctccatgggagaaaaagaagtgatctcgattcagagggtggactctacttgagctccttaggcaggtgtgaaggtcgctagggcttgttctgactccataagcaaaagcagcagttctctgagagcctgacctcataaaaggatgggcgtggtgggagacagggctctccttccctcttccttctctttcactcattaatcttcctggacttttccaacttcctgcattcccaggagacaatacacctgatgtgcaagctcagagcttcttttgtttgattgggctttgattttgtttctaatacattttcctctgcaggaagaagtctaactccactaatttattctagggaaccatcaagtgacatccaacagtgtgcattcagcacagcaagagggctgcagacacagagcccaggccacaggctgtccagctcrccccaccacactgattacaggacagagcttctgccttccagctctgcgagaatgatggtgccaatgagatgggtggtcagggaaagcagagccacatggagggcatggcctgtgtaccctgcagaggccatggcagggcctggttctggctgctgcaactatatcacaaacacatatgggagtaaacagactcctgaagttgaaagaaactgagaactgcaagacaggaccactttatggaggacctgagattctgctcaagaaactagagtaggacaagacctaccatgctggacttggtcactggaaagcagagaagagtccatgtgcaagctgactcggctggactcccaaacccatggcccttcgctatacccccagtcaaaacggagacaaac

SEQ ID NO: 725172 - DNA, 1585 bp, Homo sapiens
  misc_feature 531, 532, 533, 534, 535, 536, 537, 538, 539, 540, 541, 542,543, 544, 545, 546, 547, 548, 549, 550, 551, 552, 553, 554,555, 556, 557, 558, 559, 560, 561, 562, 563, 564, 565, 566,567, 568, 569, 570, 571, 572, 573, 574, 575, 576, 577: n = A,T,C or G
  misc_feature 578, 579, 580, 581, 582, 583, 584, 585, 586, 587, 588, 589,590, 591, 592, 593, 594, 595, 596, 597, 598, 599, 600, 601,602, 603, 604, 605, 606, 607, 608, 609, 610, 611, 612, 613,614, 615, 616, 617, 618, 619, 620, 621, 622, 623, 624: n = A,T,C or G
  misc_feature 625, 626, 627, 628, 629, 630: n = A,T,C or G
tgtctgagaggggtattgggacaggcgttttacgtatctaattgtaacaacagccttgaaggaaggtaggagcaccattctgtggattagactaccaagacttagcaagattaacgtgactttccatcaaggtcatacgaaatgaatgaccctctaagtcacagaactcaggcttaggctctgtgacaccaagcctgggactctttcttcccccaccagactcccagtccttgagagctatatccattgattcccccaccatatctagtaccaagctcaggatttcataatatagtaataggtgttcaataaatattgtcgtcctgatgactttcaagcctacagtttcccttgtttagaaaacagctaacaaatcctaaggcacacctgcctggagacagtgtctatacctgggctctgtggaggctccattccagcccttctatccttaatctgctccccaaccccatagtcatcctgtaccatcgaggctcagaaagacttcaattctctcacccagaaataacaggnnnnnnnnnnnnnnnnnnnnnnnnnnnnnnnnnnnnnnnnnnnnnnnnnnnnnnnnnnnnnnnnnnnnnnnnnnnnnnnnnnnnnnnnnnnnnnnnnnnnctcctgctggtgtccaggaggcctgtcctccaggttctcaggctctggattgtgcctctagcactcacttcactgtggatcccaatctgaggatggctttaccaagcgtgcacaagcccctccatgggagaaaaagaagtgatctcgattcagagggtggactctacttgagctccttaggcaggtgtgaaggtcgctagggcttgttctgactccataagcaaaagcagcagttctctgagagcctgacctcataaaaggatgggcgtggtgggagacagggctctccttccctcttccttctctttcactcattaatcttcctggacttttccaacttcctgcattcccaggagacaatacacctgatgtgcaagctcagagcttcttttgtttgattgggctttgattttgtttctaatacattttcctctgcaggaagaagtctaactccactaatttattctagggaaccatcaagtgacatccaacagtgtgcattcagcacagcaagagggctgcagacacagagcccaggccacaggctgtccagctcaccccaccacactgattacaggacagagcttctgccttccagctctgcgagaatgatggtgccaakgagatgggtggtcagggaaagcagagccacatggagggcatggcctgtgtaccctgcagaggccatggcagggcctggttctggctgctgcaactatatcacaaacacatatgggagtaaacagactcctgaagttgaaagaaactgagaactgcaagacaggaccactttatggaggacctgagattctgctcaagaaactagagtaggacaagacctaccatgctggacttggtcactggaaagcagagaagagtccatgtgcaagctgactcggctggactcccaaacccatggcccttcgctatacccccagtcaaaacggagacaaac

SEQ ID NO: 725173 - DNA, 1247 bp, Homo sapiens
gtttcacaatagcgatgttatctatagaagtagttggggaagttataaatcttgaaacctctagttatgtgactctggggcagtcaacaagctaagtgatattagcttagctaacttagcttagcttaagtgactaagctaagttatggaaaaacaagctaagtgatggttcaagcccctaccataattctaacttcttgacctttcattagcctttacaaatgtggtttcaatttttgaacaggtaggggatcagttcaaggaaaggactattatggcctccacacaagaatgagctaaagctggtagaaaacctggtagaaacaagatggagtcggttacatcagatttcccttactaaaatttttgcaaaggcagtttcatctattcctccctcagactggggctccctcggggcagggccatgtctcctccctcagacggtctcccctccctctcggctcctcttgcaggccctggcctctggggagaagggatgttcttaccaatttctggagtaacggccagccaattaaggtctgagctggctggaacccagctctcctgatgcttggccaggagtctgtcccctacccrgaacatccttaaactcctaattattgcccttgatctatgagctccgtggtcagctctgccccctgtttgttctctgctccctgtttgttcgcaaaagttttgggaggcctggccaccaagccactgtctccctaactgaggaagagggcagtccgagggctgatactccatatctcacccctccctgggagctattaggcaagtgaggcgtttccttttctaaagccctcgctgtttagctacaggattagttctagtccatttactcaccaagtttgctggccaaacactgagaccagaaaagcacatctcccttgcataataaatgtttaataatgacagttggatttggacagaaaatgccctggctggcaggcccgaagcaacattagctccagagagcgtttaaagttcagctccattgcccccatctacctacacacctgcttccaggcactggaacatgcaggcagccttcctacctgcctccttcccacctacccaccctgtgatggcagagtcagcgggagttaccccttccccacctgtcccagggtctactgggtttccgtgtgtggcctgcttccttcctcaacatcggagctccccgagggcagggctatgtgtccccctcagactggggctccctg

SEQ ID NO: 725174 - DNA, 655 bp, Homo sapiens
gccacaggcagtccaggcctctctctgctccatccccctgcctcccattctgcaccacacctggcatggtgcagggagacatctgcacccctgagttgggcagccaggagtgcccccgggaatggataataaagatactagagaactgacatgtccccagtgtctgcgcagtgaatggcacagccccgaggtcatcaatggtcaaatgcggctgtggtcacagggcctggagtagtcaagggaggttttctggaggaggtggctttgggctgagcctaaagggcaagggataattgattggtagatgcttctgggagagagatagtgaggcttcaaaatcaaggaggggctagaacagccacctcatcttccctgtcgctgttcgggctgagaggcaggcggcaaggccggtgctaaagaggtgctacatgcaggaccggagtggggaaggcatctttcgcatccttttgctctgttgcagagcagggctttgcagctaacagggtggaagagaggttggttggctcctgtttatgtttcctgaaggcctcagcagtgctgtctgtgaagatgtgagctcctgtgagtgggtgtgagacccccgtgygtgatgggaagagggtgtgcattggtgtctgtgggcatgctgggggtg

SEQ ID NO: 725175 - DNA, 664 bp, Homo sapiens
ctgtgtgaaaatcattttcttttttttttggagatggagtctctctctgtcacccaggctagagtgcagtggcacgatcctggctcactgcaacctctgcctccagggtttaagcaattctcctgcctcagcctcccaagtagctgggattgcaggcatgtgccaccatgcctggctattttgtattcttagtagagacagggtttctccatgttggccaggctggtctggaactcctgacctcaagtgatccgctgcctyggcctcccaaagtgctgggattacacgcgtgagccaccacacccggccacgtgaaaatcatcgtcttttgcaaatgtctctgtgttgaacaatcttcatgagttgaatttaatctcatattgattatttcaaggcaacattctatttcaaaaagcctggactttctgggaattaaataaggaatctaggagctgataataaatgatgaaggaaggtgtgactcactcgactccttgggggcataattcgctctggagatgagttttgacgagtcgctggaatggtgcatcatggaacagcagctggattttgtttgccaaataaatgtcagaagtggagggatatcccttacccagtccactgaagattaagaataatgcgatcatggaagtctatcattaac

SEQ ID NO: 725176 - DNA, 640 bp, Homo sapiens
tgtcttctcattcttagttttcaaaaatttaattattgcagtatgtttatttttctagttgaaatttgaaatcactgttacatgttttttaaaaaaaaactcaytaaaattctgacaacttataattaatttagcagaactgacatcttaacaatactaagtcttatctgcagcgtcgtttttttgtagttgtctatgtccctcggaaaatgttaatactgtctaatggattttaggcattcctaattaagtatatgtctaggcagttgatattagttgttagaaaactgttttaaaattaacgtctgtatgatttgtaaatggccattttactgaacttgcctatttaaagaaatcagctgcaaacattgatacttctttatttgtgtattttgaaacttatttagcttttcccatgatattggccaagattcacaaaatagtgtaactgtttacaccaagtatttatgatttccaatggaatacctctgagagagaaacagagaggtccattttgatatgtatgtatttatcgatgtatatatgaaatgttgaaggaatattctttctagtttccttaaatactctgtcaaacatggttgttaaactaaattaggtgcttttggaagatatctattga

SEQ ID NO: 725177 - DNA, 588 bp, Homo sapiens
ttttttttttttttgagaccgagtctcactctgttgcccaggctggagtgcagtggcatgattacggctcactgcaacctccgccccccaggttcaagcrattctcgtgcctcagcctcccaagtagctgggattacaggtgcccaccactatgccctactaatttttgtatttttagtagagacggggtctcaccatgttggccaggctggtctcgaactcccaacctcagatgatccacccgcctcagcctcccaaagtgctgggtttatagggtgagccactgtgcccggccgagactgttttttaaagctgcaattatcactgaaataagtgatttggcaaacaccacagacaattatctgaggaaatcagcacagatgccaccatgaacaaaggatcaagataggtcagctatcaaagacacaattaacagcaaaacagaggacatcattcaccctcattcacagccccatctgcatccatatctgcaggaatctgtcagcacaccccagaaaaggtaaaacaaattctgaaaatctccagtaaatgccagccaaaaatgatgaaaagactagagaagcatcc

SEQ ID NO: 725178 - DNA, 588 bp, Homo sapiens
ttttttttttttttgagaccgagtctcactctgttgcccaggctggagtgcagtggcatgattacggctcactgcaacctccgccccccaggttcaagcaattctcgtgcctcagcctcccaagtagctgggattacaggtgcccaccactatgccckactaatttttgtatttttagtagagacggggtctcaccatgttggccaggctggtctcgaactcccaacctcagatgatccacccgcctcagcctcccaaagtgctgggtttatagggtgagccactgtgcccggccgagactgttttttaaagctgcaattatcactgaaataagtgatttggcaaacaccacagacaattatctgaggaaatcagcacagatgccaccatgaacaaaggatcaagataggtcagctatcaaagacacaattaacagcaaaacagaggacatcattcaccctcattcacagccccatctgcatccatatctgcaggaatctgtcagcacaccccagaaaaggtaaaacaaattctgaaaatctccagtaaatgccagccaaaaatgatgaaaagactagagaagcatcc

SEQ ID NO: 725179 - DNA, 739 bp, Homo sapiens
catttgccagttgtgttcattagtttactttcctttctttttaaaatctcactttattgaggtatgattgatatacaaaaaggtacacctatttaatgtatacaacttgrtgagtttgagataagaatgcacctgtgaaactaccactgtaatctatgctgtgaacatatccatcacttccaaaaatttcctcccaaattgtgtgtgtgtgtgtgtgaacataatataaatctactctcttagtgaattttaaagtatacaatattagtgcctatattgttgctataggcactgttctgtacagtggatttctgggaacgacccaccttgcataagtaaaactttgtacccttgactaatatctcccatttaaaactaagagtggaaattaaagttctgtggaacaattttcaaagaagaacctactagttacttttataatacatcagtcattaaaggaatcctttaaactagactactgaagtaaccagtttttaccaagcactagtaacatttaaactccatgtaagcaaaataaatagtagttttgaaaaaattatccagatatctctagcatccacctccgccaccaccccaaaaacagccaaaaaaaaaaaaaaaaaaactaatgtgaaaaacaacttctgcgttgtttctttttctgtccaaaatatcaagatttgctcattcagcaaggctttactgaatgcctgagatatccgaggcagtgttccagcca

SEQ ID NO: 725180 - DNA, 992 bp, Homo sapiens
agtcaattttgtttcatattgccattacagggaatttttaagcattgccttaaactgtcaagtttacaggcaccttcttcaacagaatagactatttcaaagtgggattataaatgtttaatgacagagattgccctaagagataccctattattaatatgatttgaaatggacctgaaacacatttatttgggcctttacaattctatttcccccaaatcttcagaatggccaattaaaactacctctaagtgaaacattgataaaaatatgatgcagtaagaaaaaaattaaatctatggggttttaaaaaatacattttcaggcacagaactgtatcggctaatttggtcaacatcccattttctactagttttaaagttcatttggtgcactggggcatcagcattcttttcattattcaatgccctcttctttgtttccaggcaactattatgatgttgtctcatatgcatattaatgaggagctgttcctgtgccttttaaaggaagctatattgcactgtagtcttctatattgctctatatacttctctcctcccatctatcccccatttacacacacacacacacacacacacacacacactagttgcctacyagttttccttgaaagctgagagaaatgtatttcacataagcacttcaaatgctgggatttttcaaaaggtttcattttaaagaaaatgataaagaaaggaaaagttttctggactagagatctgcaatcagatctgtaccataagcctgtgcccaaacgttcaaattataattagtcaataaggaaatcaaggtaacactttcaaggtggttttgataaacagtttaggttcatcaaaaatgattccactctctctgaaaaggaaatgacatctctgcttattacaaatatgaattattcatttggtagttagatgaatatgaagttctgtgagatggagtagtgctaagtttgggagatagtttcatat

SEQ ID NO: 725181 - DNA, 1730 bp, Homo sapiens
aaatgcaaataaaataaagttttcaatttttcaaagattcatttcccacaacagcacagtatgaagagaaaggcagtatgaagtgctttcggtgtgtgggaatcatgatttcaacattacactcttgtaaaccaaaaggtatctgagacaggtctcaatcaattcaaagtttattttgccaaggcttgggacakgcccagaaggaaataaacaaacacacacagaatcacagaaatagtctgtggtctgtgatgaatttgagggcttcaatatttaagggggaaaaatgggctagaggggaaaaagggagggtacggtaattcacatgttgcaagagaaaaggaggaggtgggggaatagtcaattatgtatttgtctcctgctcagtaaattggcactttacataagataaggtgaacatacagtagctacctatagagtagaaactgctctgacattggcaaccacaggatactggaaggaccctgggaagctgtgggatcccctggagatctagcattcagcatcggctgcccctatgagaagggagagtgcagcccatcaaagtgccctttggaaaaagggaaatgcggtgaggtaccattctccaaagggaccagcaccagtggccagaaatggatgcggagaaggggtaagcttccgctacccctgtcgactgttgtggatgcagcagaggccttccccactggggaccgttgtgagtgtacctggaaacaaccttttcaggactacttatggtggctagacctgtgctggaagtgtgcccatgccacacagggcataaggtgaacatagacattgttcacaatgtctatgcacattgtgaacacatatgttgcatgaagggcagcgttcatctcccacctctacacagagcatcagtgtcccagcaacatagtacagacaagccacagagctgtctgctctggactgtgggaagaggctctcctctgagaccatttcagtgatagccaccagagggacatttttgcagacctcggtcacattgctgctgggagacaaaggacagtgcctatatgagctgaaggtagcaagtcctgtgagaggggcatgatagagaagcagacctcattcctggtgaccaggacaagaagctagtgtagcacctcatgcccttctccctgagacctcagtgtgcccccagtgaattccctccatcaccctagtccatgcaggttcttccactcatcatcaggttactggagaacaaaccagctcttacttttcattgccacccaatggactagagactgaactgcaccaccaactaaaacattctgctgtcagagggcatatttctagtgtatgagataagcttcctgggacctctgcactgctagccccacagaagatagtttgttggaccttatgcccgatacaccactacaacaagcagcatttaagaaagccactgcacaaaagctatccataaccaaggaaccccagatccttaacacacttaacgtacccagtaaggaagccaaatgatcatacacaatatacactatagtcacaccctcaaggggaaaaataatagaaaattaaaaagtcccattcaaacaatagcaaattaaaaaataaaaagagagggcttcttcaggtggaagtaaacagcacaagaactctgacagtacaaaaagacagagtgctttgacactcacaaaagattgtactagctctctagaaat

SEQ ID NO: 725182 - DNA, 639 bp, Homo sapiens
cagccctttcaatctggaaactcctgtcttttcgttctgagaatatttttggtgattatctcttcccttccatattggaactcattacaagaaagctaattaaggaagagtagagggttgtgttatgggctgaattgtgtccacccctcccccattcataagttgaagctgaagctgtaacccccaatgggactgtatttggagatggagcctttaggaagtcataccggtggggtcctaatctggtaggattggtggccttagaagaagaggtagagagagagatctctccccayatgagcacaaagaagaggtcatgtgaggacacaggtggctgcctacatacaagccaggaagagggctctcaacaggacctaataggccttgattgtggactttacagcctccagaattgtgagaaaatacatttctgttatttaagccaccatgtatgtgatattttgttatggcagcctaaactgacgaagacaggttgaggtcaagctaggacctcagcttcataaaggtgaactgcatgcgttgcaagagaatattaacatgatgctggtgcgcgtgtgttctcctttttgactggtccctttttgaacttagctcactcatctgcatatcaccctttgt

SEQ ID NO: 725183 - DNA, 608 bp, Homo sapiens
caatcttattaaagcagagaaataagtacaccaaactacagcttgtagtatttgttagaaaagtcagcatcatggtctcctttttcattttttccatgttatatgattttttcttcagagctcacttataaaaacagacctattgattctgtagttctgtgatggacatacagaaaaagagttatgaaacgttcataatatcttaagtacgtaacacycatcctgagcaaacatgacttacagactctaaaattgtgagtcttcacagccaaaggagtagcatgggcttacttaaggactgaaaacattcatcttgctacttataaagtagtcaaatgtggccgggcgcggtggctcattcctgtaatcccagcacttcgacaggccgcggcgggtggatcacttgaggtcaggagttccagaccagcctgaccaacatggtgaaaccttgtctttactaaaaatacaagacttagccgggcatagtggcacatacttgtaatcccagctactctggaggctgagacagaagaatcacttgaacccgggaggcagaggttgcagtgagcagaggtcacaccagtggactccggcctgggtgacagagc

SEQ ID NO: 725184 - DNA, 1575 bp, Homo sapiens
caaacatgagccacaatgattatacacctgtaaactcgtcagcatacaaacacaaaccataaactaagatgacagccaaccaagctcctgaaacaggtgatcagaggtgagaattctcaagggctgatgatgcagtcaatgcccaaccctagaattccacgtggcatcttttcttcatcatgatcatcatcaccccgagaggcaaggccaggagatgggatagaaagagattcccaagtctcagaagctgacatctgtcctagttttctgtgcctgggtgaacccagmcctcctgcactttgcagggaaagatcacctctgagaagctaagttctccaatggactgaaaaggtatcattagaaaccatcatgatcaaactctatgtatgtatgtatctatctatctatctctctatctctctatcatctatgtatttttttgagacagggtctcgctctgttactcaggctggagtgcagtggcgtgatcttcagctcactgcatgtgtgaactcctgggggctcaagcgatcctcttgtctcagcctcccgagtagctggcacatcatggcacctagcacctggctaatttctttctttttttttagtagagataaagtctccctatgttgcccagactggtttcaaattcctgggctcaagcaatcctttggcctcagcctctcaaagtattgggattacagatatgagccaccatgcccagcctctctttctttctctctttctttctctctctctctcccccccgcctctctctctttctttccgagacagcatcttgctctatacaatggtgtgaacatggctcactgtagccttgacctcccggtcttaggcaatccttccacctcaacctcccaagtagctggaaccacaggtgtgcaccaccatgtccagctaatttttaaaacttttgtagagacaggtctcaacacattgcctaggctagtccttgaactcccaggctcaagtaatcctcccgccttggcctcccaaagtgctaggaacacaggcaagagccacagcacctggcccaactatgtttaaatgaagtatccacggtttcattttccccaggtatctatagcaatgtgggaaacagaatccattttgagggtacacacgtggaattttggagaccaggccagcagaagatgcttggacaacacattgtaagctattttatttccttgctgaattaccctgtttgaggtcaattcagtgcaggcaggctgagggaacagctatcaaactgaagttggaagagctacctccctggagctgcaggtttgggaggggtgtgaaaacatggagtaatgcaagattgactagagttaaaactctgtaaagggagatgggtcagtagggcaaagggaagattttaagcagccaccaattagaggcagctttgtaaaatgtattagactattactccagggctttcatcttgggccaagaaacgtacatgatttctaaccacaaaaacttgagaaacagactaaaagaaacttgttcctcttcggctgcacaatgggaagaaccctcaaatgcaga

SEQ ID NO: 725185 - DNA, 1575 bp, Homo sapiens
caaacatgagccacaatgattatacacctgtaaactcgtcagcatacaaacacaaaccataaactaagatgacagccaaccaagctcctgaaacaggtgatcagaggtgagaattctcaagggctgatgatgcagtcaatgcccaaccctagaattccacgtggcatcttttcttcatcatgatcatcatcaccccgagaggcaaggccaggagatgggatagaaagagattcccaagtctcagaagctgacatctgtcctagttttctgtgcctgggtgaacccagacctcctgcactttgcagggaaagatcacctctgagaagctaagttctccaatggactgaaaaggtatcattagaaaccatcatgatcaaactctatgtatgtatgtatstatctatctatctctctatctctctatcatctatgtatttttttgagacagggtctcgctctgttactcaggctggagtgcagtggcgtgatcttcagctcactgcatgtgtgaactcctgggggctcaagcgatcctcttgtctcagcctcccgagtagctggcacatcatggcacctagcacctggctaatttctttctttttttttagtagagataaagtctccctatgttgcccagactggtttcaaattcctgggctcaagcaatcctttggcctcagcctctcaaagtattgggattacagatatgagccaccatgcccagcctctctttctttctctctttctttctctctctctctcccccccgcctctctctctttctttccgagacagcatcttgctctatacaatggtgtgaacatggctcactgtagccttgacctcccggtcttaggcaatccttccacctcaacctcccaagtagctggaaccacaggtgtgcaccaccatgtccagctaatttttaaaacttttgtagagacaggtctcaacacattgcctaggctagtccttgaactcccaggctcaagtaatcctcccgccttggcctcccaaagtgctaggaacacaggcaagagccacagcacctggcccaactatgtttaaatgaagtatccacggtttcattttccccaggtatctatagcaatgtgggaaacagaatccattttgagggtacacacgtggaattttggagaccaggccagcagaagatgcttggacaacacattgtaagctattttatttccttgctgaattaccctgtttgaggtcaattcagtgcaggcaggctgagggaacagctatcaaactgaagttggaagagctacctccctggagctgcaggtttgggaggggtgtgaaaacatggagtaatgcaagattgactagagttaaaactctgtaaagggagatgggtcagtagggcaaagggaagattttaagcagccaccaattagaggcagctttgtaaaatgtattagactattactccagggctttcatcttgggccaagaaacgtacatgatttctaaccacaaaaacttgagaaacagactaaaagaaacttgttcctcttcggctgcacaatgggaagaaccctcaaatgcaga

SEQ ID NO: 725186 - DNA, 622 bp, Homo sapiens
tgcatgcgtgtggtaagcagagggtgtgtggtagctctctgtactttctgctcaattttgctgagaacctaaaacggctctaaaaaagtcttttttcaaaaacgaagataattgtagtttccatatggtagctactaaaatgagttaacatataatatagaaaacacttagaacagcacctggaacacagtagatcttagtgtcagtgattacttacagtagcagtttccagttctgctaatttacctaagggaataatcttacatttggaaaaaaaaaagcctcttgcataagtatattcagtagtatttataagaataaaaaatctagaaacaatctaactgttctacaagtagcggtattatatgagttctggcacattatgtggtaggacattacaagtcactaaaaacaatggttctgaaagcagarggactaatctttgagaggtgaggggttctctttccacctcttactggtaaagaggaacaggaactttacatcagaaccccactctatagcctctaatgttttctgttcacctattattcactatagcataaaaataaactcctttcacaatggtcatgaaattaggacccttacacattgctggtggaaa

SEQ ID NO: 725187 - DNA, 622 bp, Homo sapiens
tgcatgcgtgtggtaagcagagggtgtgtggtagctctctgtactttctgctcaattttgctgagaacctaaaacggctctaaaaaagtcttttttcaaaaacgaagataattgtagtttccatatggtagctactaaaatgagttaacatataatatagaaaacacttagaacagcacctggaacacagtagatcttagtgtcagtgattacttacagtagcagtttccagttctgctaatttacctaagggaataatcttacatttggaaaaaaaaaagcctcttgcataagtatattcagtagtatttataagaataaaaaatctagaaacaatctaactgttctacaagtagcggtattatatgagttctggcacattatgtggtaggacattacaagtcactaaaaacaatggttctgaaagcagagggactaatctttgagaggtgaggggttctctttccacctcttactggtaaagaggaacaggaactttacatcagaaccccactctatagcctctaatgttttctgttcacctattattcactatagcataaaaataaactcctttcacaatggtcatgaaattrggacccttacacattgctggtggaaa

SEQ ID NO: 725188 - DNA, 716 bp, Homo sapiens
aaatttatgaaaataggccaggtgcagtggctcatgcatgtaatcctagcactttgggacaccgaggcaggtggatcacctgaggtcaggagttcaagaccagcctggccaacatggcaaaaccccatctttactaaaaatacaagaaactagttgggcatggtactgcgtgcctgtaatcccagctactcaggagactgaggcaggagaatcgctggaacctaggaggcagaggttgcagtgaactgagatcgcaagatcgcaccactacactccagcctgggcgacagagcaagggtccatctcaaaccaaacaaaaaaagaaaataaattaagtgcttgacacatactaagcactgtgccagttgctgggatggaggtactccctcacctcataaagcaaggttcaggccagatacggtggctcatgcttataatctcagcactttgggaggytgatgtgggcagatcacttaaggccgggagtttgaggccagcctggccaacatggcaaaaccccatctctactaaaaatacaaaaattagccaggcgtggtagcgtgccctgtaatcccagctacttgggaggctgaggcaggaggatcacttgaacccaggaggtggaggttgcagtgagccgagattacactaccgcactccagcctgggcgacagagagagactccgtctcaaaaataaaaaataaaataaaataaa

SEQ ID NO: 725189 - DNA, 2048 bp, Homo sapiens
cctccagggttcatgccattctcctgcctcagcctcccgagtagctgggactacaggcgcctgccaccacgcccggctaattttttgtattttttttagtagagacggggtttcactgtgttagccaggatggtctccatctcctgacctcatgatctgcccgcctcagcctcccaaagtgctgggattacaggcgtgagccaccgtgcccggcctgtgggaactcttttcacacaaatatattgttaaaactgaattcatcgaaacaacccattctagacttttaaattactgatctgggttcagccagttgggatgacggcagataagggcaactgcaggctggttctaataagaagcccactgtaagtattaaacatacaaaaacttcagtatctggaggacttatcaaaaaactaaagaaaacagatagcttcagactaactcaaactgcctgcatagtttatggtaagaaacagactctgctgctctttttacttctctgtatttttgttttctatacgagaacaagtttccagtgcaagggtttatttcacagaaagttacaccaaattacaaacaacaactcaaaaattaagtaaaaaggtaccccaaatgactaatttgagggaagatttcatttacgtgagtaccaggttttcacaatagagactggtctggctttttttccaaccgtgtggttgagaaatgtaagatgtaatactctacagtaaaatgccctttaccatcaactaagctgccagctagaaagcagcatggcccagtttagatcagcattcccccaaatctgtttccaaaacaygctagtgttctatgacattaaaaggtattactatgtaaaacataaatactagcagtatttttctctaaaaatgtactcttttaatatgccaggaagattaagggggtagacagctgtcatcatgcaacaacttgcctttaggaaacagcttaccatagcccagaatgccaggctgtggcatgaagccactcaacccacaagtgtgtgacatacattagagcactgaggcatgggagcatttaccaacagctatgatactgtgtgtgcaacatacagatcaagctgtgatcacttattgcagtcatgaatgtttctgttataccagttttggtaacacgtgaacacattacaaactcacaaatgttccatggacagataaatttggcaaatgctagcatagatgaaatatgccaaaacctgaaacatggattgaaataattgacataaaatattgggatgatgtctttactaggaaacttataaacttaagcttactgaaaacaacttgccagagaataatattataggatatttaccttttgtaatagcaaaagcttaacggaaatcattagaagattattattccttaatcttctaacctccaaaggaatctgtaacacagtgcacagatcaattcatctatacatagcgaggaggatgccagcagtcgaactggataatgtgatggtagtagtttcgaggatgttacaaaggagtgggctggacttaggaccaacaagacacagtagagcaacctagcgctggcaatcctgggaagctgtggctagcccaaattctgaaggcaaaggaggagagtggccactggaacctagggagggtagctgtatggagacagccacccgagagaagcgacagcctcgggcagagggatgcagtcaccctaggggcccctccagggagcaagttgggaaaatcaataccctaaactcattcttctccaacctacaaaatgccttccagtccctctcatcgcctgctccagtcagaagccacagggcaagggtgcctatcagtgttgctggtaaagtcacgtttggagggaacacagtgaggaaggataagagtagctctggtagggcaacagctctttgacatgcatttcacctcatctttttctcctgtctaccttccttcccttatttttgacaaataaagaatgcccaagatgtgaactttttcaagagctatctgggaatgattgaat

SEQ ID NO: 725190 - DNA, 2048 bp, Homo sapiens
cctccagggttcatgccattctcctgcctcagcctcccgagtagctgggactacaggcgcctgccaccacgcccggctaattttttgtattttttttagtagagacggggtttcactgtgttagccaggatggtctccatctcctgacctcatgatctgcccgcctcagcctcccaaagtgctgggattacaggcgtgagccaccgtgcccggcctgtgggaactcttttcacacaaatatattgttaaaactgaattcatcgaaacaacccattctagacttttaaattactgatctgggttcagccagttgggatgacggcagataagggcaactgcaggctggttctaataagaagcccactgtaagtattaaacatacaaaaacttcagtatctggaggacttatcaaaaaactaaagaaaacagatagcttcagactaactcaaactgcctgcatagtttatggtaagaaacagactctgctgctctttttacttctctgtatttttgttttctatacgagaacaagtttccagtgcaagggtttatttcacagaaagttacaccaaattacaaacaacaactcaaaaattaagtaaaaaggtaccccaaatgactaatttgagggaagatttcatttacgtgagtaccaggttttcacaatagagactggtctggctttttttccaaccgtgtggttgagaaatgtaagatgtaatactctacagtaaaatgccctttaccatcaactaagctgccagctagaaagcagcatggcccagtttagatcagcattcccccaaatctgtttccaaaacacgctagtgttctatgacattaaaaggtattactatgtaaaacataaatactagcagtatttttctctaaaaatgtactcttttaatatgccaggaagattaagggggtagacagctgtcatcatgcaacaacttgcctttaggaaacagcttaccatagcccagaatgccaggctgtggcatgaagccactcaacccacaagtgtgtgacatacattagagcactgaggcatgggagcatttaccaacagctatgatactgtgtgtgcaacatacagatcaagctgtgatcacttattgcagtcatgaatgtttctgttataccagttttggtaacacgtgaacacattacaaactcacaaatgttccatgsacagataaatttggcaaatgctagcatagatgaaatatgccaaaacctgaaacatggattgaaataattgacataaaatattgggatgatgtctttactaggaaacttataaacttaagcttactgaaaacaacttgccagagaataatattataggatatttaccttttgtaatagcaaaagcttaacggaaatcattagaagattattattccttaatcttctaacctccaaaggaatctgtaacacagtgcacagatcaattcatctatacatagcgaggaggatgccagcagtcgaactggataatgtgatggtagtagtttcgaggatgttacaaaggagtgggctggacttaggaccaacaagacacagtagagcaacctagcgctggcaatcctgggaagctgtggctagcccaaattctgaaggcaaaggaggagagtggccactggaacctagggagggtagctgtatggagacagccacccgagagaagcgacagcctcgggcagagggatgcagtcaccctaggggcccctccagggagcaagttgggaaaatcaataccctaaactcattcttctccaacctacaaaatgccttccagtccctctcatcgcctgctccagtcagaagccacagggcaagggtgcctatcagtgttgctggtaaagtcacgtttggagggaacacagtgaggaaggataagagtagctctggtagggcaacagctctttgacatgcatttcacctcatctttttctcctgtctaccttccttcccttatttttgacaaataaagaatgcccaagatgtgaactttttcaagagctatctgggaatgattgaat

SEQ ID NO: 725191 - DNA, 2048 bp, Homo sapiens
cctccagggttcatgccattctcctgcctcagcctcccgagtagctgggactacaggcgcctgccaccacgcccggctaattttttgtattttttttagtagagacggggtttcactgtgttagccaggatggtctccatctcctgacctcatgatctgcccgcctcagcctcccaaagtgctgggattacaggcgtgagccaccgtgcccggcctgtgggaactcttttcacacaaatatattgttaaaactgaattcatcgaaacaacccattctagacttttaaattactgatctgggttcagccagttgggatgacggcagataagggcaactgcaggctggttctaataagaagcccactgtaagtattaaacatacaaaaacttcagtatctggaggacttatcaaaaaactaaagaaaacagatagcttcagactaactcaaactgcctgcatagtttatggtaagaaacagactctgctgctctttttacttctctgtatttttgttttctatacgagaacaagtttccagtgcaagggtttatttcacagaaagttacaccaaattacaaacaacaactcaaaaattaagtaaaaaggtaccccaaatgactaatttgagggaagatttcatttacgtgagtaccaggttttcacaatagagactggtctggctttttttccaaccgtgtggttgagaaatgtaagatgtaatactctacagtaaaatgccctttaccatcaactaagctgccagctagaaagcagcatggcccagtttagatcagcattcccccaaatctgtttccaaaacacgctagtgttctatgacattaaaaggtattactatgtaaaacataaatactagcagtatttttctctaaaaatgtactcttttaatatgccaggaagattaagggggtagacagctgtcatcatgcaacaacttgcctttaggaaacagcttaccatagcccagaatgccaggctgtggcatgaagccactcaacccacaagtgtgtgacatacattagagcactgaggcatgggagcatttaccaacagctatgatactgtgtgtgcaacatacagatcaagctgtgatcacttattgcagtcatgaatgtttctgttataccagttttggtaacacgtgaacacattacaaactcacaaatgttccatggacagataaatttggcaaatgctagcatagatgaaatatgccaaaacctgaaacatggattgaaataattgacataaaatattgggatgatgtctttactaggaaacttataaacttaagcttactgaaaacaacttgccagagaataatattataggatatttaccttttgtaatagcaaaagcttaacggaaatcattagaagattattattccttaatcttctaacctccaaaggaatctgtaacacagtgcacagatcaattcatctatacatagcgaggaggatgccagcagtcgaactggataatgtgatggtagtagtttcgaggatgttacaaaggagtgggctggacttaggaccaacaagacacagtagagcaacctagcrctggcaatcctgggaagctgtggctagcccaaattctgaaggcaaaggaggagagtggccactggaacctagggagggtagctgtatggagacagccacccgagagaagcgacagcctcgggcagagggatgcagtcaccctaggggcccctccagggagcaagttgggaaaatcaataccctaaactcattcttctccaacctacaaaatgccttccagtccctctcatcgcctgctccagtcagaagccacagggcaagggtgcctatcagtgttgctggtaaagtcacgtttggagggaacacagtgaggaaggataagagtagctctggtagggcaacagctctttgacatgcatttcacctcatctttttctcctgtctaccttccttcccttatttttgacaaataaagaatgcccaagatgtgaactttttcaagagctatctgggaatgattgaat

SEQ ID NO: 725192 - DNA, 599 bp, Homo sapiens
ctctctgtcccagccctgtcggccatcactcacccagaggccgtgctgcccatcagagatcaatcacatcgctgttctataaagaacattccagaaacagaaaggtgttgtaatgtaattcccaaagggtacgtcatcatctctgatttaatttgygggccttttagagaatttaaacttcatgcaagtgttggccagtgatagtatgctagattaactatgacattagtaaaagatggcacgtatttcctcaagcaatttcacaaacgtggtgccatctgaccaatcactaattgaggtcaggaatttcctttgctgctaattggggaaagcaaaacaccaaggatgaaagacccacccggggtcccagagctggaaaacagaggcctccaattcccacatagagggttgtgatcctcacctgtcactgcaggctggggaactggttcctgtgagaagtgtgagggctctaggacatctgtgagcatgccaggcttcctgggaaatgttctccttctccttctgggagcgtgggcattttcttcagtccccaagggttacttttacaaaagggacagctgaaacattcctaatgctat

SEQ ID NO: 725193 - DNA, 1328 bp, Homo sapiens
ccagtttgctctcctttacattttgtagaatggttatcttatggtcaaaggaaagggagagggcctttggaaaataaagctgtgtatttacaagcagtcatacagaatagttttgtggggaaaataaagaacagttatttaatttgtaatttaatcatttttcttaaaccaacccaaagagcataaaatggaatatttatttatttttgtagcttaatttgtaatttaataatttttcttaagccaacctaacgaacatattgggctgtttattttcatttttaatgggccatatttacatcacaaaggacttgagaagtcttacaaatacaataaaatgataaaatatgaattaagacattagcaaccaggatggaaaaacacaaatttgtaaatgatggccaggtttgcaagcaaaaattaaattgataaatggcagcacccccactaccagctatagttagactgatgaaaaatcctttaatgttcatgcctgaaatacagttaccacccttagcagcaaattagaggcaaagaagttctggaatttggacgttgtctctgagtaagctctttgagacactggacaagtaatttccttctgaatactcttatactgacacataggagaagtgtcagtgtttcaaaggaatctctttgaaggctactacattgctttaggggtgccagattaccagagtaaactgccagtttgagagaataactgtttcttaagagatggtctgaaacctaagtaaggaaatccccccacttgaaagcccctaggaagttaattgcttttggcaaattatcttgggccccaaaagtcccttgatgagcacatgttttgtaataggtactaaagactatttacttatgatgaaaaataaaataacacaatttaaaacttgaaattgataaaaagcaacttgaaaccaaatttaggacagtgaacccatccctttcttatttttaaataggtaaatatagaaaaaatgaccacatgatgtgaaacaaaaagcaaatatttaaaaactacatttatactttatctcaccacactaatgtaaagaattttgattttacttataaattcttagccttgtctacacatatacataattgcatgtttaatttgagctatatatagtctgttttttgttcctttgcatgttacacaaacctttttctatttcyacataatttttatctcatattttttattggatacattatagagagagcatttattaaatgagctgggattactataatttttattatttattttttaatttattacttatttttataatttactattgaaa

SEQ ID NO: 725194 - DNA, 1307 bp, Homo sapiens
tactcattctcctatatctggaagaattgcctagacttactcataaaggtctagaccagtagttagctcggcacctggttctgcggtaccctagccacctgtccttccctttcctgtgtgtcaacatagcaccacagtaggccccaatttcaaattgtcttataaatggttctacatgaaattccaagattggcctctttcaattgcattttaagactcttaccatgtccttcatcacacaatctacatcttctgcatttggaagaaaaatgggctttgtctgtgtactccttcccttcttggcagggcacgcagtctggttcatccccattgactgtgcagtccctagctttcctttcacctgcccaaggaaaaaaggagcaagtgtttgaacaggacacgggcaggtaacagggtgggaastatagagggatgacagacaataaaactcttctaaaacacaaggggagggggggtaggctaatgagatataaatacaatgggggagaagattattttaaaagtcatgtcaacagacagaaagtctcccaagacaaaagctaaaagagtgactgaagcccatagaaataggatgattagcaacaggagcatacaaaaaaaaaggaaggttagaatgacaaagtacactgcatgaaatgcctttgccaagaactaacttccttggagaaaggggagaggttggttggtatatattcagagtggggatagctgttactggccactgagattatcaaactaactcacattgctctgacttttcattttactttccaaagtccacaaatcctgataagaaacagtgtaataaggaaaagaacatttgaagttttaaaagccttggtcaaatcttgagcagctataaaatctttaacgaagtgttgttttctccaagcctaaatttcatcctgcatatgatggagatagtaatatttctcttgcattgctgtcagagctgcactcggcctgcctagtgagcatgagagttctctttgttctcccctttctattactttttcatcaaaagacaggatatgtactgatgagttttgataagcattaacatatttatgccaaaatttattatctatcaggcttgttatcttaaaaacaaacaattttaaataatatacatatttgcattaatttacttaaaaataaagtttgtcactgtattgctattagaaagcattatgtaatgtgttctcttaaaaaattcatttatctgataggtgtttattaaatgcctattgagtcctaggaactttttagaagtttgatattatgca

SEQ ID NO: 725195 - DNA, 1307 bp, Homo sapiens
tactcattctcctatatctggaagaattgcctagacttactcataaaggtctagaccagtagttagctcggcacctggttctgcggtaccctagccacctgtccttccctttcctgtgtgtcaacatagcaccacagtaggccccaatttcaaattgtcttataaatggttctacatgaaattccaagattggcctctttcaattgcattttaagactcttaccatgtccttcatcacacaatctacatcttctgcatttggaagaaaaatgggctttgtctgtgtactccttcccttcttggcagggcacgcagtctggttcatccccattgactgtgcagtccctagctttcctttcacctgcccaaggaaaaaaggagcaagtgtttgaacaggacacgggcaggtaacagggtgggaactatagagggatgacagacaataaaactcttctaaaacacaaggggagggggggtaggctaatgagatataaatacaatgggggagaagattattttaaaagtcatgtcaacagacagaaagtctcccaagacaaaagctaaaagagtgactgaagcccatagaaataggatgattagcaacaggagcatacaaaaaaaaaggaaggttagaatgacaaagtacactgcatgaaatgcctttgccaagaactaacttccttggagaaaggggagaggttggttggtatatattcagagtggggatagctgttactggccactgagattatcaaactaactcacattgctctgacttttcattttactttccaaagtccacaaatcctgataagaaacagtgtaataaggaaaagarcatttgaagttttaaaagccttggtcaaatcttgagcagctataaaatctttaacgaagtgttgttttctccaagcctaaatttcatcctgcatatgatggagatagtaatatttctcttgcattgctgtcagagctgcactcggcctgcctagtgagcatgagagttctctttgttctcccctttctattactttttcatcaaaagacaggatatgtactgatgagttttgataagcattaacatatttatgccaaaatttattatctatcaggcttgttatcttaaaaacaaacaattttaaataatatacatatttgcattaatttacttaaaaataaagtttgtcactgtattgctattagaaagcattatgtaatgtgttctcttaaaaaattcatttatctgataggtgtttattaaatgcctattgagtcctaggaactttttagaagtttgatattatgca

SEQ ID NO: 725196 - DNA, 1307 bp, Homo sapiens
tactcattctcctatatctggaagaattgcctagacttactcataaaggtctagaccagtagttagctcggcacctggttctgcggtaccctagccacctgtccttccctttcctgtgtgtcaacatagcaccacagtaggccccaatttcaaattgtcttataaatggttctacatgaaattccaagattggcctctttcaattgcattttaagactcttaccatgtccttcatcacacaatctacatcttctgcatttggaagaaaaatgggctttgtctgtgtactccttcccttcttggcagggcacgcagtctggttcatccccattgactgtgcagtccctagctttcctttcacctgcccaaggaaaaaaggagcaagtgtttgaacaggacacgggcaggtaacagggtgggaactatagagggatgacagacaataaaactcttctaaaacacaaggggagggggggtaggctaatgagatataaatacaatgggggagaagattattttaaaagtcatgtcaacagacagaaagtctcccaagacaaaagctaaaagagtgactgaagcccatagaaataggatgattagcaacaggagcatacaaaaaaaaaggaaggttagaatgacaaagtacactgcatgaaatgcctttgccaagaactaacttccttggagaaaggggagaggttggttggtatatattcagagtggggatagctgttactggccactgagattatcaaactaactcacattgctctgacttttcattttactttccaaagtccacaaatcctgataagaaacagtgtaataaggaaaagaacatttgaagttttaaaagccttggtcaaatcttgagcagctataaaatctttaacraagtgttgttttctccaagcctaaatttcatcctgcatatgatggagatagtaatatttctcttgcattgctgtcagagctgcactcggcctgcctagtgagcatgagagttctctttgttctcccctttctattactttttcatcaaaagacaggatatgtactgatgagttttgataagcattaacatatttatgccaaaatttattatctatcaggcttgttatcttaaaaacaaacaattttaaataatatacatatttgcattaatttacttaaaaataaagtttgtcactgtattgctattagaaagcattatgtaatgtgttctcttaaaaaattcatttatctgataggtgtttattaaatgcctattgagtcctaggaactttttagaagtttgatattatgca

SEQ ID NO: 725197 - DNA, 1016 bp, Homo sapiens
tcacctgggaacaaccactccctccccactttggagccagcagcctttggggaaggtgggctctcgtggtttctgtgcctggcagaatgtcctataatcctggcgtctgsatgctcagaaaacagggtccccttcccatctgagctgccgcagccttggcaccttggtttaccagtgcaacacagcccatgatgatccagttgaggggagacgggttcttccttttctcccctcttgcctgcagtcctcctgggcctccacacccgtccttcgacgacccccatggacagcaacatcccaccataggagagaaacccttctgttcattcccggggggctcgctagggaaacgcctgagtgatctattttacagcctcccccatgctccattcctgccccttgcagctgggggttgtccagcacagaagggaacaagctgttaactgattaatgatcacaaaacttcgagagaaaataaaggatttggatgatcccttatttggatttgtgtggctcaaaagcagcgcagcgcagatgagtttgggctcttgtcggcttcgccctcatccactgctcttccccagagggaagccagactgccaggttcaaattccagctgccccttccttcccgactcacacgctgtgtgacctcggaccaataactgaatttctctgtgccccactttctcctccagtaaaacaaggcagataaacagagctcaagaagtgttcactgtttttcttctcagctgttaaatgaatactagctcccttttattgaatacggcaggcacgtgttgggcactttgaacacattgcctttcatttttagaacgactccaccagggagatagtactgctcttccagagataagaaagccgcctcagagatgaaatcacctgcggaggaccccgtgctggggaggtggtggctggtagtgagacgggaactgggttggggacacttctcaagggagtcaggcctccaaggtagggaccagtgcgctgcgtccc

SEQ ID NO: 725198 - DNA, 1016 bp, Homo sapiens
tcacctgggaacaaccactccctccccactttggagccagcagcctttggggaaggtgggctctcgtggtttctgtgcctggcagaatgtcctataatcctggcgtctgcmtgctcagaaaacagggtccccttcccatctgagctgccgcagccttggcaccttggtttaccagtgcaacacagcccatgatgatccagttgaggggagacgggttcttccttttctcccctcttgcctgcagtcctcctgggcctccacacccgtccttcgacgacccccatggacagcaacatcccaccataggagagaaacccttctgttcattcccggggggctcgctagggaaacgcctgagtgatctattttacagcctcccccatgctccattcctgccccttgcagctgggggttgtccagcacagaagggaacaagctgttaactgattaatgatcacaaaacttcgagagaaaataaaggatttggatgatcccttatttggatttgtgtggctcaaaagcagcgcagcgcagatgagtttgggctcttgtcggcttcgccctcatccactgctcttccccagagggaagccagactgccaggttcaaattccagctgccccttccttcccgactcacacgctgtgtgacctcggaccaataactgaatttctctgtgccccactttctcctccagtaaaacaaggcagataaacagagctcaagaagtgttcactgtttttcttctcagctgttaaatgaatactagctcccttttattgaatacggcaggcacgtgttgggcactttgaacacattgcctttcatttttagaacgactccaccagggagatagtactgctcttccagagataagaaagccgcctcagagatgaaatcacctgcggaggaccccgtgctggggaggtggtggctggtagtgagacgggaactgggttggggacacttctcaagggagtcaggcctccaaggtagggaccagtgcgctgcgtccc

SEQ ID NO: 725199 - DNA, 1312 bp, Homo sapiens
gttgaaggacatgcaggccaaaccatgaagggaacacagatcctgtgtaaggggatgctgggaagagctgggccactgcagtggacgctggcctaacaggaggtgaaggtgtgggagatgagcatggagcggcctgctttcaggacagaggacagatgcgccccagcactgcagtcacaggaacatctagctctgccctccctggacaagttgtctgccttgggtgaacttttttttttttttctgagatgaagtctygttctgtggcccaggctggagtgcagtggcacaatcacagctcactgcagcctcgacctactgggctcaagcaatcctcctgcctgagcctcccaagtagctggaaccacaggtatgcgccaccacacccagctaatgttttaattttttgtagagatggggtctcatcatgttgctcaggctggtctcagattcctgggctcaaacaatcctcccacttgccatttgcaagccctgtggtcttggataagtcacttaatcattcagcaccccggtttcctcatttggaacatggtaaaaagaatactggccctgtgaagttgcaattttaagtaacagtgtttaaatgtgctttctgaacgtttgctcacactggtcgcagtgtcaccgagtgacaagtatgaggccaggaaaggccagcgaagtgtcctgtctgcccagctcagggctgcagcagaggaactgcacccagcttggactcctctgcctcctctgctccaaaaggcccgcctgtgcgcctccctctccttcctgcaaaggagcatgcttctctcaggctgcaccacaccttgccctcccgacgtgggctgcagaagccatgggaccaagaagcaaatcgataccaagaagcacagccgcatgcctgatgggaactgatcccagcaaacgagtgagccagcaggggctttctcgcagtccccagggtgttccgggagaatgcgtcagagtatctgtcccggacaccggtggttttcgggtttccctccatgactaagactctcaatggagtacggcggcaaaaagaggaaaagcaccaactcatgttttctgaatcagcccgccagctgcagaactttgggctccagccagatctatggaacaagaatctgcatctgaacgccatctccaaaggactcctaggcatttgagcttgagaagcgcgggctccctccccactctcatcgtggctctgagctgagatatccaaacttttctgatctgatatccaaacttttctacccccaacaacctgtttatctatatctaatataca

SEQ ID NO: 725200 - DNA, 1335 bp, Homo sapiens
tgcaatgtttctcagatttccttggacaatctcaaatcattcatacctgtgcctctccctcacttttcagttgccctgctcccaaacaccttcactctcatccacttttttttctctttgtcctactcccttcccttcattcctttatgctactcaacttaaaaatgaaaagcaaacaaatgaacaacaacaacaacaaaaacattgaacaagctttggatttcccactggatgtaagcttcaggcttttaagaaattgtatgaaaatttcctaagcccactcaatgtgtttgtcttgtcttttaagttcttaggtgtttatgagatcctggtcactatgtatatctaatcaaaactgactttttttaatataggacctagttcctttcttttgtttactcataacagcactcttgaaagtcactatcagcgcaaaacgtttggcctgactgggtgagggatrcgtaacaacatcatatggcaaagataagattagatattcaacacttctttttatttggccacccataccactgagaacttctttctcttgtccttctcttcccctgttttcaccttcctttcttcccaactcctaatcactcttcgtttcttatgcagaacgtaagtttcatatctccttttagtttcatgatctccttttacactacagtaggtgcagggagataaggagcatctcactttcccttcccaaggagacctatgaagaagtattttattaaatgaaaaatcatctactctgaacagcagttatgtcattttcatagggacagaagtagtggccaatattgttattctaaatggagcaatttattttgtactatgctattcaaagaaagaccagtgctttcattctcagttcttaacctcataaaaaggtgaactgtataattagtacagaagcaagctgaaaaccagaatgcacagagaaacagactattgttattactagtttgataatctggcatagaacccagagtaacacaggcttccttagtgaaggcttcagtgatgtttgaatgagtagaggaattgcaatcctcccttcctgagccatgtttgaattatttctatggagaaatggtgggtgaagtggataagggtgcagagcctggactcagcctgcctgaatttgaatcttttcactggtacttaattgtcatgcaatctagaaaatctggatgtaggacaacttcgctaacatttctaagactctgtttcatggaaaagaaatgaaacacagacaaaaatattccctccctcatagctgttgaaaggattaaataaggagatatgtgtaaagcattcaacaac

SEQ ID NO: 725201 - DNA, 642 bp, Homo sapiens
ttcagtaagctcttgtactaacctctacttgtgcttgttgcattgggttacaagcgaattttaaatgttattcctccctacaagactatgaaattatggcatgcagggaaaacttcctacttatttctgtgttgccattattcagtacctggcacatgctaggtgccccacaaataaatatttgttaactgaatgaataaactaataaatattagaaagtcacttacttgggattatttaaaaattgaggtcacctccacatgacaagatatttcttccacaagctttctgctcttattcaaacaaccatcattggataccatctcaaatctttacaagactaagagctaaatgttattaactttatacttaaaacatctgacaaaattgaaggctgttttctatttatttgattagttggtttaactgaataagaaattacaagaccctgatgagatagaacgtggaaaggtgttttacttttcctttaytcccttttaaatacgatggctggaataacccaggtgtcacctgaaatgttgatgactttgcctgaaagtggaattctctaaccatctgcagctggtgcaattcagttgactgtgggagtggatgatctataggtttacttgacacttgtaa

SEQ ID NO: 725202 - DNA, 586 bp, Homo sapiens
aattgacagcaacctgcacaaagccactgaaaggcaaaagctgtggctctggctgccccaaggacacacagcagcctatagactctttctctcaggactctacagagcagcatagcaataagcaatgatttgttatagctctgctgtcaggcagcttacctaaatgttagcacccacatgaactgcataatgatttctgaaactcaatttctccactaatacaagcaaacagatttagttacagttagagagggtttgggggaaaggcagcctctaaagagaggccaagactaccccctccatcgccccgactccgtctctgtggagcactaaagtactgatttggatcaagaccaaggaggatagaggctcagggttggagcagagatttcagtgtgataaggaaaatgatttwaaaaaaaaacaaccctggaatctgaatgttagatcttcagctttcccttttttgtcttctacatttggctttggaaatatctcttctctcatgaggctaaggaaggggtatccatgtcctgggaaggtcaagtagacaccacaagggtaccacaacataggggatcagggg

SEQ ID NO: 725203 - DNA, 597 bp, Homo sapiens
gcagcctgccttcaatgacagcctcgtctcctgtcctaatatttatatcttagcctcttattaattgcatttcattgatcatttcctgaatactcttcttcccttttgcattttcagtactccaattttttttktttgtttgtttgtttttcaaagagcaggcatcagagtcagattttctaaagggcctgccagtgccacacctgctattgttgatcctcataccctgtagatccctaaggatggctaatccccttcacaggaggcattgtttccagggagaatgggcttattggctttccacacctctgttagaaacaacagtggagaaggatgatgtggaagggaagtgagctggtagcaggtctaaatgcatccataatcagaaagatttccagatttccctaattgctgtttttattcacagaacttctattttaagcgcacacactcacatgtggattgacaggcaccagccactgtaatggctgtgtctgtctgtagcgactgcaaacgcttgtttccatggtgacgggaggcaccacagagacacaattatggtgctgctgggaccagggcactgccacaccaggaggc

SEQ ID NO: 725204 - DNA, 597 bp, Homo sapiens
gcagcctgccttcaatgacagcctcgtctcctgtcctaatatttatatcttagcctcttattaattgcatttcattgatcatttcctgaatactcttcttcccttttgcattttcagtactccaattttttttgtttgtttgtttgtttttcaaagagcaggcatcagagtcagattttctaaagggcctgccagtgccacacctgctattgttgatcctcataccctgtagatccctaaggatggctaatccccttcacaggaggcattgtttccagggagaatgggcttattggctttccacacctctgttagaaacaacagtggagaaggatgatgtggaagggaagtgagctggtagcaggtctaaatgcatccataatcagaaagatttccagatttccctaattgctgtttttattcacagaacttctattttaagcgcacacactcacatgtggattgacaggcaccagccactgtaatggctgtgtctgtctgtagcgacwgcaaacgcttgtttccatggtgacgggaggcaccacagagacacaattatggtgctgctgggaccagggcactgccacaccaggaggc

SEQ ID NO: 725205 - DNA, 1293 bp, Homo sapiens
attgactaattttaaattttttatcgtctgtagagaaagagtcttgctatgttgcccaggctggtctcaaactcctggctcaaacaatcctcctgcctcacccccacaaagtatggggattacaggtatgaaccactgcatcrggccttaagtttttaaactgctagtttctaccacacagtaggcacacaacatgtgttgactggctgactggtcacacagttaagtctcaagaagctatactgacaaaatgtagaaataaattaagtagtaacaaatcgtttatatttggcttttgaatatctaatatgctacagcaggatggagaagactcttttctgcaattccttttcctaaatgtactttccttagggcgtttactaagttatgcctcagaagtcctgtaagatatcagtaaattccttcaaactttcaacaaaaatattattttctatacatctgaagtcattttactatcagccatcatgagtctgtaattcatctttattcagcaagatctttgaaaccaaagcaggtctccaccaggttctatagactttatcatccagctcagcaatggcaaatggatctcatctagagtgttcactctgggcaatcttccctgcgagcattggaaagaaaagaggtctgaggctgacccttggcttaatcatatagtgcatcatctctaggagacctggggatgcactgccacagagtaacactcattctatccctatggcccagctcttggctccatactatttgttcaattttcaaagccaatgattgtgagggattcaaatgtcattgtcagaggatcctcaaataactagaaagacatcttcagttcattaaattgaagtccagtgaagctaagagccagcaatattgatttctgttgtcattcttaaaagtcagccaggaattctactccctttattttctgaacttcaagcgactagcctctcaaataaaagattccggaaaaaggtcattagagatcactttaccctcaaagtcgagaggctagagatgacacaggtcaaatcaagactggcaatgggacctgagaacctagtgatttggcattttaaagtaaggatcctggtcttttatgagccgtgatttatctatctatgaaataacacccttttctcaggatgagtcactggaaataaggtgatacatttatagaataaagatgaggaacttgcttaacatcactaacaatcagggaaatgcaaatcaaaaccataatgaggtatcaccttactctgttaggataaccat

SEQ ID NO: 725206 - DNA, 666 bp, Homo sapiens
tgcccagctaattttttttgtatttttagtagagatgggtttcaccatgttggccaggctcatttcgaactcctggcctcaggtgatcgactcaccttggccccacaaagtgctgggattacagctgtgagccaccacacccggcctgatagttttattttaattgtctcctgcatagctcatctctgagaaactttctctgtctggttcagagtaggaaggagcacagaaaatgtctgtccagtgagggaaggaacagagagtttagttaaaaaggacgacatttctctctctctccgctgttttgtgacacacacactctctctccactctcatttctccctctctcttgggagcactgagaagcagatgagctcctgctcctgcccctgtygctaggtgatccccccagtgctcctgggagctaaaaaatgactcattcacgaagcaaagattgcaagctaaacataggaggatacatcagaacagggcacagactctgccttagggaagcccgcagcctgcgggagcacaggtgtgcagacagatgattgcaaggcagcgctgagtccctcagagaagaacacacaagcatgagtccagatgagtagccccaagcccagcccacggcagggtgggagcaaggatgctctcccagaatacgca

SEQ ID NO: 725207 - DNA, 666 bp, Homo sapiens
tgcccagctaattttttttgtatttttagtagagatgggtttcaccatgttggccaggctcatttcgaactcctggcctcaggtgatcgactcaccttggccccacaaagtgctgggattacagctgtgagccaccacacccggcctgatagttttattttaattgtctcctgcatagctcatctctgagaaactttctctgtctggttcagagtaggaaggagcacagaaaatgtctgtccagtgagggaaggaacagagagtttagttaaaaaggacgacatttctctctctctccgctgttttgtgacacacacactctctctccactctcatttctccctctctcttgggagcactgagaagcagatgagctcctgctcctgcccctgtcgctaggtgatccccccagtgctcctgggagctaaaaaatgactcattcacgaagcaaagattgcaagctaaacataggaggatacatcagaacagggcacagactctgccttagggaagcccgcagcctgcgggagcacaggtgtgcagacagatgattrcaaggcagcgctgagtccctcagagaagaacacacaagcatgagtccagatgagtagccccaagcccagcccacggcagggtgggagcaaggatgctctcccagaatacgca

SEQ ID NO: 725208 - DNA, 1269 bp, Homo sapiens
attactggctatttttgagccaagagagtaaaagtaaaactggagcattgttctatcctggcacgtagtcatagcacatctacattttggacagttggttgatgaaacattaaaaaaaaagatacagcaaggacatttggatataaagaagctgaaatgttagattcttcagatgaggactgcaaagactagagatattatggtgggatgaacatactcttactaggtatatccagaaataataaaactgttaaaacatgaatgcaatagttttatacaaaaaaataggaagaaattttatcaacctttttatcttatgatacgatatagctgaacagaagaataaagtgtttaacccatttatgctggaggttgcaaattattttgtgtgaaaaatcagatcttggagatgaccttgagcagtgtgatataaataactcccacaagcttagtgttccaataatggaatgctaggcataartaggttaatctggaacctacacagctgcgcccaaccatcctctctctgcttggaatggggaaaaaaaaaggtaattttcctcatcctttactctttctccatcagaaactgcttcaaagaaccaattagaaaagttgagggaaggtgttcctaaaaaaaattaatggaagactattttaaagagattgtcatcatggatctgggccagagaattttagaagcttacccagggatgatactgtattcctacccagggatgatactgtattcccaactgctgtctttgaactgaaaaaggaaatctataaatatatttaatttttatatcaatgaatttttatagaagtgctttttatatagtttatactaaatgattgttaaattaatttgaattcaccttgtcagtataaatcatgcttctagccaaaagcagtcctcaagaacaaacacatgtacgtgcttgcagacacacacacacacacatacacacacacacgttttatgttttaatatctgtgtcatgtattgctttgaggtgatgggtaggaattttgtacataaatggaataggattaagagagattatgtgttagaaatgtttggggtaaatgtctcaccttccaaggtcaccttctaggctgacatcctagaggaaaccctgctttttcataagacatactctggtggcattgagagaaatagaatcctggtctaactagatcactcatctatctgttacgacattttgtatggctttagctgagtcttcatatgccattttggatttt

SEQ ID NO: 725209 - DNA, 2756 bp, Homo sapiens
tccaagtctgatctatgcccaagtcttgcgttttcaatcatttttgctggactctgtacatatctgcatttactctcattgcgagattgatacgaaagtacctgcagaaatgcttgggagatgyatctgttttgttgttagcatagctttattgcggtataatttatattccatacaattcacccattatatgtacacagttgtgtaatttttagtaactttataagggtgggcagcctccccccagtccagtttttagactttgcagtcagttccccctcccacccccagtcttagttaatcagtgatcttttctcttgtctgtagcgttttgcctttgtacaggtagaatcacagtgtggcctctctcttgggtctggttttgttcatgtagcatagtgtttctgaagtccatccattgttgcctaagacatctgcttttaaggaaccttcttagagtttgtcatctatcataagagataccctgtgctgatgagaaaaaggtccactgagatgtgccttaagatgagaataaaaataacagtggccagcatttcccgagcatttgttatatgccaggcacagttatggccattattttctgtgatttctagaaatcagttgtagaggcaccaaccaatgcagttccatgagaggtgccatgatcagtgtttttcaacaagggaggttaaaagcttgctcggggttttaagagctgggatcagacttgggccttcttctcatggagctgtgtctttactgcttcttcacacgcccttcaccatgtgtttgaggcttgtgtcttcgtagcctcacaaagagattgggattccagttggagaatgcatttgccagttttgtttttttttgttttttttttttttttggcagggtcttgctctgtcatggaggctggagtgcagcagtgccaccatagctcactgcagccttgaactcctgggctcaagggatcttcccacctcagcttcctgagtagctaggactgcagagcgcttcaccactctaatttttaaattttatattttgtagagatgaagtcttgttctgttgcccggttggtcttgaactcctggcctcaagcaatccttttgcgttggcctcccaaagtacgggtgtgagccaccgtgcctggctgaaaattgtagttttaaggggaatatttgtactgaatttttattttggcattaccgtatggagatgatagtgtcttaaagtgatccatttgtgaagtattcttaggcatagtgtcagaatggcaccaaattaaaaacacataattatgtcatcaggcagagcctgtgtgtttgagttgttttaaatgttgtgtttaccagaaatgccatttttgtacagagtgccccaaggctgttaccctattaatgaatggaatttaattaggcatcatgcatttttcaacatgtttatctaattgtattatgtataatacattttactctcgaacagttctatatctaaacggtattttttcctgccacatatagtctatattggaagatttcatagttttgtattgcagaggagttctttgtatatcccaagaattctgaaattttggaaaagattttaaacaccttacacactcaagtagcttggtaagagctggttacataattttagccatgataagcaataattttcttttttttttttttgagacagattctcagtctcgtcccctggctggagtacagtggtgtgatctcagctcactgcaacccccacttcccaggttcaagcgattctcctgcctcagcctcctgagtagctgggattacaggtgcccgccactgtgcctggctaatttttgtttatttgttaatttttatttttattagacatggggtttcaccatattggccaggctggtctcgaattcctggcctcaagtgatccgcccacctcagcctcccaaagtgccactgcgcccggccagcagtaaactttcttgaataagaattagtgttacactgggttctacccctggttgctggtagaacagtttttactggtgtcacatcttcctaaactttctcaaatggaattatggtgtcgttaaacttatttttcacgtttagtatgtttttctcttttaaggatttttaattataattttagtttactagttcaaagtagcaaacaaaaaagctttttatgttagaatacctagttttaagaataaaaattaagaattaataatattaaattttaatttaaaaagacttcgttcaaatctttgttgatctctttatctgggtaggaccccagggaagtctgccattttttaaaatattaacccgctgaatggtgggcctttgaaatgagtgaaagaggtcaaccattgttccatatttgttgggcaattccaggcagtgcagtggccagttagaaatcctcacgacttgagctggaagcctgggggaaagtaggatttgggggcagaggtaggtactggaatggtgcagtgaagaagctgttatcttccgttgccaagggactctgttcagctttaatctgtgtcctggctggacggtgcatgtcagctgcccaggctaccagtgtgcagggcgcaggagttagaagcaggccccagtctgtttctttttccattccagaatcgcttctgactggcacatgccttgaagagaggagatattatcttgcaaaactgatccaagtaaaattgaaattgcagggagtaaaaattgggctgtaca

SEQ ID NO: 725210 - DNA, 2756 bp, Homo sapiens
tccaagtctgatctatgcccaagtcttgcgttttcaatcatttttgctggactctgtacatatctgcatttactctcattgcgagattgatacgaaagtacctgcagaaatgcttgggagatgtatctgttttgttgttagcatagctttattgcggtataatttatattccatacaattcacccattatatgtacacagttgtgtaatttttagtaactttataagggtgggcagcctccccccrgtccagtttttagactttgcagtcagttccccctcccacccccagtcttagttaatcagtgatcttttctcttgtctgtagcgttttgcctttgtacaggtagaatcacagtgtggcctctctcttgggtctggttttgttcatgtagcatagtgtttctgaagtccatccattgttgcctaagacatctgcttttaaggaaccttcttagagtttgtcatctatcataagagataccctgtgctgatgagaaaaaggtccactgagatgtgccttaagatgagaataaaaataacagtggccagcatttcccgagcatttgttatatgccaggcacagttatggccattattttctgtgatttctagaaatcagttgtagaggcaccaaccaatgcagttccatgagaggtgccatgatcagtgtttttcaacaagggaggttaaaagcttgctcggggttttaagagctgggatcagacttgggccttcttctcatggagctgtgtctttactgcttcttcacacgcccttcaccatgtgtttgaggcttgtgtcttcgtagcctcacaaagagattgggattccagttggagaatgcatttgccagttttgtttttttttgttttttttttttttttggcagggtcttgctctgtcatggaggctggagtgcagcagtgccaccatagctcactgcagccttgaactcctgggctcaagggatcttcccacctcagcttcctgagtagctaggactgcagagcgcttcaccactctaatttttaaattttatattttgtagagatgaagtcttgttctgttgcccggttggtcttgaactcctggcctcaagcaatccttttgcgttggcctcccaaagtacgggtgtgagccaccgtgcctggctgaaaattgtagttttaaggggaatatttgtactgaatttttattttggcattaccgtatggagatgatagtgtcttaaagtgatccatttgtgaagtattcttaggcatagtgtcagaatggcaccaaattaaaaacacataattatgtcatcaggcagagcctgtgtgtttgagttgttttaaatgttgtgtttaccagaaatgccatttttgtacagagtgccccaaggctgttaccctattaatgaatggaatttaattaggcatcatgcatttttcaacatgtttatctaattgtattatgtataatacattttactctcgaacagttctatatctaaacggtattttttcctgccacatatagtctatattggaagatttcatagttttgtattgcagaggagttctttgtatatcccaagaattctgaaattttggaaaagattttaaacaccttacacactcaagtagcttggtaagagctggttacataattttagccatgataagcaataattttcttttttttttttttgagacagattctcagtctcgtcccctggctggagtacagtggtgtgatctcagctcactgcaacccccacttcccaggttcaagcgattctcctgcctcagcctcctgagtagctgggattacaggtgcccgccactgtgcctggctaatttttgtttatttgttaatttttatttttattagacatggggtttcaccatattggccaggctggtctcgaattcctggcctcaagtgatccgcccacctcagcctcccaaagtgccactgcgcccggccagcagtaaactttcttgaataagaattagtgttacactgggttctacccctggttgctggtagaacagtttttactggtgtcacatcttcctaaactttctcaaatggaattatggtgtcgttaaacttatttttcacgtttagtatgtttttctcttttaaggatttttaattataattttagtttactagttcaaagtagcaaacaaaaaagctttttatgttagaatacctagttttaagaataaaaattaagaattaataatattaaattttaatttaaaaagacttcgttcaaatctttgttgatctctttatctgggtaggaccccagggaagtctgccattttttaaaatattaacccgctgaatggtgggcctttgaaatgagtgaaagaggtcaaccattgttccatatttgttgggcaattccaggcagtgcagtggccagttagaaatcctcacgacttgagctggaagcctgggggaaagtaggatttgggggcagaggtaggtactggaatggtgcagtgaagaagctgttatcttccgttgccaagggactctgttcagctttaatctgtgtcctggctggacggtgcatgtcagctgcccaggctaccagtgtgcagggcgcaggagttagaagcaggccccagtctgtttctttttccattccagaatcgcttctgactggcacatgccttgaagagaggagatattatcttgcaaaactgatccaagtaaaattgaaattgcagggagtaaaaattgggctgtaca

SEQ ID NO: 725211 - DNA, 659 bp, Homo sapiens
ggcttttataaggtaggttgccatacgaccgcacaagcttgtagcccacgaaaaaaagtgcaggttcctgagccattaggaccattggaatcctctgataaaattaagaaatctggccaggcacagtggctcacacctgtaatcccagcactttgggaggccaggcaggcggaccacctgaggtcaggagttcaagaccagcctggccaacattggtgaaaccccatctctactaaaactacaaaaattagccagtcatggtggcgtgcacttataatcccagctagttgggaggctgaggcaagagaatcacttgaacccagaaggcagaggtttcagtgagtggagatcgcgtcactgcactccagactccagcctgggggacagagcgagactctgtctcaaaaaaaaaaaaaaaaaaaaaaaatgccaggygcagtggctcacgcctgtaatcccagcactttgggaggccaaggtgggcagatcatgaggtcaggagattgagaccatcctgatcaacacggcgaaaccccgtctctactaaaaatacaaaatattagctgggcgtggtggcgggcgcctgtagtcccagatactcgggaggctgaggcaggagaatggcgtgaacccgggaggcggagcttgcagtgagccga

SEQ ID NO: 725212 - DNA, 826 bp, Homo sapiens
catttaatgccttgctatctaaatcagctcctgtagattctgtattatttaactgaaccctgtaactgatacagtgcttaatttgygttgaataaccactaatagtcatgaaataactgacaaactgcacacaaattttttttttttttgagacagactcttgctctgtcacccaggctggagtgcagcggcatggtcttggctcactgcaacctctgcctcctaggttcaagccaagcgattctcctgcctcagtctcccgagtagctgggactacaggtgcgcaccaccatgcctatttttttggtatttttagtagagacagggtttcaccatgttgcccaggctggtattgaactcctgacctcaagtgatccgcctgcctcatcctcccaaagtacagggattacaagtgtgagccaccatgccaggcctcaatttttaactatccactttagcaactgtctgataataaaacactgaattgtgacattttgagacatctccctctgcaaagcaatgtcttcgtagtaatcaacactgtagttataataaatctaagacataactgaagtcaaagtacctgtaattatctagcatattatttcacaggctgaaggtacatttgcttttaaaatacgcaaatgtgtattaaaaccaaaaatttaaagtctgtcactgtgtggtaaattcatcttgcaactcaggttacacaaacatctaagttaagaaatgttatgttcttaatgaaaaatacacaatgaattcccaactgaaaacgctgctccttgttctggttcaatgctgcttgaaacgtttatgaagg

SEQ ID NO: 725213 - DNA, 630 bp, Homo sapiens
gttttttttctgctttcaaaatctagaattttcatatttgtaacacctggaggtaagggtcatggtgttaattataaagagagcrgagagagtaggcatctgtaggaaacatcttgggtttttttaattatttgctggattcatttattcaacagttgtatatgaaatggtttttacacatgaggtcctgctaagggtagtgcttgccaccttcgtggagcttacatttggcaggaagctgtattacactagatgaatcctatgtggatgtgcaactcaaaagaaagggttgtggactgagaatcataagtttgggggttatcgagacgcagatagaaatgtaaacaaacggtgtggatcaggtagcctgtacacagtgaagaagagaagatgagaggacatctaggtcagggccctgacaatgggcatgtagaggaggaagcattggccaaagagcaggaaagatgggacggagtaggaggactgccaggagaacacagcgtctcagaagccaagggagggaggaagccccagacaagagcgctgtttgctcatggggttcaggagagagaaaggcggagaagcatctgtcaaatttaaccactcaaaggtcattgagatctcaggggg

SEQ ID NO: 725214 - DNA, 2077 bp, Homo sapiens
tgaagtctttgcaagcaagaggtattcaaaagtcatgcagtgtgtggcaaaagtctttaatggataaaacttctttacgcattttggatgtttaaaatacccagctactagtttccagtcatatgcttcattcattgtaacaacttaaatcatattccaatttctttactgcctcattctaaagccatacagtaattggtctaatttgtaatatgtaatttggggattactgtgacatgccaggttataaaatttaggaacgtttgagactattttggaaatattaatttatggcaatagaaatgtcaaaaattagtaaagttcagtgtttaaatttgccaayttgtggccttgaatcaaatgggtcttatctttggtagcacgggcactttataaaattagtaaaatacattagctagaatagagtcagatactaaatatttggagcaaaattggccaaaaattctttaaaatcatctctttggctttgcttcatgagtccttcagctgaagattacccttataatagtaacactgaaggatgggatgtagaaaaatcattgcttttactttcataaacatccaatacatattattttagttactaagaaatacgctaagtagccatggaggataactatataatcaaaaaagttcccttctttcaaatttttaacttatttgactataatctgcaagattaagtcaatgtgacattcaaaatcttaaaatgccagtatgaccttgacatttttgaatttatctgaattttcttggcatctatttatattttcatcctgggtcacctcttgtggtcatgcattttatagatttattccctgttctatcaaacaagtcttgtgtttattatcatgctagccagataaatttttatcatgctagccagataaacagactacaagtgcagtcaagctagagtgggagtgtaaggggttccagggattttgagtctgagcaagaaaaaagatgtggccacgaggtggcagcagaaaatacaagcttttttttaggtgaccctttgacaaatttgcatgtaggggccatgacaggggtgccacccagaaaggcaggaaggctaagaactcctaagggagatacagatcagaaagggagcacctgtctccgtgatatcactcaacagcatggggagactctgggtcagagagctgcaaaatgcagcagtggcatggggtatgtatagagaagggcttagcttacctatgactagcagatgttggcacagttttgtggggtatgcaaagcaagcaggctctaaatggctaaaaaattctgcttattatggccgtgttgaaacaactggacatacaaaattcaggtttggtgccacagagcttttaagctaatgggtctcatccagatgtgaagaaataaacagcccagtggccaacgtacagaggccaactttggctcttttctataaaagggaggccctgtgacatggtgaaaagaaggtgggtttggaatcagacaatcgggatttgaaatccctattgtatttcttattagctgtgtaacctttgtctatttcattacctttaagaacctcagatatctaatgtggaacaaggggatcaaaatagccaacaaaagcctgggatgaagattaaacaaggtagcacatgctgatcaccaggtacatagcttatgttcaataaatattagttgctttcataattcttttccatactttggggtacattataatttgaataccacttggataatttgagtcttggataacagaatttcactgaagggtttgcatgcacggtagtttattttgaaaagtgatctcagggaacagaagcaaggggctgaagagggggaatcagggaaagaagaagagcttatatatagatgtgccctatggtctgtttttgtagtgatcacctgtggtctgagtagcaaattgaatgtgccacaggattacccacagagggacagaagaagaatgtatctatggacatctcccttcatgccaccaaactgatcgagggttactctttggcatactaactccttctcacttctaggt

SEQ ID NO: 725215 - DNA, 1179 bp, Homo sapiens
tgctttaaaattattgtagatttgagaaaattaataattcagattgttccttatgcacaatggcctgaatggatagccagatcccatgcattctacttccttgtctytcaaatctgtttacctctctatattcccacaactggccaagtcatcagtatcatctcctttcttgaccacagcaacagtttcttaacttatattctaaagccaattctccatcatgtcttgcaagcacttctgcaaatctccattctgttgccaaaagatcagtgataaaggaaactctaatcatgtctctttttccctcgtttgaggcttccaaagcttctgactatgtttaaggtaaagtctaaagtttatgtggcctacaaagtcttgacttgctcttgcctacacacttaggcaccactatcctttctttcaatttattgggaatttggggagttttgtttgttttgcttatagacatttgcacataccattcactagaattctttgattaataattgtctccctagcaagtttcatgagggtaggtaatatacatttcagcatctaacctagtgttaacatatagtagatgattgatatagtaagtgctcaataagcacatggaaagcatgaatgaatgaatgaacaaatgaatgatatcttagaaactatatttagacaataattgaaaatgatatgctttcatgctgaaaattgggcaaaacaattcatattactcttaacaataattaactgtatgtatttccttttttcctagcctataactttttctgtaaaatctttcaagagcctctctccttccccttgcccatgtagcatttcagtcagctttcattaaatacaactgatcaggtattatgttttttcagatcagtaacactaattatcaagtaagaactttcattccccttaaagcattcctaatctgagaccctaggagggacttcagagtgatggagcactggcaatgttcccaggtcttggatccaacctgctgacagtttctggttataaactattcagaggagcaaagctgttagatcaatttgtcttgtagaagttctaagacagcttgctcacgcacactttctttctgatatgttcagcagtctacagctcttttgctgagctgtcagaagacgtgactttccagctgttaaaacagct

SEQ ID NO: 725216 - DNA, 554 bp, Homo sapiens
tgataytgttcgtttatcaagaagaagagctagataaacacattgtttcttactacatcctattttatagccaagaagaactagaataaagtctagttagtgctaaagaaaagaaaaaacaaagggatcatattcaaaaatgaccttacaagaaaacttacatgaggggaaaggaactagactttagaactagactttagttcgaaacgaactagactttagactttagttctaaagtctcctcaggttcttcttggctattaaatagcatgtagtgtaaattcagaatgtatttattgttaatagagctccaaatgctagcccttcagaaatgagtatgtggccattgtatttacaaaactgtcttagattttgtcagagctctcggagtcttgatgactgagatcagtggtttcttaattggaaatgactgagctttactcttccccacttgggatgagtctagtttcttgcattaaggtaatgcaaaaggaaccaacctggcaatagcagggtgtttcagcaaaatgcctctgatgtacttagtgcagtct

SEQ ID NO: 725217 - DNA, 554 bp, Homo sapiens
tgatactgttcgtttatcaagaagaagagctagataaacacattgtttcttactacatcctattttatagccaagaagaactagaataaagtctagttagtgctaaagaaaagaaaaaamaaagggatcatattcaaaaatgaccttacaagaaaacttacatgaggggaaaggaactagactttagaactagactttagttcgaaacgaactagactttagactttagttctaaagtctcctcaggttcttcttggctattaaatagcatgtagtgtaaattcagaatgtatttattgttaatagagctccaaatgctagcccttcagaaatgagtatgtggccattgtatttacaaaactgtcttagattttgtcagagctctcggagtcttgatgactgagatcagtggtttcttaattggaaatgactgagctttactcttccccacttgggatgagtctagtttcttgcattaaggtaatgcaaaaggaaccaacctggcaatagcagggtgtttcagcaaaatgcctctgatgtacttagtgcagtct

SEQ ID NO: 725218 - DNA, 554 bp, Homo sapiens
tgatactgttcgtttatcaagaagaagagctagataaacacattgtttcttactacatcctattttatagccaagaagaactagaataaagtctagttagtgctaaagaaaagaaaaaacaaagggatcatattcaaaaatgaccttacaagaaaacttacatgaggggaaaggaactagactttagaactagactttagttcgaaacgaactagactttagactttagttctaaagtctcctcaggttcttcttggctattaaatagcatgtagtgtaaattcagaatgtatttattgttaatagagctccaaatgctagcccttcagaaatgagtatgtggccattgtatttacaaaactgtcttagattttgtcagagctctcrgagtcttgatgactgagatcagtggtttcttaattggaaatgactgagctttactcttccccacttgggatgagtctagtttcttgcattaaggtaatgcaaaaggaaccaacctggcaatagcagggtgtttcagcaaaatgcctctgatgtacttagtgcagtct

SEQ ID NO: 725219 - DNA, 600 bp, Homo sapiens
ttgcctacagttatgtcattgaacatttccacgtgtgcctaatttttcacgttcaactagaataaaagtatatgagtaaacttagagaatttaaaaagtattatacaaatatttcttcaaagatggcatttatttggtttcctctacaatgtctaatttaggtgtctttacttctagatcaaaggcaaaatgaaatgagtggaagcaccgtgaatagtgatgctttcttactcaccagactaacacaactagaggaatacataggcagcaaaattatggtctatgccaatagagaacttatcctgaacttgcagacagaacatttattaaatggtacatatagaaatctaaacgttcctcagagttcctacagttcaacattggccaaggaaaattggagaaggccatgggctagaagggaggttgccttaaatgagtgaagagacgtgatctagagaggagatgattttgagctcacaaacatggacaaagcagatttagtcaaatacaaactgcaatacacaaggatgtatcattatttttgctcaaagaaaaagtttgcctcaaattatacattgtaatatgcatrgatttgacaaa

SEQ ID NO: 725220 - DNA, 572 bp, Homo sapiens
agcacctgcaagcactagaatgagaggtgagtgccagctgttagtcggaggccatttgttttacagcattatcctgatgataactgacagatgcatgcagtggggacttgactgtgtcccctgagattcctatgttgaagcctgaacccccagaacctcagaacatgactgcatttgaagacaggacctgtaaaatggtgatgaagctaaaatgaagctgttaaggtgagccctaatgcaatctggctcgtgttcctacacaaagaaactggacacacacagagacagcagggatgcctgcacacacacacgtgtgctccagtgcatgtgcacacacacagagaccatgtgaggatacaaagagaaggctgctgtgtgcaagccagggagagagacctcgacagaaaacagccctgctgacaccttgaatgtgggcttccagcctccggaactgggagagagcaggtttctgttgttgaagcctccaggtctgcagcatttkttatagcagccccagcaaatgaaggcaatggattactgttaccttgtcactttccatgctttgtaatttc

SEQ ID NO: 725221 - DNA, 599 bp, Homo sapiens
gaccgagtttartgtaatcaaatataacacaaacaggttcatctagttcattaaattctatctgtgcattcctttaacagatactggttgaacacctactatgaaccaggcacagtgctttgctgggggtacacagatgattgaaacactggtctccgcttcaaagagctaatgggagaggtagacccataagcagacaactatgactcaatgtgggagcagagtgcaacagtttggtaacctacccagtagtcactcccaaccctttctggcttccagagccctcttcccgttataaaagtgagaatgctttcctatctttccttgtaaccaggaaaagggcaggttaccaaatcctggtcagtctactggaaggattttagcaaagatttttcacctgaaaacggagaggaactcctatccctgaatctccttctgttatgggctgaatcatattctcttagaattcatatgttcaagtcctaactcccaggacctcagaatgtgactgtatttggaaataaggtattttaaagaggtaaagaggttaaaataaggccattagggtggaccctaatccagtatgactggtattctta

SEQ ID NO: 725222 - DNA, 1302 bp, Homo sapiens
tctaggtttgggtaaatataccctatgatgtttgttcaaagattgcctaacaatgcattttttcagaatgtatccctgtcattaagcaatgcatgactgtttatttttatatatttaattgggaagacatccatgaaatattgtgttatggagcagcatgtatagtattatccatgtctatttgggcacaatcaggattgcctcaggcaggtcattcacgaggtattccagaagaaggcgttgttatagcagatgacagctccatgcatgttatggcccctgaagactttcccgtgggacaagatgtggagcactgaaatcttatgtataaaatatttatatggtgcttgaatttttttcttccccctgggtcagggtcttcattagggaatgaaagggggaggacggggattgtcctcactctcaccaacaactcaggacagcaaatactttgcttttgtttttgtttttaaatctccaaggcgggccgggcacggtggctcacgcctgtaatctcagcactttgggaggccaaggtgggcagatcccctgaggtcaggagtttgagacaaattttgtatttgtaaaaatacaaaaattagcctggcatggtggcccacgcctgtaatcctagctacttgggaggttgaggtggtagaatcacttgaacgcaggagatggaggttgcagtgagccgagatcatgccactgcagtccaacttgcgagacaaagtgagatcgtgtctcaaaataaacaaacgaataaataaataatcactcaggaataaattttaaaacttttctcttcacatatatactcatttctaagggattttcaattctgtaattgagtggtcatggtgaaatggaaagaacattaagtgataattaggaaatgtatgttctacatttgattcttctcttgtttggttttgaacaagtaccttcttctctctgggcctgtgaagttacrggacttgaacttgatgctctcaaaggtcccttctgattcctaacagtgcagcccgggagcctgactccctgaaactcccgaggcccaggtgtgtatctgcacgtgcctttggtacggtggagccgagtgcccaggagcagggctggcaggtgagctgactctgctgtgtctcggcccggtgtccactgtcctggaagaagactgagcatccacagcattctatccccagatgaggctgacagtcacagtcacagatggccagaggatgtgctgtcacctggttgcaccagaaacaaacaggctgcagagtgtgttgctacgttagacct

SEQ ID NO: 725223 - DNA, 1302 bp, Homo sapiens
tctaggtttgggtaaatataccctatgatgtttgttcaaagattgcctaacaatgcattttttcagaatgtatccctgtcattaagcaatgcatgactgtttatttttatatatttaattgggaagacatccatgaaatattgtgttatggagcagcatgtatagtattatccatgtctatttgggcacaatcaggattgcctcaggcaggtcattcacgaggtattccagaagaaggcgttgttatagcagatgacagctccatgcatgttatggcccctgaagactttcccgtgggacaagatgtggagcactgaaatcttatgtataaaatatttatatggtgcttgaatttttttcttccccctgggtcagggtcttcattagggaatgaaagggggaggacggggattgtcctcactctcaccaacaactcaggacagcaaatactttgcttttgtttttgtttttaaatctccaaggcgggccgggcacggtggctcacgcctgtaatctcagcactttgggaggccaaggtgggcagatcccctgaggtcaggagtttgagacaaattttgtatttgtaaaaatacaaaaattagcctggcatggtggcccacgcctgtaatcctagctacttgggaggttgaggtggtagaatcacttgaacgcaggagatggaggttgcagtgagccgagatcatgccactgcagtccaacttgcgagacaaagtgagatcgtgtctcaaaataaacaaacgaataaataaataatcactcaggaataaattttaaaacttttctcttcacatatatactcatttctaagggattttcaattctgtaattgagtggtcatggtgaaatggaaagaacattaagtgataattaggaaatgtatgttctacatttgattcttctcttgtttggttttgaacaagtaccttcttctctctgggcctgtgaagttacgggacttgaacttgatgctctcaaaggtcccttctgattcctaacagtgcagcccgggagcctgactccctgaaactcccgaggcccaggtgtgtatctgcacgtgcctttggtacggtggagccgagtgcccaggagcagggctggcaggtgagctgactctgctgtgtctcggcccggtgtccactgtcctggaagaagactgagcatccacagcattctmtccccagatgaggctgacagtcacagtcacagatggccagaggatgtgctgtcacctggttgcaccagaaacaaacaggctgcagagtgtgttgctacgttagacct

SEQ ID NO: 725224 - DNA, 620 bp, Homo sapiens
  misc_feature 230: n = A,T,C or G
gggtaatttataaaggaaaaagttttaattgactcacagttcagcaaggggaacaggggagacttcaggaaatgtaattatgacagaagggaaagcaaacactcccttcttcacatggtggcagcaaggagaagttgagagcaaaagggggaaaagcctcttatggaaccatccaatctcgtgagaactcattcactgtcaygagaacagcagcatgagggtaaccaccncccgtgattcaattaccttccatgggtccctcccatgacacatggggattatgggaactacaattcaagatgaaatttgggtggcgacacagcccaaccatgtcataagctttcactcctgctttaaaacttgccttggtctctccttctgccttatgtcccttagttgaattctttcttctgaggaggcaaaaattgaggttgctgcttactcatacacatttgctgctggtaacaatatgtcttatattttgaacactaaaacatgttcctaaataaaaatttgcatatgtaactcatgcttttaatgaaaccttcgattgttcaccaagatatatggaataaatataaatactgacattcaaaaccctccataatatggttttggcc

SEQ ID NO: 725225 - DNA, 2294 bp, Homo sapiens
  misc_feature 217, 218, 219, 220, 221, 222, 223, 224, 225, 226, 227, 228,229, 230, 231, 232, 233, 234, 235, 236, 237, 238, 239, 240,241, 242, 243, 244, 245, 246, 247, 248, 249, 250, 251, 252,253, 254, 255, 256, 257, 258, 259, 260, 261, 262, 263: n = A,T,C or G
  misc_feature 264, 265, 266, 267, 268, 269, 270, 271, 272, 273, 274, 275,276, 277, 278, 279, 280, 281, 282, 283, 284, 285, 286, 287,288, 289, 290, 291, 292, 293, 294, 295, 296, 297, 298, 299,300, 301, 302, 303, 304, 305, 306, 307, 308, 309, 310: n = A,T,C or G
  misc_feature 311, 312, 313, 314, 315, 316: n = A,T,C or G
taaatacaatgtatatatatacatacacacattgtgtttaataatatatacacacattgtatttaatactatttaataatatgataaatatatcgtttaatatatgttatatatgttatatgtattatgtataagatataatagattatatatatttttatatatgataaatatatttgctctttcattataattctttatatacattttttttagnnnnnnnnnnnnnnnnnnnnnnnnnnnnnnnnnnnnnnnnnnnnnnnnnnnnnnnnnnnnnnnnnnnnnnnnnnnnnnnnnnnnnnnnnnnnnnnnnnnnggtaggtagttattaattgctctaggaggattacatcagtttatactttcatcagtgtaatggttgtgtacactttactgcaccatcacctgcattgtgtattgccattacaattacattgacaggcaaaaatagtgttttattgtattattttgtacatctttgatttttactaaagttgaaccttaaaaataagtttattagctaattgtatttacttttctacaagttgtctgctctttttgtaatatcttttaatttagagggatttaaaaatatttttgcctgaaatctatagttgagaaggcactcctttctcaggcaattctccctcagactgtttggctttctatttggttttgtgacacataagtgttttatatttttatgtagactgatcttttcttctctttttttaatttataaaggaaagaggtttaattgactcagagttccatatggctggggaggccttgcgatcatgcagatggcgaatgaggagcaaaaacacatcttacatggtggcaggcaagagcagaatgtttttcttttgggattttttccattgcttttttgtgtgtgtatatgggcggacagggtctagctctgtcactcaggctggagtgtagtgatgtgatcatggcttccttcagcatcaatctcctgggctcaagtgatccttctgcctcagcctctcaagtagctgggactacaggcatttgccaccacacctggcaaatttttttttctggtagagatagggtcttgctatgttgtctgggctggtctcaaactcctaggctcaagtgatcctccttccttggcctcccatagtagtgctgggattaccagtgtaagacattgcacccggcctccattgcttttatgtgtagaatacctttcttcatctagtgatcaggcaaatctttggctttcttcttaatagttttatttttttgtgtttaaccatttaatccatctgagatttatttatggtgtcaggtgcagcatctacatggaattattcccaaataattttcctggccccatttattgcttgaccaaaggcaagtttttaaatctcctttaacttccatttccttattaagagaggattatgcaaatgatacttcactgggttattttgaagaaaaataaaataaagtcatggatcagaaagcattttataaatgctatagaaataattggtttttacagttgctatcattcacatgacctaagtgaggaaatactatgcgaagaaatgcttgtttgatgtagtcctgtctcagttcattgacaacaacaaccccaaacaaggctagttccctagatcctaacaagctcaagacttcttggaccgccagaaagggtttacagtatcacagatgagttaaaagcaggctatttatagtgagtacacttcaagggcacatatatttaggagtgtggagcaaagaagaatgcaaagcctgattggggttgggggtgtgatcagggaaagtggccaaaagcctttcgtggagagacaggatctgaggaagggaaggagttcattattattctctgaagtcatcagggagcaccaagagrgtgggatttcaggaagtatttaaatgaaaggagacacatggcttggcacagtgagagggaggttttccaggcttcctgtgctgtcttggggacctgctcagaggctggaccgcgtcatgctcagaagggtgagttggactgtactctcttggcctggccatgggttcaattcctcatttagacaagaagagagacgtcttgtttctcatcagagggagatgcagaagatgttttctggcagttggaggccactcttaaccactgaggggagaatggctgaagatctaacattataaagaaggcgctgagaatttaaccacttcccctttgaagccaaattatttactggcttgtctttcttctctttttaaatctgccagcatga

SEQ ID NO: 725226 - DNA, 570 bp, Homo sapiens
tgcaggataaaataagaaagattttaagaagtagacatttgtgattataattaatgggttttggttgtactccagtgaccctatggccccaaagtgcagcgaggggccagcgctacccaatggaagatattttaagggcaatcttagaaagttctttgtcacacaaattgggctgccccttaagaaaaggcctctgacttgcagaagctgaacttagaaaattgaaactctgggcactcaaatctattatcaattgcttcttagttgtctaccaactcaaaaggtttgttattyggaatagaaatcaaagtaaaagaggcagcggaactcagaagttagcttagattatgagaaaaacaacattttaggagaaaaacaacattttagaagaaaaactttgttccaactatacattctgcagagggacctcctgtttctccgaccatatgcgtcattgcaaaatttatgagacttctcagatctgaggtcgaacattttcctgctaccttataactcttcctaccttgttcttgccttttattttcctttcttatggcttcctttctattt

SEQ ID NO: 725227 - DNA, 1051 bp, Homo sapiens
gctgcgtccgggcccccggctgtcggcgccctcgcggctcagatcatccgggcgttggagagggaggcagagagcgggtcccggagaaggaggaggaagagccgaggactcatcgctttcgcgcctcagctgtctagagtccccccacccccccctccccaaccacccgttccggagcaacagccgcctgaggacccgaagctgcgggccggacsagcgccgagaccactgctctctagctcccgcgcgcgctcccgtccctagcgccgccaccgccgccgccgccgcctctagcgcggccccgcgcaggcgcgctcacgaccgcgtcgcccctcccccacccctccgctcgccccgccccgctggctccgccgccgctacagctgcggcgcggcgcgcagctacagagacccggatgtcgttgggcaggaactgcggtgagggctggcgggcgggggaggggccgccacagatgacgtcactgccttacccagcttctttctctgccgctgctgctgccgccgcctttgccttacggcctggagcaccaggccgaagccgaagggagcgtccggatcccggatagcagccaggacccgggccttcacgttccggcgccagggactggacagaatgtgcggctattaggtgcccagtagatcgacagcccctccgtgccggcccttggccaagtagggactcggaagctacccctacggcgtccgcgcccggagccctggctcttctacctgcctgcagatacaaaccccactccctgcgaagatggtgtacacgcagccccgagcacagacccgaagctgtccacccttcttgggcgccgtcgcggtctggccgctgcccttcgaacccatggtgggtcccaggcagctgccagacccccctaccccagagtcccactcctccagagccttcctctcccagtgaccccaggaagcccaagcaggtgccacggccacacacctcgcgacccaaagggcagagacacaagcacgctaccaccgcccaccaatgtgcgagtgcaactgattca

SEQ ID NO: 725228 - DNA, 1827 bp, Homo sapiens
atgctctctcaccctcccttgtagcttagagcagagcataccaatctatgtgccagcataccctggtatgtctcagatgggtcatagatgtgataaggtatggatcccttaagcccttgggacattcaagtgaggctgagctgctgaagccctgggatggtatgactggccacaagcaacattacccaggtacccctctgtgtcacaaaaacgttatctttgtatttgtgtcatggtgtgaaaaaattgagaagcactgcctggggacatagtgaggtagcccaattctggataaaggaaattgagaagtcttgagggggtagagaggttttcttccctaataagaagaatcacaggagagaaaatgccttcctcagccatatgttgttatttctatatgtgagcctggaatttcaaggttatcttgcaaagaaccaaggcaatgtagagaaaagaattgatagcaagtggctggatctttcacattgtaaagccattgagccatccgtgcaattgcccaccttgggaatttatttttaagagtgataataaatgctcctcattgtttaaactactttgatttttgtatttggttattcataattaaaaacacccaaatacagtagaagaactggtacatccctgacacctaatgagtgctcaatatggttagttaatcaccaaattagatcctttgcctttagaaaagctgccatggtcaaatgtgtgttgatcttatwtttcgtaaatatttaagaaatttgttcagtaactagcttaacttttaatatttatcttgagtctcttctaaatatgtttttactgtataataaaagcaataattgaaaaatgacatcattttaagcttgagagcaactagatacaaagatgttgatatgcattttctcttcttgaaggatctagacaaactggagcaccattacatgaaaaaggttaaagaatcaatgttttgcaaaatagaactggaattaattcatgggaattacagagaagatcatattagttcaatataaaaagagggcctagaatgtgccaagctccatacaatgcccctcatgagtgttatttaattctcacaacaactttgcaaaaaagaaactatttttttttccattttacaaaggaggaagctaaggctgtgaaaaagagctcttttgcaagcctaggacctgattccaaaattcccactctttctgttgcaaattctggctaagctttccagagatgacttgctttccccttgaggccctttcagtgcattgtgccatggaaaacaaaaagcccaacaatgacatctttaccaaagatgccttggggagatgggagaagagttacaatgcacattacacagcaaaatcttttttaagctccaagtaaaattggttttttcttagagttttgcttccagcagtcacttcctccattctcctgctctctccacgtgaggaaaacttctatcctgccttctcctaatacactttcctgttttttttttcctgcacatttcttaaaaatcccacataaggcaaaagccaagacaatatccatcaacacctccacccccaccgcatgtccatggagagcttcaagtcatcctgccgctggtacaaacacggcagaggcctctttgtaaagaagtggtaggtagaattcaggttagcaccagaatctgaaaactccagctcctttgactgggaccaggctggtaatataaatgttagatcaggctgggtctgacacaatggggatcagtagagcatacttgtcacatttgaaggcattcagaaaaataataaccttaaaaca

SEQ ID NO: 725229 - DNA, 1827 bp, Homo sapiens
atgctctctcaccctcccttgtagcttagagcagagcataccaatctatgtgccagcataccctggtatgtctcagatgggtcatagatgtgataaggtatggatcccttaagcccttgggacattcaagtgaggctgagctgctgaagccctgggatggtatgactggccacaagcaacattacccaggtacccctctgtgtcacaaaaacgttatctttgtatttgtgtcatggtgtgaaaaaattgagaagcactgcctggggacatagtgaggtagcccaattctggataaaggaaattgagaagtcttgagggggtagagaggttttcttccctaataagaagaatcacaggagagaaaatgccttcctcagccatatgttgttatttctatatgtgagcctggaatttcaaggttatcttgcaaagaaccaaggcaatgtagagaaaagaattgatagcaagtggctggatctttcacattgtaaagccattgagccatccgtgcaattgcccaccttgggaatttatttttaagagtgataataaatgctcctcattgtttaaactactttgatttttgtatttggttattcataattaaaaacacccaaatacagtagaagaactggtacatccctgacacctaatgagtgctcaatatggttagttaatcaccaaattagatcctttgcctttagaaaagctgccatggtcaaatgtgtgttgatcttatttttcgtaaatatttaagaaatttgttcagtaactagcttaacttttaatatttatcttgagtctcttctaaatatgtttttactgtataataaaagcaataattgaaaaatgacatcattttaagcttgagagcaactagatacaaagatgttgatatgcattttctcttcttgaaggatctagacaaactggagcaccattacatgaaaaaggttaaagaatcaatgttttgcaaaatagaactggaattaattcatgggaattacagagaagatcatattagttcaatataaaaagagggcctagaatgtgccaagctccatacaatgcccctcatgagtgttatttaattctcacaacaactttgcaaaaaagaaactatttttttttccattttacaaaggaggaagctaaggctgtgaaaaagagctcttttgcaagcctaggacctgattccaaaattcccactctttctgttgcaaattctggctaagctttccagagatgacttgctttccccttgaggccctttcagtgcattgtgccatggaaaacaaaaagcccaacaatgacatctttaccaaagatgccttggggagatgggagaagagttacaatgcacattacacagcaaaatcttttttaagctccaagtaaaattggttttttcttagagttttgcttccagcagtcacttcctccattctcctgctctctccacgtgaggaaaacttctatcctgccttctcctaatacactttcctgttttttttttcctgcacatttcttaaaaatcccacataaggcaaaakccaagacaatatccatcaacacctccacccccaccgcatgtccatggagagcttcaagtcatcctgccgctggtacaaacacggcagaggcctctttgtaaagaagtggtaggtagaattcaggttagcaccagaatctgaaaactccagctcctttgactgggaccaggctggtaatataaatgttagatcaggctgggtctgacacaatggggatcagtagagcatacttgtcacatttgaaggcattcagaaaaataataaccttaaaaca

SEQ ID NO: 725230 - DNA, 1827 bp, Homo sapiens
atgctctctcaccctcccttgtagcttagagcagagcataccaatctatgtgccagcataccctggtatgtctcagatgggtcatagatgtgataaggtatggatcccttaagcccttgggacattcaagtgaggctgagctgctgaagccctgggatggtatgactggccacaagcaacattacccaggtacccctctgtgtcacaaaaacgttatctttgtatttgtgtcatggtgtgaaaaaattgagaagcactgcctggggacatagtgaggtagcccaattctggataaaggaaattgagaagtcttgagggggtagagaggttttcttccctaataagaagaatcacaggagagaaaatgccttcctcagccatatgttgttatttctatatgtgagcctggaatttcaaggttatcttgcaaagaaccaaggcaatgtagagaaaagaattgatagcaagtggctggatctttcacattgtaaagccattgagccatccgtgcaattgcccaccttgggaatttatttttaagagtgataataaatgctcctcattgtttaaactactttgatttttgtatttggttattcataattaaaaacacccaaatacagtagaagaactggtacatccctgacacctaatgagtgctcaatatggttagttaatcaccaaattagatcctttgcctttagaaaagctgccatggtcaaatgtgtgttgatcttatttttcgtaaatatttaagaaatttgttcagtaactagcttaacttttaatatttatcttgagtctcttctaaatatgtttttactgtataataaaagcaataattgaaaaatgacatcattttaagcttgagagcaactagatacaaagatgttgatatgcattttctcttcttgaaggatctagacaaactggagcaccattacatgaaaaaggttaaagaatcaatgttttgcaaaatagaactggaattaattcatgggaattacagagaagatcatattagttcaatataaaaagagggcctagaatgtgccaagctccatacaatgcccctcatgagtgttatttaattctcacaacaactttgcaaaaaagaaactatttttttttccattttacaaaggaggaagctaaggctgtgaaaaagagctcttttgcaagcctaggacctgattccaaaattcccactctttctgttgcaaattctggctaagctttccagagatgacttgctttccccttgaggccctttcagtgcattgtgccatggaaaacaaaaagcccaacaatgacatctttaccaaagatgccttggggagatgggagaagagttacaatgcacattacacagcaaaatcttttttaagctccaagtaaaattggttttttcttagagttttgcttccagcagtcacttcctccattctcctgctctctccacgtgaggaaaacttctatcctgccttctcctaatacactttcctgttttttttttcctgcacatttcttaaaaatcccacataaggcaaaagccaagacaatatccatcaacacctccacccccaccgcatgtccatggagagcttcaastcatcctgccgctggtacaaacacggcagaggcctctttgtaaagaagtggtaggtagaattcaggttagcaccagaatctgaaaactccagctcctttgactgggaccaggctggtaatataaatgttagatcaggctgggtctgacacaatggggatcagtagagcatacttgtcacatttgaaggcattcagaaaaataataaccttaaaaca

SEQ ID NO: 725231 - DNA, 1827 bp, Homo sapiens
atgctctctcaccctcccttgtagcttagagcagagcataccaatctatgtgccagcataccctggtatgtctcagatgggtcatagatgtgataaggtatggatcccttaagcccttgggacattcaagtgaggctgagctgctgaagccctgggatggtatgactggccacaagcaacattacccaggtacccctctgtgtcacaaaaacgttatctttgtatttgtgtcatggtgtgaaaaaattgagaagcactgcctggggacatagtgaggtagcccaattctggataaaggaaattgagaagtcttgagggggtagagaggttttcttccctaataagaagaatcacaggagagaaaatgccttcctcagccatatgttgttatttctatatgtgagcctggaatttcaaggttatcttgcaaagaaccaaggcaatgtagagaaaagaattgatagcaagtggctggatctttcacattgtaaagccattgagccatccgtgcaattgcccaccttgggaatttatttttaagagtgataataaatgctcctcattgtttaaactactttgatttttgtatttggttattcataattaaaaacacccaaatacagtagaagaactggtacatccctgacacctaatgagtgctcaatatggttagttaatcaccaaattagatcctttgcctttagaaaagctgccatggtcaaatgtgtgttgatcttatttttcgtaaatatttaagaaatttgttcagtaactagcttaacttttaatatttatcttgagtctcttctaaatatgtttttactgtataataaaagcaataattgaaaaatgacatcattttaagcttgagagcaactagatacaaagatgttgatatgcattttctcttcttgaaggatctagacaaactggagcaccattacatgaaaaaggttaaagaatcaatgttttgcaaaatagaactggaattaattcatgggaattacagagaagatcatattagttcaatataaaaagagggcctagaatgtgccaagctccatacaatgcccctcatgagtgttatttaattctcacaacaactttgcaaaaaagaaactatttttttttccattttacaaaggaggaagctaaggctgtgaaaaagagctcttttgcaagcctaggacctgattccaaaattcccactctttctgttgcaaattctggctaagctttccagagatgacttgctttccccttgaggccctttcagtgcattgtgccatggaaaacaaaaagcccaacaatgacatctttaccaaagatgccttggggagatgggagaagagttacaatgcacattacacagcaaaatcttttttaagctccaagtaaaattggttttttcttagagttttgcttccagcagtcacttcctccattctcctgctctctccacgtgaggaaaacttctatcctgccttctcctaatacactttcctgttttttttttcctgcacatttcttaaaaatcccacataaggcaaaagccaagacaatatccatcaacacctccacccccaccgcatgtccatggagagcttcaagtcatcctgccgctggtacaaacacggcagaggcctctttgtaaagaagtggtaggtagaattcaggttagcaccagaatctgaaaactccagctcctttgactgggrccaggctggtaatataaatgttagatcaggctgggtctgacacaatggggatcagtagagcatacttgtcacatttgaaggcattcagaaaaataataaccttaaaaca

SEQ ID NO: 725232 - DNA, 979 bp, Homo sapiens
tgcttcctgtagcctgggggtagtgactccataattacaagcacataaaagtcatgaaggatcatcagaatggcacaggtgatatcccttggtgactagtctaggggatgtgatgggatacaagttcactgattcctgtcttaatttaaaaattattttttctagacaactgaaaaaactttttttttttttcctgagacaaggtctcgacccaggctggagtgcaatgacataatcttggctcactgcaacctctgcctctcaggttcaaacaatcctcccatctcagcctcccaagtagctgggatacaggcacgtgccaccaygtccggctaatttttgtattttctgtagagatggagttttgccatgttgcccaggctggtctcaaactcctggcctgaaggaatctgcctgcctcggcctcccaaagtgctgggtaaaaaaactttaaacaccgatacatatactaaatttgaaaaacaggaaaatatacagagaaaaaaaattaacaggaaattaagagtatattgaaaagcattaaatgaaactttgaattctttcctgaaatgtaaaatgttattaataactgataattattcttactttgattttctttcatcatgtccatctcttggattcctatcttctcggatctcttctcgcttttctctgcggtcatctcgtcctttgtctttgtcttcccaatccctttggcgttctcgttctttatccctttctctcgctctttctcgttcccgttctcgctctcgctctctctcccgttctcgctctctctccctctctctctcttctctttctcgttcccgttctttttccctgtctcgttccctctctctttcccgctctcgatcgtggtctcggtctctatccctttcacgatctctctctttttctctttctctctcccgttccctagcacgctctctttctagttctctctctttttctctttccc

SEQ ID NO: 725233 - DNA, 751 bp, Homo sapiens
atactatgaaagacacttccacacaaggatattaagtgctcaaatttctttctgagcattactaatcataaaatttggctgcttaaaacaccaaattaatttctctttgtagttttcttcttaaagaactctagtatatataactgcccctaaattctacatatttaggcatgaagtcatactgtaaatattactgacaaaatttggatttgattgctggtaagacaacagaggctgacgaaaataatttgtaagttatatgagaataaaacctgccatgaaaaaaatggtgaagagtcaagaaaacagaaatgggcctctacttgaacagaagacaaaaggaagaaatataatttacttttactcttaaaacatattatgtggaacatcaatgaagaactatcctacatcccaaacaatttttgaatgttctgtggattaaacccactgtaaatatacattactgaataactataccaaaaatatttaataggaggttatctccaaattattaaataacatattctgtgctttctgtccacttaaaagtatgtaaaatccaattgyaagtctagttaaaaagggtgtcagagcagtagtgctggtgctgcaaaatcaatctataaatttgtaacattttttatcagatttagagccagaaatgttgtatcaataaatgtcattaataatgatgtctgtaaatatttcatatttaccctaaatattaaaattataatttttgaattgtcca

SEQ ID NO: 725234 - DNA, 611 bp, Homo sapiens
ttaaccaaggatgcaccagaaagacagagtacatttattaaaattctcacccaggcacccatctcgacataatgtctaagatgtagaaaattgacaagaattacagaatattaatggcagtggcggcccatctagagcggctgctgccatgcgggaggcacggctggggctgtgtgctccacggagccagcagaagccaggaggaggtaaaagtcccgcccccttctgtgatggcagggcggcagcctcatgctccccaggcgcagctgcagctgcccgctgcagctacagacctggacatccctgtgctcttgggggccaggagcaggcaggagccctgccctcctgggcgcagctgcagctgcccagctggggttgcagacccaggcatttctgcactctcagtgttctgagaaggaccctcattcccctacaggctcgsaagtgcctgctcccactgtctggtctctccgagttcctggtgctcactccaatcttggagcaaaattgaggctgagcctaggtgttgtcacaacctggctggctgtgtgcatgatcagagcggtactgacatgctagccccctgctgcctcagccccctctggactttg

SEQ ID NO: 725235 - DNA, 1450 bp, Homo sapiens
gatacaagtcttgaggtaggtaactgagatactttgattgatttgtttatttcagattattaaaatctgaaaagggaggcaggcagcgggaagcagagaatcaagactttcttatgatcaagactttcccagactctcattgctgtttattaattttcttgtccttcttaaatgtatgttttattttctttttaaaaatattgattaaagttatgcactatcattaaattaataaatagtaccaaagggcttagagttaaatataagaatttttttgccattctccatcctgtcttgatccccagaggtaacaattttaagaactgtattagtttctttaggtactcatgtatgtgtttataaatagtaacttatattattgatcctggaattctcattgttatgattttgggtcaagatagtattccacaaatttttttaaatatgttagcttgtgaaaaaaaatagagaaaaatgtaaaattatgagaccccagaaatacacaatgctgagaacccagaaatgtgtgattctagtataactatttatttatcaaattaatatttattaaaatccaattatgcgcaagctatatcttagcattttatatacaagtggatataattagaattttaaaatatcagtattattcttcactgagaaaatacatgaatattgtatagagattatatcatttaaaatataatgcaacaatgtaacaacataacaaagcaataactaatgaaaatcaactttgttatcatagaaatagaaaaacaaagttcttaattgtttttaaattccaatttctaaactataaccgtgacgtaaatctattttcaattataaataggtgtagcaatcacaacagaatgagtaagcatatcttgcaattcttttcttttgaaaaatactgattaaagttctgaactattcttaaaaataatatatagtaccaaaaaagaaccacggtgcttttttattattaaaaagtaatgtgtaatctttactaaaaagtatacaattaagaaagagaataactaaaaatctgccgraatggagaagtctttttaacaatgcaattaacaaaacgtgaagaatattatttttctatattaactagtattataatatttaaagaaaatgaaaaaaatcaactacattttatagactatttcctctttctaggtattataagtaaaatgatgcatttaattaatcgtagaaattgtaagaatgccaataacttcatgcagaatatattttatgcacttatggtctttcgtcccttacatactaaacattttgcacacattatttcattgatccttgtttttaaattaaattttaataagccttaaactctcacaaaaacattttctatgttatttcctacttaatacatagattttatttcttattcatagtagttgttcagatatcctttgca

SEQ ID NO: 725236 - DNA, 1450 bp, Homo sapiens
gatacaagtcttgaggtaggtaactgagatactttgattgatttgtttatttcagattattaaaatctgaaaagggaggcaggcagcgggaagcagagaatcaagactttcttatgatcaagactttcccagactctcattgctgtttattaattttcttgtccttcttaaatgtatgttttattttctttttaaaaatattgattaaagttatgcactatcattaaattaataaatagtaccaaagggcttagagttaaatataagaatttttttgccattctccatcctgtcttgatccccagaggtaacaattttaagaactgtattagtttctttaggtactcatgtatgtgtttataaatagtaacttatattattgatcctggaattctcattgttatgattttgggtcaagatagtattccacaaatttttttaaatatgttagcttgtgaaaaaaaatagagaaaaatgtaaaattatgagaccccagaaatacacaatgctgagaacccagaaatgtgtgattctagtataactatttatttatcaaattaatatttattaaaatccaattatgcgcaagctatatcttagcattttatatacaagtggatataattagaattttaaaatatcagtattattcttcactgagaaaatacatgaatattgtatagagattatatcatttaaaatataatgcaacaatgtaacaacataacaaagcaataactaatgaaaatcaactttgttatcatagaaatagaaaaacaaagttcttaattgtttttaaattccaatttctaaactataaccgtgacgtaaatctattttcaattataaataggtgtagcaatcacaacagaatgagtaagcatatcttgcaattcttttcttttgaaaaatactgattaaagttctgaactattcttaaaaataatatatagtaccaaaaaagaaccacggtgcttttttattattaaaaagtaatgtgtaatctttactaaaaagtatacaattaagaaagagaataactaaaaatctgccgaaatggagaagtctttttaacaatgcaattaacaaaacgtgaagaatattatttttctatattaactagtattataatatttaaagaaaatgaaaaaaatcaactacattttatagactatttcctctttctaggtattataagtaaaatgatgcatttaattaatcgtagaaattgtaagaatgccaataacttcatgcagaatatattttatgcacttatggtctttcgtcccttacatactaaacattttgcayacattatttcattgatccttgtttttaaattaaattttaataagccttaaactctcacaaaaacattttctatgttatttcctacttaatacatagattttatttcttattcatagtagttgttcagatatcctttgca

SEQ ID NO: 725237 - DNA, 1450 bp, Homo sapiens
gatacaagtcttgaggtaggtaactgagatactttgattgatttgtttatttcagattattaaaatctgaaaagggaggcaggcagcgggaagcagagaatcaagactttcttatgatcaagactttcccagactctcattgctgtttattaattttcttgtccttcttaaatgtatgttttattttctttttaaaaatattgattaaagttatgcactatcattaaattaataaatagtaccaaagggcttagagttaaatataagaatttttttgccattctccatcctgtcttgatccccagaggtaacaattttaagaactgtattagtttctttaggtactcatgtatgtgtttataaatagtaacttatattattgatcctggaattctcattgttatgattttgggtcaagatagtattccacaaatttttttaaatatgttagcttgtgaaaaaaaatagagaaaaatgtaaaattatgagaccccagaaatacacaatgctgagaacccagaaatgtgtgattctagtataactatttatttatcaaattaatatttattaaaatccaattatgcgcaagctatatcttagcattttatatacaagtggatataattagaattttaaaatatcagtattattcttcactgagaaaatacatgaatattgtatagagattatatcatttaaaatataatgcaacaatgtaacaacataacaaagcaataactaatgaaaatcaactttgttatcatagaaatagaaaaacaaagttcttaattgtttttaaattccaatttctaaactataaccgtgacgtaaatctattttcaattataaataggtgtagcaatcacaacagaatgagtaagcatatcttgcaattcttttcttttgaaaaatactgattaaagttctgaactattcttaaaaataatatatagtaccaaaaaagaaccacggtgcttttttattattaaaaagtaatgtgtaatctttactaaaaagtatacaattaagaaagagaataactaaaaatctgccgaaatggagaagtctttttaacaatgcaattaacaaaacgtgaagaatattatttttctatattaactagtattataatatttaaagaaaatgaaaaaaatcaactacattttatagactatttcctctttctaggtattataagtaaaatgatgcatttaattaatcgtagaaattgtaagaatgccaataacttcatgcagaatatattttatgcacttatggtctttcgtcccttacatactaaacattttgcacrcattatttcattgatccttgtttttaaattaaattttaataagccttaaactctcacaaaaacattttctatgttatttcctacttaatacatagattttatttcttattcatagtagttgttcagatatcctttgca

SEQ ID NO: 725238 - DNA, 1356 bp, Homo sapiens
ggcaaattaaacattggcttggtatcaagacttgagccttttgtcttgacctaactttataatttagtaacttaggtggaaaggagtagagggattcttttgtccaagcatggattcgtctacaaatataggccttcccataagtaacattgagttctgttgatttacatgtattcagatttttgttgttgttgttcttgctaataaaattgaggaacagtcttcagttagtccttagattttgatcaagatctgaattttagagtacaaaaaccaaaacacatgacaactgtttgatctaatatatcaggaattttgtgagaaatatctgtattttttttatttacatgatgtgagatatttcagcttccacttcacaaccatacattgcataamcatcacctatttaaagtggaactttagttcctgagctgaatatgtatctccatatatatacttacttgattaaagtctacactcacagtagagtgttatgtgcggtaacttctcaagttaagtaggagctaagtcgggagatagctttgactcttcctaattgtcctttgaaaatctcactagtgatcagttttatttcacaagacacaggatttcttcatcatccactgcgactaccaagagagcctcatcagatgtaactgacatatgcctatattttaactaactgtgtttgtggaattaaaaataaatttcccagggcccatgcttctgacatttttcatacaatttctcagtgttcccagtgtatctgtttctctttatgccttgagtagatcttgtaataaaagtttgaacatcataaatataatgttttactgaaaagagtaagtattttgaaagaaacttagaatgcttttttttatttaggataattgtctacatatttagaactttaaaaaaagtaaatttttaaaatatccatgtacaatatttttaagataatagctcctactgcttaatgttggtaaacatacaagcctgtcattgacatactgttttgcatgaactattttctttcttttctcccaacattttataatttttttttttcctgagatacaggatcgatgaagaaatggtacaatacgcgttgagaaagtctctacccagattcaatttcaatattttctaacattttaccttgtcccctgccacgtcccccattcctgtctgtttctctgctttttagagcacccctggagcttgtctgagctgggacaattggcacttgctaggatagaagggatgggatgtgaacaggcggctgaatacccaagcttccctatgccttcaggggaaattcaacttggtttctcaaagctttcccagtaggactgt

SEQ ID NO: 725239 - DNA, 1091 bp, Homo sapiens
cttgagtctttcctcctcccacccaccctattaggtcgggcccttatyttttgcctgggtctcctggctttctctgtggcctgcccaaatttatccttcacagatatcacagtggtctttgtcaaaggcaaacttagtcacatcagttttctgcttaaaattattcagtagtatctgctacccgtgtgtgtttcaaaacagcggtcctgtgccctcacttaggacatcagatccttcatgatctgactccttcctgcctcactggttttgttttcttcactctctcacatgcacctttcactgcagcccagctcagccagttgaacttccacacccacacatcttacagtcgattgttccctaatttatttttccatttctgcacttgttttctgaagaaaacaagttccttcagaactcagctcaagcttttccctccctttatttagcttagctgtgctttctccatgccccaaaatcaccctatgccaatttgtacctagcactctccatactgggctatacttactggtttgcttgtctcactaaattgactacaaatacttaacagagggcgtctctttttttgtttgccagatgcctaacaccatgcactgtataaacacataagcagaatatttagccagcaggatattaatgcacaatataaatgatccaaaactataaaatgtacagagaagaatgaagtttggttttgtctgagcattttccatatacatatgtatttgatttaaaaaatttcttcataccattcaatcaagtgaaactataggtaaagatatatttaaagcatgagtcttcttttctcctcttgtaatgattttccaaagaataaaatacacttccactctgccacagaggacaacaaccctcttctgacactgataaatacaaggaaaattatttctcttaactgaaatgttcacatcctaaaagctctaaaaccaaaagattttcagaaactcacttggcagcaaaacctgacctgacctgaaccaaactgatgacaaaacctgacctaagagctatataaagtctttatttatcacaccatcagggctacaattcaa

SEQ ID NO: 725240 - DNA, 2959 bp, Homo sapiens
acctttaaacaaaactaattatacatccatttaaagatgaaaaatcatgcagtccttcacaataaaaagtgcatttctgatccaagagaaaacaactgcagtaatgaaaatccctaaacttactggagagtgtttctttccgagaattggttccaacttcatagaagtaagaggtgctgaggtcagagtgagcagaccgtgtgattcaaaagcgtgtatccaagcagcaaatgtactagaattgggaagtattcagcaaggaggtgtctccaggcaggtagggctccattccccaatcaggctaaatactggctttcagaaatccacttgacaactctgattgagatgagattgcagtctgtaaaaggtcaagaaaacttttatactctagctaccatgatcacaaaagtgccaaaaagcagggacaaagaatagggagtttgcagaaaagaagaaaatgtaatagccctgtctcctcccaagcatggtgaaaggtaaaatgtggctgagaaaaaaaatatttgtgtcaggcctagattctcagtctgaattgaaaacaatagcaatgagattgtcctrtacaaaggcaacgcgtcagaggcaccctgcataggctgttgtatcttgttttgtaattccaagtaaaagctctgtttgggcatatttgctgtaggattagaatcacagaatgtttgagttaggtaggatcttggaaaccacctaggacacctcccattcctcccaatcccaacacctcctgtcagttttacacacagggaagctaaatccaaaagcgatgggacttgctctctggcttagctctgcatttgagctaaagtatgcctccagcctgcaagctcagctcccatggagacaggatagtatgaatataaaacgccccagatgtgcagccagaaagagctggtggctcattctgactctgccactcattagctgcatgaataaatcattgagcctcagttacctcgcatgtaaaatggaaatgacatatgccacatagggagttatatttagtaaaatgttattataaaattattattgtaaaatgcttagtatattgcttagcacatagtaaatgattattattcctcattctttagcaacataaatgtataatgactcaccttgccagctcagttgggtccccttcataccttagcagaactttcattagtccttagagggtcacttaaccctctttctcattccccatcaaatcacttcaaattctcatttatcatatcaatccctctatgttcttgccaactcactccttttcatttttccttctaccgtgcaaaaaacttgccatacatcctatcaacccatctttttattttcttttgttttaccttctaaacatacctggccttgtccttttgctaaagagactggtccatccttttccatgctattcagaaccacattccatttttttcagccctctctattttcatatctcactgttcccttcttcctttcttccttcctatccatcagcctataaacttaaacttcattacaagaaaagttacaataattatattagttccctcaatttccatgaaaatatagctcttttccccttgttctcattttgtgttctggtttgttttttttactgtcaattgtctcctaagtacaagctgcagttggtcattgtcttctagtctgctttatcatctgccttcacactgtaaaggtgaaggtcctaagaacaccatagacctccttatgtccagactcaaaggcctcaatgaactcttcaccctcctggatctcatggcagcaacaacactgctggccacctgcccctccctaatgctctccacccctttacctgccagagcacctggctgccctcctgcctctctgatcccactttttcttgttgtagtggtggttgtttctgttaactccataactgttggataagctcagagttccatctttggtcatcttctccctatatttacctgccttgatgatctcattattgccctcttccattgctccttacctgaattccagctctactcagtatctctaaagcactccagacttaatatatgcataaaaacacatttctgctctcattccaattctacaagtttcagttaatggagcctactaaccctgttagccaaagagcctgccttccctcttccttacagcccacctcatcttccatatctaaccagtcatcacatcctgctattcatccttagaaatgtccccctccagcccaggctagcatctccatgcccatggccttggctttagtgggaacctcatcatttcagagctagaatattacaaatagtctccaatgtggtttcaaccgatcctagccttcccacttcagtacaacctctatacattaaccagaggtggaaatagattggagcatgaatctgttccacccctgggctgcaacataaaaccaccttccgtaaactgacataaaagtcttttcagacatgtaattacctccacaccagggactctagtcacatgtagtatctcaccattcctaagcacattgccctttcacaaatcttgatcctacacattcaagtctcattgccaggaatatcattcccctctatctcttcctgttaccaccttcagcacccaattcaaatgtcacccatctctgtgggtatccctagacaaccccaggcaaaacgtggccatggtactttgttcacacctatatcaagctcttaccctgtggaattgtaataaaacactttaatgtgtctgtcttgacagtggcattgtcagtctttcacagccggaattacactttttcaccttttatttcagcacctattagaaagccttgacatattaggtgatcaaatacacatttgtggaataaatgaatgactatatagtggaatgtagccaattgagactgatgcttttattgccc

SEQ ID NO: 725241 - DNA, 3512 bp, Homo sapiens
acagggcaagtggaagacctgacctctcggcacttggctggtggtcttgatcttaacctttctctctcctcttctgtgaaatttaataatcactgtcattaccaaacaagctacaagttatgctgggaggctcaaatgaaaaaagaaatgggaaagcactggaaaactgtaaagcaccatgcaggtataagatgttgactacaccatcacaccatgacaggagagatttttacacttatcacctctggattcttttagacagcatctcttagatgccattctggcaactgaaatatcttaaaacacaaaaagtttattagcttgagccataagaaattgttgatttataggtctaaaatgaataacagaaaacttttaaaaaacttgtatttttatatagaagtttatttaaaagaatactaaactataatacctcgggtttgggcagcttcctttaaagcagccacaaggtgaggtttcaagttatccaaaataaatcttccttcaagacttgggaaaagggacctgaaaagggaaaggaacagcaatcatcataatcttcccacaattccaagattttaaaaaaacaatcacatattttcaagtcagttaagccgactattttattttacataaattataatgcacacatcaaatcaaattacaatatttttgatcaaatattatctagactttgctttaaaacgtgaaggcatcatgtactttactcaaattcagaaatattctcaacatcttacagtaaaattaattttatttcctgaaatgtcagtacactctcgtttataaagaattacttaatatactatttttcatgaatttaaatattatcaaaataattcattagtgactaatctggccttgttattatttgcactttataaacattgttttcagtgttctgctattgaaatttccaagaaaaacagctgcttagataacttttcaactgataaacatttgaatactttttcattttagaatataaaatgtatcctttggtattttaacaatgtatttctgcaaaagtcttcctaactataaaatcgacatagaaaaccattgaatttcacaacaaaggactctcacagtgagcaggagcaggggaaccctaagagtgaacaggaatgttagaagggggacccctaccttggatattctgctgaggtaatataaatgacatcttggtctgatacagatgaggagaaggggacaaaattgccattttgtaaagggagcagctccagcccaagcagctcactgtaggcttggtcagaaagcacaaattctagaaggtgaagcttttcttcagcacagcccaggtgtgcacacttccgcagcacctgccgcacccacgcgggcgtcaccttcctcacaggtgttgtgccagaggcagctgtgagctgaacagcagcatccacattccctggtaccttggcaatctgcttccctgagctctggaggtagttgagcacagtttttgtgtattctaaattttcatcaagttctgagaagtacacctgctccaacctgacccagtcacagctaattgaataaatcactgcattctgcaacagctcgctgaatagaggctctaacaccggttgccagtgcaccttgactttgctcgcctccggccaaagcttatagataacatcaactgacaaggggaaatcagagctcttttccatctccagacgttttattgaatctaagatcagagtagcataagctttggggacaacattcatgacaagaaactcattccataaggctgccgggtctctccactggtccagctctctccattttatgctcctgcggttatcagtaaggccaaagaacccactgatgtgaactgggaggcctgtgctgctttcctcaccaggtggtaaaggaaggaaacaaaatgcttttcctgagaaatcagacgttgctccttttgcttcatcatctctgcttgataaaggcatggctattccaatgattgggacaaatttcagttcatcagctaaagagtcaagcttactactgatccctcgcccacccacactgttacacaccaaccaagatgttttctgtgcatccttagtactctcctcttctaaaacaatatttacgtgatatgttacacaggtgatgttattgcttggagtctttttacaatagttacttatagcagttcccagaatctttatagaattcggccgctcatgtttcagtgccttactctcactcgaagtcactctaaacaccagtttctctgttccgtcagcctctcggacatataaggaaacatcctgcacacttttcagaaagagcagcactgtgtctgcatctgccctaaaagactcaaacaactcaagaaccttctgcttattgtagaggttactactaagttgtgaaggttgtaggcgaagagggaaacggaaaaatgttcctggaaaattgccgtttataaatgtttccttggtgcttccaaaaatgccaacaaatggtgcaaactggtctgaaagttcactaatttctttgctgtcatctttgagwttccaacattggcctgattcatgtgggccaaaaagtgtttgatgaggatctagcatcccgatttggtcaccactaaagatacaaggaacatctgtaaagaaaaatttaagtcatgatcaactctgaaattttagggacaattatgattacaattataataaatatatgaaaaagcatgagccattaaatgactaaaacagatttatctaaacacaaacttaatttaccttcagaaatgtaattctctgaacatgaaaaatgatttctcttttgattcaatccaataacaaatgccaggcatagagactttgcatgattactgtgaaaacctaggagacatcttcaaaaactcactacacaaaagatgggcagagtatttggatatatacacttaacccccaccaccatgtgagcccaattcgacagaacaggactgcatcctatgctcaactttacaaattcagcatagactctgtaagaagagacagagagcagtacaatgcaggtgactctgcccactgtgttgctcagtgagtgcctgccctgaagctcatgaggtacattccctcaaggggtcttaacctctctgcctctggagcggaagcacttctcttgctgggagcatctcaccacgtggagcctaattacagtattgaaagatacccatcttttgtataacatggcctctaaattgataccagctgcttcacctgttcctcaaccaaggacagagtagtattcaaaaactggcagaaaaaccagatgtgtgagacccactgtgatgagagaaattcctccccagtgtgctttggtgaagatctcccaagggtgatgtgatgtatgcttgcctcacatgcttacttagcacctgggtttcctgcaagatgcaactccagtgaagtcaatctttaatacctacggtcgtcaagcacagcttcagctgtcac

SEQ ID NO: 725242 - DNA, 3512 bp, Homo sapiens
acagggcaagtggaagacctgacctctcggcacttggctggtggtcttgatcttaacctttctctctcctcttctgtgaaatttaataatcactgtcattaccaaacaagctacaagttatgctgggaggctcaaatgaaaaaagaaatgggaaagcactggaaaactgtaaagcaccatgcaggtataagatgttgactacaccatcacaccatgacaggagagatttttacacttatcacctctggattcttttagacagcatctcttagatgccattctggcaactgaaatatcttaaaacacaaaaagtttattagcttgagccataagaaattgttgatttataggtctaaaatgaataacagaaaacttttaaaaaacttgtatttttatatagaagtttatttaaaagaatactaaactataatacctcgggtttgggcagcttcctttaaagcagccacaaggtgaggtttcaagttatccaaaataaatcttccttcaagacttgggaaaagggacctgaaaagggaaaggaacagcaatcatcataatcttcccacaattccaagattttaaaaaaacaatcacatattttcaagtcagttaagccgactattttattttacataaattataatgcacacatcaaatcaaattacaatatttttgatcaaatattatctagactttgctttaaaacgtgaaggcatcatgtactttactcaaattcagaaatattctcaacatcttacagtaaaattaattttatttcctgaaatgtcagtacactctcgtttataaagaattacttaatatactatttttcatgaatttaaatattatcaaaataattcattagtgactaatctggccttgttattatttgcactttataaacattgttttcagtgttctgctattgaaatttccaagaaaaacagctgcttagataacttttcaactgataaacatttgaatactttttcattttagaatataaaatgtatcctttggtattttaacaatgtatttctgcaaaagtcttcctaactataaaatcgacatagaaaaccattgaatttcacaacaaaggactctcacagtgagcaggagcaggggaaccctaagagtgaacaggaatgttagaagggggacccctaccttggatattctgctgaggtaatataaatgacatcttggtctgatacagatgaggagaaggggacaaaattgccattttgtaaagggagcagctccagcccaagcagctcactgtaggcttggtcagaaagcacaaattctagaaggtgaagcttttcttcagcacagcccaggtgtgcacacttccgcagcacctgccgcacccacgcgggcgtcaccttcctcacaggtgttgtgccagaggcagctgtgagctgaacagcagcatccacattccctggtaccttggcaatctgcttccctgagctctggaggtagttgagcacagtttttgtgtattctaaattttcatcaagttctgagaagtacacctgctccaacctgacccagtcacagctaattgaataaatcactgcattctgcaacagctcgctgaatagaggctctaacaccggttgccagtgcaccttgactttgctcgcctccggccaaagcttatagataacatcaactgacaaggggaaatcagagctcttttccatctccagacgttttattgaatctaagatcagagtagcataagctttggggacaacattcatgacaagaaactcattccataaggctgccgggtctctccactggtccagctctctccattttatgctcctgcggttatcagtaaggccaaagaacccactgatgtgaactgggaggcctgtgctgctttcctcaccaggtggtaaaggaaggaaacaaaatgcttttcctgagaaatcagacgttgctccttttgcttcatcatctctgcttgataaaggcatggctattccaatgattgggacaaatttcagttcatcagctaaagagtcaagcttactactgatccctcgcccacccacactgttacacaccaaccaagatgttttctgtgcatccttagtactctcctcttctaaaacaatatttacgtgatatgttacacaggtgatgttattgcttggagtctttttacaatagttacttatagcagttcccagaatctttatagaattcggccgctcatgtttcagtgccttactctcactcgaagtcactctaaacaccagtttctctgttccgtcagcctctcggacatataaggaaacatcctgcacacttttcagaaagagcagcactgtgtctgcatctgccctaaaagactcaaacaactcaagaaccttctgcttattgtagaggttactactaagttgtgaaggttgtaggcgaagagggaaacggaaaaatgttcctggaaaattgccgtttataaatgtttccttggtgcttccaaaaatgccaacaaatggtgcaaactggtctgaaagttcactaatttctttgctgtcatctttgagattccaacattggcctgattcatgtgggccaaaaagtgtttgatgaggatctagcatcccgatttggtcaccactaaagatacaaggaacatctgtaaagaaaaatttaagtcatgatcaactctgaaattttagggacaattatgattacaattataataaatatatgaaaaagcatgagccattaaatractaaaacagatttatctaaacacaaacttaatttaccttcagaaatgtaattctctgaacatgaaaaatgatttctcttttgattcaatccaataacaaatgccaggcatagagactttgcatgattactgtgaaaacctaggagacatcttcaaaaactcactacacaaaagatgggcagagtatttggatatatacacttaacccccaccaccatgtgagcccaattcgacagaacaggactgcatcctatgctcaactttacaaattcagcatagactctgtaagaagagacagagagcagtacaatgcaggtgactctgcccactgtgttgctcagtgagtgcctgccctgaagctcatgaggtacattccctcaaggggtcttaacctctctgcctctggagcggaagcacttctcttgctgggagcatctcaccacgtggagcctaattacagtattgaaagatacccatcttttgtataacatggcctctaaattgataccagctgcttcacctgttcctcaaccaaggacagagtagtattcaaaaactggcagaaaaaccagatgtgtgagacccactgtgatgagagaaattcctccccagtgtgctttggtgaagatctcccaagggtgatgtgatgtatgcttgcctcacatgcttacttagcacctgggtttcctgcaagatgcaactccagtgaagtcaatctttaatacctacggtcgtcaagcacagcttcagctgtcac

SEQ ID NO: 725243 - DNA, 624 bp, Homo sapiens
acttttttttctgacattttgtatttttttcctttttcttggaattgctagaattaaggaaaataagccacaccataagttgtcagttaccagaaggaataaattgttttcattgttcaagttaagaagacttaagatattaacttgtgacaaataaaatatacatacttggaactaaggatgtgattatgcgaacagtgttagatcacttcagtgatcacttgtatttatagacattgatttttatcaatgagctgtataaaaccatgaaaacaacaggaatttaaaaattcctatgagactactttcagaccactacacaaatacagttaaaaacttagattaagtgaataatttcctagggaaatacagttggccaaaatcaactcccattaaagttagaaagcttaaacacaattttccataaaagaagaaatacactattaatattaaaacactgtctttaaaaatttcatcaggcccatatggttccagagaaaattctatcaaacctttagagaccaraacatcccaatactccacaaattattccagaacattgaaaatgaggaaaaacttcctaattattgaaccaagagtaacagggttacttaaactttataa

SEQ ID NO: 725244 - DNA, 624 bp, Homo sapiens
acttttttttctgacattttgtatttttttcctttttcttggaattgctagaattaaggaaaataagccacaccataagttgtcagttaccagaaggaataaattgttttcattgttcaagttaagaagacttaagatattaacttgtgacaaataaaatatacatacttggaactaaggatgtgattatgcgaacagtgttagatcacttcagtgatcacttgtatttatagacattgatttttatcaatgagctgtataaaaccatgaaaacaacaggaatttaaaaattcctatgagactactttcagaccactacacaaatacagttaaaaacttagattaagtgaataatttcctagggaaatacagttggccaaaatcaactcccattaaagttagaaagcttaaacacaattttccataaaagaagaaatacactattaatattaaaacactgtctttaaaaatttcatcaggcccatatggttccagagaaaattctatcaaacctttagagaccagwacatcccaatactccacaaattattccagaacattgaaaatgaggaaaaacttcctaattattgaaccaagagtaacagggttacttaaactttataa

SEQ ID NO: 725245 - DNA, 410 bp, Homo sapiens
cactcactgcccctagccccgaagtcctgctttcmattctaggttcctgccacatgcaattgcctcacaaacctttacgtataacacttcctctttttaaaaaggcatctcccacatctttgccacttcccaatttacccttcctctctcacaattcaacttaaatgtcatccccatactgaaccttttcttgagactagactgtcttcttctgttcttatactcttatacataattctcttctgtgatacttatcacatttaattgtataattaaatgtgcaattaattatttagtctctgtttcctaaattaccacatgagcccttaagggcaagaacacatctgtttactaccatatccctggcaccagacactaaacattggttgaaacaatctcttttttcttca

SEQ ID NO: 725246 - DNA, 926 bp, Homo sapiens
tcccataatccccacatgttgtgggagagacctggtgggaggtaattgatttatggggacagttaccttcatgctgttcttatgatagtgagtgagctctcacgagatctgatggttttataagaggcttttttccctttgcttggtgctttctccttgctgccatgtgagraaagacttgttttcttccgcttctgccatgattgcaagtttcctgaggtctcctgagccctgtggaactgtgagtcaattaaacctcttttctttataaattacccagtctcaggtatgtctttattagcagcgagagaatggactaatacaggtggtcaagcaaagaatctttgtcagtgattacatggatgttttcttataattaaattgcagatatatgtttaaattgcagatatatgttttatattcttctgtatgtctatttcaaaattcaaaataatttagaaaaaattatttgactggaagatgaatggaagagagaatattaggtaaaggaatttgtagaatatgatatatggttcagtgttcagatttttagttctttttaaattcttttaactgcatttcaaagtgattttcattcattcatttactcattgtgttaatgccatttttgtgttgctataaagaaatacctgaggctgggtaatttctaaagaaaagagatttattttggttcatcgttctgcaggctgtataggaagtgtggtgccagcatctgcttctggagagggcttcaggaagcttccaatcatggtggaaggcaaagtggagccagggtatcaggtggcaagagagggagcaacacagagagagggggaggtgccacaccttttaaaaccaccagatcatgtgaactcacagggagaactcacttgtcactgcaaggatggtgccaggccattcatgag

SEQ ID NO: 725247 - DNA, 584 bp, Homo sapiens
gcaacctccacctcctgggttcaggccgttctcctgcctcagcctcgcaagtagctgtgattacaggtgcgcgccatcatgcccagctaatttttttgtgttttttagtagagacagggtttcaccctgtgtgccaggctggtctcgaactctgacctcatgatccacccgcctcggcctcctacagtgctgggattacaggtgtgagccactgcacccggcccttactgtctggctaatttttaaattttcagtcgagatggggtttcaccatattggccaggctagtcttgaactcctgacctcaaatgatccacccgcctcagcctcccaaagtgctgggattacaggcatgagccaccacaccaggcctaaaaactgaaggtttgaatasagaaaaagcatgctttaaaagtaaagaaaatggaattttgcctagcatatgtggagtcctaatatgcagctctgtttccttaaattccatgaaagccatgcagtacctttgctagtttctcctcacagatcaggataacctagggggctcttgtgtgaatcgtcttctatttcttgcagcctaactcata

SEQ ID NO: 725248 - DNA, 592 bp, Homo sapiens
tctttgaagaggtgaccagagcagagacttgaatgcagagagggaacaaagcatgcaaagcattcttcctacacagagtgaaagatagtgaggggagctttcctagcaaaaggagcagtatgtctaaaagtgctgacacaagaggatgtgtggatgctttctgaagagaaaaatctcagtatggctggagggaaataaacaagggatgaagtggaagggaagccatggaatcttgtaggaatttatgttcagttttattgtaagggtggtggaactccaccagaagggttggggcaggagtgtgatgtttgtatttacatttaaagaataattctcttgctctgtggggaatagacagaaaaggagcaagagggggatcagggagatgagttaggaggagttaggaggtaactttatggagctcagtgttgtacagagctcagagggtaacgatagagattgtagaagtggctggatttatgataattttgggaaggtatttttggcaagatgcataagggaggttaagaaggaaagctaaaataattccaragttttgtatgctatttgaataaatgactggattatttta

SEQ ID NO: 725249 - DNA, 583 bp, Homo sapiens
tggtggtgataaaatcccttagcatttgcttgtctgggaaggattttatatctccttcacttatgaagcttaatgtggctgaatatgaaattctgggttgcaaattattttctttaagaatgttgaatgttggctcccactgtcttctggtttatagggtttctgctgagaggtctgctgttagtgtggtgggcttccctttgtaggtgatctgacctttctgtctggctgcccttaacatttttaccttcatttgaccttggagaatctgatgattatgtgtcttggggttttgtagtaggctaatcaagatttcataatagtttgaaaatttaacttttatcattaaaatatgtatctgagagagaacttttaataattcattgactgtgataattkattctttgtaaacatgtttggggtcataattttaaaaaccaaactgtcttttactaaagaaagttgaagaaaattatttcttatatatttcataaggaaagatcacagtacaaatagaaatcaacaaattcatcaaacgaagctactcctgacttttgtgcatgttctgttgactataaaattg

SEQ ID NO: 725250 - DNA, 580 bp, Homo sapiens
tgaccccaccatctctgctgagctgcttctgctgaagttaggaatgacgcccacatcactaattcaggaccacttttcagcatgtgtccttcttgccacaacttccttgctttggcttatatgaccccatagttccattcatttattcgttaaaaatacatgttcctggaattgtgctaagccttagaggtaaaatagtgagagaaaactaacctgstccccaaccacagggagcttgcaattctacaggttttccctctctctggcttctctttctcagcctgcctcatttgtctccacccagcctgtaagtcctggatttcccccaggtccagtccccttctcatttagtctctccatgagggaggatcactgccctagcctgccccaccaatttgcatctaatacaccactgagctgtactccagaatggaatgtattcacttggatatcccacaggtgctgccaattcaagagtcaaagtgaattcatggtgtcactgcctcccccagcaagattccccatcattccctcgctcagcaaacaaatccctctgtagtccaccatgcctgccagaact

SEQ ID NO: 725251 - DNA, 580 bp, Homo sapiens
tgaccccaccatctctgctgagctgcttctgctgaagttaggaatgacgcccacatcactaattcaggaccacttttcagcatgtgtccttcttgccacaacttccttgctttggcttatatgaccccatagttccattcatttattcgttaaaaatacatgttcctggaattgtgctaagccttagaggtaaaatagtgagagaaaactaacctgctccccaaccacagggarcttgcaattctacaggttttccctctctctggcttctctttctcagcctgcctcatttgtctccacccagcctgtaagtcctggatttcccccaggtccagtccccttctcatttagtctctccatgagggaggatcactgccctagcctgccccaccaatttgcatctaatacaccactgagctgtactccagaatggaatgtattcacttggatatcccacaggtgctgccaattcaagagtcaaagtgaattcatggtgtcactgcctcccccagcaagattccccatcattccctcgctcagcaaacaaatccctctgtagtccaccatgcctgccagaact

SEQ ID NO: 725252 - DNA, 429 bp, Homo sapiens
ctttatgaatctgatgagctcaaacttaacaatgaagaaggaaacagatgcagtctagcagaaaaacaaaggaggtatatctgaggtgctcagtgatgctttctagacccaaagcacaccagcacaaataaatcccactccccaaactgcaagtattttgaagtgtccacagccctggaactggttaagaaaatatcaaatttgggttcaaaggtactttcaaatatcctttctacagaatccagaataaacttgtaacagggcagggaaagaacagcctctggaaatttccagtcctccgaaagcataagacagcagcaggagactgtgcatgtttaaaggaagtctgcctaaagccatgctttgtattcactmctctctgtgaacatcaaactgctgccatgcctttgttgcagttttgccaaggga

SEQ ID NO: 725253 - DNA, 1191 bp, Homo sapiens
ttcagtaaaaatgttccagaagcatgagagatggatagtcattgttttcagaattggaccattaacagaatctaataaccgtttccactcttcaactcttaagcaagaagcggtagaacctttggagagaagcacaacctgcctccagcatccgatgttaacctagtgggacagctgcacagtttgcatggcatgaatgtttgtacattcacctgtcactgcacaactgactgtttcacggtgacaagggcaaacactgggaagtgaatgctgcgctcacttgtgcatttgatgcaaggagatgtgcagaggccagaaatttcaaaatcaccagtgcggcttgccacactcccacttaccagtacctttatatgaaggccagacttacatagagatggaaggtgggttttttttcccccaaagtttgtacaaaaatgagtttatgtggctgcaccagttcatgcactgtcaagctctaagtctgttaaaatttagcatgccgctcaaggaggcatatgttcttttttattacagtttttgaagtggttaaaatatattttacaacaccacctgcttgactagaggcccttgaaccaggtttaaaaccctctcattctagcatgcagcctgcagaaatgacagccccttccttcctccttcagttgaacagctccagaggagacagatggacacagaggcaaagccaaactgcggaagagactggctgagaatcaccaaggtggcttagcggaatgaacctttctgcctatccactctgctcctggcaataaaatcatccccaaaataatacctgctgctctgtttcctgagcacaggccatgtgccatgccctgtgctcagtgcttacgtgcttcatcttgctgcatgccccaaaactctgcgaggcaggtgtaatttttatcaccattttatagaaactggaatacggagagattaggtcacttgcctgaggccacccagtgatggagtggcagagctgggcttygaaccaggtctgtcagactccaaaggctacatcaagacctcgtttctgatgggtctaattgcaaaatgtgcacacttcctgctccactacacaaatttattagctgttgttaatggcacagatgaggaaacactgaaaatgagaaactttcccctctgggaaagtttttgtctacatgatgctca

SEQ ID NO: 725254 - DNA, 630 bp, Homo sapiens
tctgtatgcctaaacttagcttgcatggaccttggggctaaagggcagctgtgtacttatgggctgcatctactcctttgtagcaacctaatttcctctgtgttttattattgttgttattgtcattattttgctaaataaatgtgaaattttattgtgagcattctattcccatcattatgttacctaccctagaacacctmataaacatgatttagcagaaagcaaattaacagagttgaaggaattgatcatactactctactgtagagagaaccagaatcaacacccagctcttgttcaataatgcttctttaggtagagttgtttaaggctccatatgcaccaacattaataattgacattaagacttgaatcttacatggaggtaggctggatagtggattttttcattgagtgaccaattgttttgttttggggggactattgggtttcccaggatgtgggacttccagtgagtccaaggcaaattaggatggttgccctgcctaaagatgacattttgacataatctatcctagtattcggagtgaataagtaatatgactggccacatgaacttaagaaaataatattttgtattttattgtatctcctttgttagagcca

SEQ ID NO: 725255 - DNA, 630 bp, Homo sapiens
tctgtatgcctaaacttagcttgcatggaccttggggctaaagggcagctgtgtacttatgggctgcatctactcctttgtagcaacctaatttcctctgtgttttattattgttgttattgtcattattttgctaaataaatgtgaaattttattgtgagcattctattcccatcattatgttacctaccctagaacacctaataaacatgatttagcagaaagcaaattmacagagttgaaggaattgatcatactactctactgtagagagaaccagaatcaacacccagctcttgttcaataatgcttctttaggtagagttgtttaaggctccatatgcaccaacattaataattgacattaagacttgaatcttacatggaggtaggctggatagtggattttttcattgagtgaccaattgttttgttttggggggactattgggtttcccaggatgtgggacttccagtgagtccaaggcaaattaggatggttgccctgcctaaagatgacattttgacataatctatcctagtattcggagtgaataagtaatatgactggccacatgaacttaagaaaataatattttgtattttattgtatctcctttgttagagcca

SEQ ID NO: 725256 - DNA, 630 bp, Homo sapiens
tctgtatgcctaaacttagcttgcatggaccttggggctaaagggcagctgtgtacttatgggctgcatctactcctttgtagcaacctaatttcctctgtgttttattattgttgttattgtcattattttgctaaataaatgtgaaattttattgtgagcattctattcccatcattatgttacctaccctagaacacctaataaacatgatttagcagaaagcaaattaacagagttgaaggaattgatcatactactctactgtagagagaaccagaatcmacacccagctcttgttcaataatgcttctttaggtagagttgtttaaggctccatatgcaccaacattaataattgacattaagacttgaatcttacatggaggtaggctggatagtggattttttcattgagtgaccaattgttttgttttggggggactattgggtttcccaggatgtgggacttccagtgagtccaaggcaaattaggatggttgccctgcctaaagatgacattttgacataatctatcctagtattcggagtgaataagtaatatgactggccacatgaacttaagaaaataatattttgtattttattgtatctcctttgttagagcca

SEQ ID NO: 725257 - DNA, 608 bp, Homo sapiens
atgttcatacaataatgaaatcatttaagggcacatttctcagaacatatccctggggtgggtgtgtgtgtgtgtgtgtgtgtgtgtgtgtgtgtgttcatgtacgcatataatgtatacagatttttgtctttttgtaaaaattaaatcatataacacttttttgatacttatagcagcctttttttttttttctgagatggagtctaactctgccactcaggctggagtgcagtggcgcgatctcggctcactacaacctctgcctcctgttcaagtgattctcctgcctcaacctcccgaacagctgcctggctaatttttgtatttgtagtagagayggggtttcaccatgttggccaggctggtctcaaactcctcacctcaggtgatcagcgtgcctcggcctcccaaagtgctgggattacaggcgtgagcaacgcccagctagcagctttatttctaattgctaaaacttgtagacaactaagatgtccttcagtgggtaaactgataaataaaaggtagcacatacagacagtggaatattattcagtgctgaaaagaagtgagctctcaagccatgaatacacatggaggaatcttaa

SEQ ID NO: 725258 - DNA, 1343 bp, Homo sapiens
ccaaatcagattcgggaaattcaagtcactgtgtggttataaaatctaccagcctataaacatattttatcaataaattatgtttcctaaaactcttggaatgcttttacaattcttaaatgataaaattataggtcctataaattgaggaacatgattataataatttttcaaactgtattcttgattaacatagtaaaaaaatgcatgtggtagttcctttataaaatctatataccttaatattttctactaaattttagaaaattatgtgggaaaaagtcgccaataaagatacataaactttctcaaagtgatcaaaatgttaatatagatattacaaagatttcaaaatatctaaagaaagtcatctcatcttacattattcaccattgtgtcaaattcctttcstgaaactacatttcctcatcaaaataatgttagcacataattttattttaggaaggttttagctctaaaggtagaaacttgtagaacgtgggatttgctgagaggtacccattttcactattataaaagctctctaagactactgatgcattacattaatatatacattatgtgttattatacatcaatagattatggggcagattttagagacaatcttttacaagggattcaagaataaattctaacatcattaattattctttttgttaaaccaagtcatagtctgcctcagcttggtgttgtaaaaatagtttttactgctgattttgcatgagtgtattttgtttttatgcatatcctgcttccaagttgtactgatattgatgaaagttccacatgtgaaatcagtttagaaaaagaaacagaaacctacaatgcagtggatgattttaaaggcatgatttcagataaaaacagtcctttttttttagcatttcctaaaatagttaaagcaaaagtacctgaaataaattaactcattcacttgcttatagtttatataaatgaatatctattcaactaagctgtccaacattcaatcaaaattagagcacaaataaatcttaaggattataattcaattttagacaccagcattgccatatttaaacataacatgaatacactagtcatgtctttatcaacaatgataaagcatgttttaaattatagaaactcaggtagagaaaatgtacttgaacctaaaaactctggtcttcaatcaaggttgtatttggagcacatggactccttagataggtctagtggtctctattgttaagtgttcttatcactcaaaggatgtttgaaaatttactatctgaaggaattaatttattcaagccatcaaaaataggaataactacttt

SEQ ID NO: 725259 - DNA, 1058 bp, Homo sapiens
attattggtaacaaatttcatgcacctcattccatagctattttcatcacaccagtgtgttttcacrgggttaacctattaacacctttccatttttaaaaagtctatagaacaatatacatatgaggtaggtgtttgctaatcagttagcgaaatgccattaaattagcttagctgaaggtaattggttactataaaaaaatacaactccttagatgcagggaaatgcataggcctactttccacttaactaaggcagtgattttttactctaaggagcctgaagcaatctttggaggtatcccaggggatgacgctggccacgggttggatctcttgaccccctttttagtccctgataagcagaacaactctgtccttctgacttatatactggattttgaataagattttggtggaacaaagagttcagtttaaaaaatcttgcaaatcactgaggtaagggactttctatttttctcaagcataattttgaacataaaatcaactcataattgttacttaaagccatcttcaaaattcgtgtcaaattatattctgatattattaatgaagccaggatgacagtggaatctttcagtaaaaccatatgataatatttgaataacaatattttagtggttcagtccagctcttttgctcaagtatactgaggcaaggaaaagtcagagcaaactcacaatgtttgaaaagcttaatggtgctttaacgaaagataaaatagtcataagggattttttgaattataagatccttataacaagaagaaagtaaaaggaagctgatctgatttttccttcataaaatcatattaatggcctggtacattttgtcactttcagtatgtaaatattgattgtcttctcttacaatttattgttatcattcacactttcaaggtgaaacctttgccttattaaaatttatatttattttcaaacatttagagagagatttttcctgtccataaaaactttgaatattaacatttttaaaaataatttcaaaagcctgtttgaatgtaaaggataatatag

SEQ ID NO: 725260 - DNA, 997 bp, Homo sapiens
ttcaccagattacatttaaggtcatttttagttttagaaagttgtgattcattcttgattcattgatcaatatttttaaatgtcccagttcattctgagaagcaatttatttttcctggtattaatttgtaggggaaatgtgtcacagagttcttgatatcaggcacactgagtcactcaactaacaatgtgctcactacagttttgcaaagaatacagaactgcacatttagaaagcttttcctgtatcttccctttataaaacttgaggacaaaaaatatagatgagctcagtgcttcctaaagtttgttccattggtactgcgagacacaacttgaaaattttaaatgaaaataaggaggaaaattcacaatgaatattagcttatccaggtgcataaagataggtaggaaagacttttttaaacccaagttttctcaaaacttcatttgcattaaaccagtttaatacctaatatagctcacattctgaagaactcactttagaaaatgttaacgttccatttctctttacttgcttccagcaaaaatgttcaagagatttgaccaggaatgttgcctccagctcttcatctcccactccaatggggcttttggcttttccactccggtgaaatgactctgaacaacgtcaatgaaaacccwcatgctctcaatcccataggtttgtgcctgtaccaccttccacagcctactagctgaattcagctgatggctgctcctacattctagaagcagtctcttgtcttggcatttgtctggttgtactttctgtttcctcgtccatcactgccctccttcccagcctcctctttaaagtctggccagacttcaaagtcaggctgttcctctgtgtgctgggtcttctcatttctgcctcatctatctacacctttcctctgggtcatcttttccttccctgcaatgttaaatgccatatttgtgctgacggctccacaatttggtctccagccca

SEQ ID NO: 725261 - DNA, 547 bp, Homo sapiens
atttcaatcttgcatcccagtcttccatcccagaagtacacattagcacccttggagcaatcattgaaaaaagtacttacaactgtcaaattatcttcataataacatggcacagtttatatgactggttgcttatgaactactgaaacctctcttaaaatggccattgtggactatttaaaaattttggttttaccacattcattccttcagttgtttaatagccatcaaataatagtgaagaattcagtgaagacagtgcagaagaagtttacagagatgctcawcatccttggcttttttatggatacaaactctggcatgtgtatataataagtgagcagcttatagcattttgcatatagatagcagtgctattacttgtttatatatttctttctcttgatagtgtgagggctccttaaggagggcatatgttttcttcatttctttagcccaaacagtccatagatatcaaacctgctggcaatttataaatgattattggtgagtgaatgagcatacaatgtatagatttcttaatggt

SEQ ID NO: 725262 - DNA, 1666 bp, Homo sapiens
tgaagcctgctttgctgcctggcatttggcagtcgtgctcagagcacccctgcagcctaagtcctcgtctgggtctctccccctgcctgcttgaggttaaggggtcagagctgcttcctatcccaagtttcatcagggggcctctcacatgcccacaaacacaggctggccttggatggcagaagctggcctgtccaaatgtctttcaagcactctaattttcctggtggttcttcatggtttccctccataaactgatatttaagaggggttatttgatctacaaagcacacaatgtatcactagttaattcattaatgrcatcaaaatgatatatttggataatagatatactagcattttgtaaatgttaaaacttttacataaaatattattgccaataatataaaaaattactattgctataatgccacactgtcaggatacctttgccctatggaattgtactaatgttagggttcaattctggaaatagcattgtatatgcaaaaattccaaaggaaggcctgtttagttaaaaataaaagtaaaaatggttcaatctaatgctagatgtgtcattactgtaaacccagagaacctttcttgaggttacaaaaaagaccatatggtgcccattttaaattcaccaactacataaaagagggaggatatgaaaccatttactgaagtcagaaacctgctgagcagaggctgggcctggagcagccgtggggctgcaggcagctctggggggcattctccaccaagcccactgcatcgtgcagggccgtgggggctcctcaagactgaccacatccacatggctcacaggcagtgactgacaatgcaaagggggataatgtgtggcatagcaggtggggacagcaatgagcctcaaacttgatagtctataactgctgttgttaacagcatccctgcagtggtgttcaacacagtcaacatttatcccatttttcttgcctatcatctatttttgggatggggaactgaaagatatacttactttagagctgattttattttttcagcatcatcttctgtccttaaactttttttccttcaaattacctggaagccccttgaagccatctggtgttcatggaatttgctcacatcttacttgccttctggagctggtgaccattggtgacacgtgcggcactagtgtttgccacgccctttaacaaatactggaaagacgtcaagtaacaatggttgtaaagaaccagcacgtctatccccaaatcatttcccgacaccatctcagttcagagattccttacaaaggaagcagacgcaatgctgcccttcaccaaccgagggacaccccaaggacaaaagcccaaagatactgaccacacaggaagctgactttgaaaattaaatacttttggcaaaacgcattttttcaagtttttaacttaaagtgagatctgattaaaatgttttatgttgcattatttccttttttatgtgctaaattaaaaagcaatcttttaccatggaggattgccagcatatagaaaataaacagaatagtataatgagcctcagacacttttaatccggcttccacaccatcaacattttgccaaccctgcttcatttatgcttcctgcccccattactacttctttcaaaa

SEQ ID NO: 725263 - DNA, 1666 bp, Homo sapiens
tgaagcctgctttgctgcctggcatttggcagtcgtgctcagagcacccctgcagcctaagtcctcgtctgggtctctccccctgcctgcttgaggttaaggggtcagagctgcttcctatcccaagtttcatcagggggcctctcacatgcccacaaacacaggctggccttggatggcagaagctggcctgtccaaatgtctttcaagcactctaattttcctggtggttcttcatggtttccctccataaactgatatttaagaggggttatttgatctacaaagcacacaatgtatcactagttaattcattaatgayatcaaaatgatatatttggataatagatatactagcattttgtaaatgttaaaacttttacataaaatattattgccaataatataaaaaattactattgctataatgccacactgtcaggatacctttgccctatggaattgtactaatgttagggttcaattctggaaatagcattgtatatgcaaaaattccaaaggaaggcctgtttagttaaaaataaaagtaaaaatggttcaatctaatgctagatgtgtcattactgtaaacccagagaacctttcttgaggttacaaaaaagaccatatggtgcccattttaaattcaccaactacataaaagagggaggatatgaaaccatttactgaagtcagaaacctgctgagcagaggctgggcctggagcagccgtggggctgcaggcagctctggggggcattctccaccaagcccactgcatcgtgcagggccgtgggggctcctcaagactgaccacatccacatggctcacaggcagtgactgacaatgcaaagggggataatgtgtggcatagcaggtggggacagcaatgagcctcaaacttgatagtctataactgctgttgttaacagcatccctgcagtggtgttcaacacagtcaacatttatcccatttttcttgcctatcatctatttttgggatggggaactgaaagatatacttactttagagctgattttattttttcagcatcatcttctgtccttaaactttttttccttcaaattacctggaagccccttgaagccatctggtgttcatggaatttgctcacatcttacttgccttctggagctggtgaccattggtgacacgtgcggcactagtgtttgccacgccctttaacaaatactggaaagacgtcaagtaacaatggttgtaaagaaccagcacgtctatccccaaatcatttcccgacaccatctcagttcagagattccttacaaaggaagcagacgcaatgctgcccttcaccaaccgagggacaccccaaggacaaaagcccaaagatactgaccacacaggaagctgactttgaaaattaaatacttttggcaaaacgcattttttcaagtttttaacttaaagtgagatctgattaaaatgttttatgttgcattatttccttttttatgtgctaaattaaaaagcaatcttttaccatggaggattgccagcatatagaaaataaacagaatagtataatgagcctcagacacttttaatccggcttccacaccatcaacattttgccaaccctgcttcatttatgcttcctgcccccattactacttctttcaaaa

SEQ ID NO: 725264 - DNA, 1666 bp, Homo sapiens
tgaagcctgctttgctgcctggcatttggcagtcgtgctcagagcacccctgcagcctaagtcctcgtctgggtctctccccctgcctgcttgaggttaaggggtcagagctgcttcctatcccaagtttcatcagggggcctctcacatgcccacaaacacaggctggccttggatggcagaagctggcctgtccaaatgtctttcaagcactctaattttcctggtggttcttcatggtttccctccataaactgatatttaagaggggttatttgatctacaaagcacacaatgtatcactagttaattcattaatgacatcaaaatgatatatttggataatagatatactagcattttgtaaatgttaaaacttttacmtaaaatattattgccaataatataaaaaattactattgctataatgccacactgtcaggatacctttgccctatggaattgtactaatgttagggttcaattctggaaatagcattgtatatgcaaaaattccaaaggaaggcctgtttagttaaaaataaaagtaaaaatggttcaatctaatgctagatgtgtcattactgtaaacccagagaacctttcttgaggttacaaaaaagaccatatggtgcccattttaaattcaccaactacataaaagagggaggatatgaaaccatttactgaagtcagaaacctgctgagcagaggctgggcctggagcagccgtggggctgcaggcagctctggggggcattctccaccaagcccactgcatcgtgcagggccgtgggggctcctcaagactgaccacatccacatggctcacaggcagtgactgacaatgcaaagggggataatgtgtggcatagcaggtggggacagcaatgagcctcaaacttgatagtctataactgctgttgttaacagcatccctgcagtggtgttcaacacagtcaacatttatcccatttttcttgcctatcatctatttttgggatggggaactgaaagatatacttactttagagctgattttattttttcagcatcatcttctgtccttaaactttttttccttcaaattacctggaagccccttgaagccatctggtgttcatggaatttgctcacatcttacttgccttctggagctggtgaccattggtgacacgtgcggcactagtgtttgccacgccctttaacaaatactggaaagacgtcaagtaacaatggttgtaaagaaccagcacgtctatccccaaatcatttcccgacaccatctcagttcagagattccttacaaaggaagcagacgcaatgctgcccttcaccaaccgagggacaccccaaggacaaaagcccaaagatactgaccacacaggaagctgactttgaaaattaaatacttttggcaaaacgcattttttcaagtttttaacttaaagtgagatctgattaaaatgttttatgttgcattatttccttttttatgtgctaaattaaaaagcaatcttttaccatggaggattgccagcatatagaaaataaacagaatagtataatgagcctcagacacttttaatccggcttccacaccatcaacattttgccaaccctgcttcatttatgcttcctgcccccattactacttctttcaaaa

SEQ ID NO: 725265 - DNA, 597 bp, Homo sapiens
tagctggctaatttttgtgtttttagtagagatggggtttctccatgttggccaggctggtctcgaactcctgacctctggtgatccacccaccttggcctcccaaagtgctggaattataggcatgagccacctagctgacagttgccactcttgttgccaccaaacactaggggaaaaatgaattctccctcctactcttcaatccccacaggtgctttccactggcaaaatgtagcagaaagccagacagcaaggagcctggcttcccacttctatactcagagaggagtatagaagaaaaaatgttgctaaacaaatattatctatcactcttgctttctttcaaaaaattaaagatattttattattcaatttttattgtttagaagttatacatactctttgtttttctagtagttactgtagccattgactttgcaagacctgaagttaatatctttgccctccccaataatataaagagcaatttatatgcgttgttatccagtattttgatatttttttctcacaaattagacattkttttatagagtcaattttttggctttcattaaaacttattataataatatc

SEQ ID NO: 725266 - DNA, 596 bp, Homo sapiens
cttagagtgctgaattagcttcctggggctgctgtaacaacgaactggggggccttaaaacaacagggattatcatcccccggttctggaggctggaaagtctgaagtcaggatgtcagcagggccgcctccctgagacttggagagtcctccacagcccctccccagctcccggggctgccgtgaggctcagggttccttggctttagatgtgccgtgtctatctctgcctccatctcaggccttgtcccgtgggagtcttcacacagggttctcgcctccccataaggacatcatgctggactagggcccaccctcatgatccccatgacttcatcatgtttgcaagacccaatttccaaataagctctcattcacaggtaccagggtttcgggctccagaaccctggttttcaygggacacaactcaacccataacaaataccaagtctgggcttttccaagctgtgaaaaccccactgcctcggctccaagttcatgcagcatcctccgcatgtcaatcaaaggggaccctcttcatagcaaccaacagaccagcgcctctgtgagggtctctccagggaacaccagggtgg

SEQ ID NO: 725267 - DNA, 596 bp, Homo sapiens
cttagagtgctgaattagcttcctggggctgctgtaacaacgaactggggggccttaaaacaacagggattatcatcccccggttctggaggctggaaagtctgaagtcaggatgtcagcagggccgcctccctgagacttggagagtcctccacagcccctccccagctcccggggctgccgtgaggctcagggttccttggctttagatgtgccgtgtctatctctgcctccatctcaggccttgtcccgtgggagtcttcacacagggttctcgcctccccataaggacatcatgctggactagggcccaccctcatgatccccatgacttcatcatgtttgcaagacccaatttccaaataagctctcattcacaggtaccagggtttcgggctccagaaccctggttttcacgggacacaactcaacccataacaaataccaagtctgggcttttccaagctgtgaaaaccccactgcctcggctccaagttcatgcagcatcctccgcatgtcaatcaaargggaccctcttcatagcaaccaacagaccagcgcctctgtgagggtctctccagggaacaccagggtgg

SEQ ID NO: 725268 - DNA, 1336 bp, Homo sapiens
tgaaccagaaaagaaatctataaatcccaggaccttatcgtacatttgggtcatggcccaccattttgcttcctgtggcagtggtaagaaaagaacattcctctctctttccctacaaaacaactcattttgttcacaggaatayggaggaaggcatataagaaagtactcagtgagctgggtggggtggtgcatgactgttgtcccagttactcaggaggctaaggcaggaggatcacttgagcccaggagtccaagtctaggctgggcaatacagtaagactccatctcttaaaaaaaaaaaaaactgctcagtgaagacttgatgaattgaggtttggttccttttaaatgcctcttattttgtcacattcatctcaatatatttaggaaaggagaaatgggagatgacaaaacagtactaaatccagcagatgaaacagaaaatgtaattttcttctccatgtagggctgtagtttctgaaggtaatacagtttaaaaccaagttaggggcgttttatgcccccacatcctcaggattaggacactgcctaaagctgtgctgcagcaaggtcctactggatggagacacacgcacctgtaagggtgatgtcatcatcatcatcgtctatgatttcttcttcagcaacatccagtgaactctcagtaatcatgtcattgggctcttccacacaggctagaccggcataactattgagaatatcagcaccaggaacatgttccacaattacggcaggaaaaatagctggatcaccaagctgggaagggttagggagaggaaaatgaaaacaaaggattaacacagttttgcttttgttaaataatgctcaaaactattttatactagccatcaatttaatttttagatcatcaggctgtatctctataatctttctaggcattaggtaatttgtatctattacaaccaaataatggcattaaaatttaaaaatgaaggctgggcgcggtgactcacacctgtaatcccagcactctgggaggccgaggcaggcagatcacgagggtcaggaaatcaagaccatcctggctaacatggtgaaaccccatctctactaaaaatacaaaaattagctgggcacggtggcatgcacctgtagtctcagctactagggaggctgaggcaggagaatcacttgaacctgggaggcggaggttgcagtgagccgagatcgcaccactgcactccagcctgggtgacagagtgaggctccttctcaaaaaataaataaaataaataataataataagatgccattaatgcataagcatgaaccaagaagtgacatacaaata

SEQ ID NO: 725269 - DNA, 1336 bp, Homo sapiens
tgaaccagaaaagaaatctataaatcccaggaccttatcgtacatttgggtcatggcccaccattttgcttcctgtggcagtggtaagaaaagaacattcctctctctttccctacaaaacaactcattttgttcacaggaatacggaggaaggcatataagaaagtactcagtgagctgggtggggtggtgcatgactgttgtcccagttactcaggaggctaaggcaggaggatcacttgagcccaggagtccaagtctaggctgggcaatacagtaagactccatctcttaaaaaaaaaaaaaactgctcagtgaagacttgatgaattgaggtttggttccttttaaatgcctcttattttgtcacattcatctcaatatatttaggaaaggagaaatgggagatgacaaaacagtactaaatccagcagatgaaacagaaaatgtaattttcttctccatgtagggctgtagtttctgaaggtaatacagtttaaaaccaagttaggggcgttttatgcccccacatcctcaggattaggacactgcctaaagctgtgctgcagcaaggtcctactggatggagacacacgcacctgtaagggtgatgtcatcatcatcatcgtctatgatttcttcttcagcaacatccagtgaactctcagtaatcatgtcattgggctcttccacacaggctagaccggcataactattgagaatatcagcaccaggaacatgttccacaattacggcaggaaaaatagctggatcaccaagctgggaagggttagggagaggaaaatgaaaacaaaggattaacacagttttgcttttgttaaataatgctcaaaactattttatactagccatcaatttaatttttagatcatcaggctgtatctctataatctttctaggcattaggtaatttgtatctattacaaccaaataatggcattaaaatttaaaaatgaaggctgggcgcggtgactcacacctgtaatcccagcactctgggaggcsgaggcaggcagatcacgagggtcaggaaatcaagaccatcctggctaacatggtgaaaccccatctctactaaaaatacaaaaattagctgggcacggtggcatgcacctgtagtctcagctactagggaggctgaggcaggagaatcacttgaacctgggaggcggaggttgcagtgagccgagatcgcaccactgcactccagcctgggtgacagagtgaggctccttctcaaaaaataaataaaataaataataataataagatgccattaatgcataagcatgaaccaagaagtgacatacaaata

SEQ ID NO: 725270 - DNA, 599 bp, Homo sapiens
caaataagattttagactctggctttatttattcatatttcttaatgccatatagatgaacaattaatactttctttgaactcatgttttactatcatgacaaatgaaacgttttggctatagctaaactactctgcttctctccctccayacttgaagtcaaatcattgacacaaatgacactttaaaacttaaaagtggagaaataggaacactgttacactgttggtgggactgtaaactagttcaaccattgtggaagacagtgtggcaattcctcagggatccagaactagaaataccatttgacccagccatcccattactgggtatatacccaaaggattataaatcatgctgctatgaagacgcatgcatacgtatgcttattgcggcactattcacgatagcaaagacttggaaccaacccaaatgtccaacaatgatagactggattaagaaaatgtggcacatatacaccatggaatactatgcagccataaaaaatgatgagttcatgtcctttgtacagatatggatgaaactggaaaccatcattctcagcaaactattgcaaggacaagaaaccaaacaccgca

SEQ ID NO: 725271 - DNA, 2077 bp, Homo sapiens
ttatatggtttggctctgtccccacccaaatctcatcttgaattgtaacaattcccatgtgtcaagggtggggccaggtggagataactgaatcatggaggcagtttcccccatgctgttctcatggtagtgaataagtctcatgaggtctgatggttttataaatggatgttcccctgcacatgctctctcctgcccaccatgtctgactaaattttgtatttttactagagacggggtttcactatgttggccaggctggcctccaactcctgatctcgtgatccgtccaccccgacctcccaaagtgctaggattataggcataagccaccacacccggcctcttttttttctttttctttttttttatctggagactgagttttgcactcgttgcccaggctggagtgcaatggtgcgatctcagctcactgcagtctccacctcagcaggagagcaggaatcttcagtgatccacgggcagatctgcagccattgtgggcacctgttcctcccgcgacctttgtgcccacgtctctccctccagtacctattgcacgaccccccacgtccgcctcctgccattgccagcaagtgccttgcgcgggtacctggctgcgcttattaatccattatggtcgctctgtcactggtgccattatgtgctcacgtgcccactccctcaggtttagaagtcgcgtcgcccggcaacagaacaatctgctggcttagcctttggccaagttggcagctggacgaggacgctcagagcccagctctcgagagttcaagtatccgacagttccccactgctcccaggagcggttacccgggcactctgtgcccctcattcctgtttgggccaaggccgaggacctgcgagtagggctcagttgcctggagccccttcagcccatcgcccagttcactttgcttgtgggatctccccgttgctcctgcccctggactgagtggcaggccatcctacaaacacccggacactcgacatcagtggtgtcaagacaactctaagaaggttttccgtgatcctgcaagacctgtgttccatcctggtgattctctcttcaatttcactgcacaggtaccacagtaagccagtgctgtgtgctccgaattccagggcatcccccagctcagccactacactcagcacaaggactctgtggggcccaggagcaggtagtcacccctttgggctcctcaacacccggctgtccccagacttgtgtccagggaagatagtgttgagggccctcaaggagagcagggcagggatgcctgagcaggacaaggaccccagagtccaagaaaatcctgatgatcacagaacggtccccgaggtcaccggggatgcacggtctgcattttggcccctgcgggacaatggaggcctctctccctttgtgcccaggcccgggcctctgcagacagacctccatgcccagagctcagaaatcagatataaccagacatcccagacatcctggacgagctcgagcacmaaacgaaatgctatctccagctcctacagctccacgggaggcttgccggggctaaagcagaggaggggaccagcctcatcccgctgccagctgaccctcagttactcaaagacagtgagtgaggacaggcctcaggctgtctcttcgggtcacacacggtgtgaaaaggcggcagatacagcaccagggcagacactcgcccccaggggtggctcccccagatcccaggcctctaggccccgtagacgcaagattcccctgctgccaagcaggcgaggggagcctttgatgatgccacctcccttagagctggggtaccgggtcacggctgaagacctgcacctggaaaaacaggcggcattccagcgcatcaacagtgcactgcacgttgaggacaaggccatctcggactgcagaccctcacggccttcccacactttgtcctcacttgcaacaggggcttcgggtgggcctcccgtttctaaagcacccactatggatgcacagcaggacagacccaagtcccaagactgcctgggcctagtggccccc

SEQ ID NO: 725272 - DNA, 2077 bp, Homo sapiens
ttatatggtttggctctgtccccacccaaatctcatcttgaattgtaacaattcccatgtgtcaagggtggggccaggtggagataactgaatcatggaggcagtttcccccatgctgttctcatggtagtgaataagtctcatgaggtctgatggttttataaatggatgttcccctgcacatgctctctcctgcccaccatgtctgactaaattttgtatttttactagagacggggtttcactatgttggccaggctggcctccaactcctgatctcgtgatccgtccaccccgacctcccaaagtgctaggattataggcataagccaccacacccggcctcttttttttctttttctttttttttatctggagactgagttttgcactcgttgcccaggctggagtgcaatggtgcgatctcagctcactgcagtctccacctcagcaggagagcaggaatcttcagtgatccacgggcagatctgcagccattgtgggcacctgttcctcccgcgacctttgtgcccacgtctctccctccagtacctattgcacgaccccccacgtccgcctcctgccattgccagcaagtgccttgcgcgggtacctggctgcgcttattaatccattatggtcgctctgtcactggtgccattatgtgctcacgtgcccactccctcaggtttagaagtcgcgtcgcccggcaacagaacaatctgctggcttagcctttggccaagttggcagctggacgaggacgctcagagcccagctctcgagagttcaagtatccgacagttccccactgctcccaggagcggttacccgggcactctgtgcccctcattcctgtttgggccaaggccgaggacctgcgagtagggctcagttgcctggagccccttcagcccatcgcccagttcactttgcttgtgggatctccccgttgctcctgcccctggactgagtggcaggccatcctacaaacacccggacactcgacatcagtggtgtcaagacaactctaagaaggttttccgtgatcctgcaagacctgtgttccatcctggtgattctctcttcaatttcactgcacaggtaccacagtaagccagtgctgtgtgctccgaattccagggcatcccccagctcagccactacactcagcacaaggactctgtggggcccaggagcaggtagtcacccctttgggctcctcaacacccggctgtccccagacttgtgtccagggaagatagtgttgagggccctcaaggagagcagggcagggatgcctgagcaggacaaggaccccagagtccaagaaaatcctgatgatcacagaacggtccccgaggtcaccggggatgcacggtctgcattttggcccctgcgggacaatggaggcctctctccctttgtgcccaggcccgggcctctgcagacagacctccatgcccagagctcagaaatcagatataaccagacatcccagacatcctggacgagctcgagcaccaaacgaaatgcyatctccagctcctacagctccacgggaggcttgccggggctaaagcagaggaggggaccagcctcatcccgctgccagctgaccctcagttactcaaagacagtgagtgaggacaggcctcaggctgtctcttcgggtcacacacggtgtgaaaaggcggcagatacagcaccagggcagacactcgcccccaggggtggctcccccagatcccaggcctctaggccccgtagacgcaagattcccctgctgccaagcaggcgaggggagcctttgatgatgccacctcccttagagctggggtaccgggtcacggctgaagacctgcacctggaaaaacaggcggcattccagcgcatcaacagtgcactgcacgttgaggacaaggccatctcggactgcagaccctcacggccttcccacactttgtcctcacttgcaacaggggcttcgggtgggcctcccgtttctaaagcacccactatggatgcacagcaggacagacccaagtcccaagactgcctgggcctagtggccccc

SEQ ID NO: 725273 - DNA, 973 bp, Homo sapiens
taggattagaaatacataattatttttaaatatagtctttatatattaattatatttcattaatgtcttatttcttgaataaacttttttcatgatactatttaagtgccacattctacaataatatggaaaacaattctacaaaatgtggcatacagtaatttataggtagtatagcacaccttttatctctttatagcaaaaacataatgtgtaaattaatataacactaagtcccatattgtcattttttgtcaaagagctatctccttgaaaaccatcatcctcagatgcatctctaacgtaaaaagaccttagaaactgtaacaattgtaaatgcattataacttaaagagatattatcttcacattagaggctaacaggcttatacctactgatagctgacaagtattacaggaatcctggcaggcaaattgttgcataaaaattatgtaatttactaactgtaaaataacctttagagtttagaatcagtcaaataagtagaacagacaattgttatcaaagccatataaatgkctattaaaattatgttttgctaccctcattttatctctgaagagacatcttgttaaaaaatgaataatagacacatataaatacctaattacaagcagagttaagattaaaattcagcctcattggggtgggatagaaatcagtacagtaaagaatattttggtgcaggtagtttgtttcaaatgattcaaccttcaacattacttcacttaaattttagcaaactttctgctaaaatttaagcatacatacatatgacactagacatatgtcctgtgtaagcctgggctaggggagctctattaaatacttatataaaccccaaagatgtcctaagaaacacaatttggaaaaactttgatgtgctacagcacagattttctcatacagcaacagagcagacacttgaatgtagttatactcctgctttcc

SEQ ID NO: 725274 - DNA, 973 bp, Homo sapiens
taggattagaaatacataattatttttaaatatagtctttatatattaattatatttcattaatgtcttatttcttgaataaacttttttcatgatactatttaagtgccacattctacaataatatggaaaacaattctacaaaatgtggcatacagtaatttataggtagtatagcacaccttttatctctttatagcaaaaacataatgtgtaaattaatataacactaagtcccatattgtcattttttgtcaaagagctatctccttgaaaaccatcatcctcagatgcatctctaacgtaaaaagaccttagaaactgtaacaattgtaaatgcattataacttaaagagatattatcttcacattagaggctaacaggcttatacctactgatagctgacaagtattacaggaatcctggcaggcaaattgttgcataaaaattatgtaatttactaactgtaaaataacctttagagtttagaatcagtcaaataagtagaacagacaattgttatcaaagccatataaatggctattaaaattatkttttgctaccctcattttatctctgaagagacatcttgttaaaaaatgaataatagacacatataaatacctaattacaagcagagttaagattaaaattcagcctcattggggtgggatagaaatcagtacagtaaagaatattttggtgcaggtagtttgtttcaaatgattcaaccttcaacattacttcacttaaattttagcaaactttctgctaaaatttaagcatacatacatatgacactagacatatgtcctgtgtaagcctgggctaggggagctctattaaatacttatataaaccccaaagatgtcctaagaaacacaatttggaaaaactttgatgtgctacagcacagattttctcatacagcaacagagcagacacttgaatgtagttatactcctgctttcc

SEQ ID NO: 725275 - DNA, 973 bp, Homo sapiens
taggattagaaatacataattatttttaaatatagtctttatatattaattatatttcattaatgtcttatttcttgaataaacttttttcatgatactatttaagtgccacattctacaataatatggaaaacaattctacaaaatgtggcatacagtaatttataggtagtatagcacaccttttatctctttatagcaaaaacataatgtgtaaattaatataacactaagtcccatattgtcattttttgtcaaagagctatctccttgaaaaccatcatcctcagatgcatctctaacgtaaaaagaccttagaaactgtaacaattgtaaatgcattataacttaaagagatattatcttcacattagaggctaacaggcttatacctactgatagctgacaagtattacaggaatcctggcaggcaaattgttgcataaaaattatgtaatttactaactgtaaaataacctttagagtttagaatcagtcaaataagtagaacagacaattgttatcaaagccatataaatggctattaaaattatgttttgctaccctcattttatctctgaagagacatcttgttaaaaaatgartaatagacacatataaatacctaattacaagcagagttaagattaaaattcagcctcattggggtgggatagaaatcagtacagtaaagaatattttggtgcaggtagtttgtttcaaatgattcaaccttcaacattacttcacttaaattttagcaaactttctgctaaaatttaagcatacatacatatgacactagacatatgtcctgtgtaagcctgggctaggggagctctattaaatacttatataaaccccaaagatgtcctaagaaacacaatttggaaaaactttgatgtgctacagcacagattttctcatacagcaacagagcagacacttgaatgtagttatactcctgctttcc

SEQ ID NO: 725276 - DNA, 973 bp, Homo sapiens
taggattagaaatacataattatttttaaatatagtctttatatattaattatatttcattaatgtcttatttcttgaataaacttttttcatgatactatttaagtgccacattctacaataatatggaaaacaattctacaaaatgtggcatacagtaatttataggtagtatagcacaccttttatctctttatagcaaaaacataatgtgtaaattaatataacactaagtcccatattgtcattttttgtcaaagagctatctccttgaaaaccatcatcctcagatgcatctctaacgtaaaaagaccttagaaactgtaacaattgtaaatgcattataacttaaagagatattatcttcacattagaggctaacaggcttatacctactgatagctgacaagtattacaggaatcctggcaggcaaattgttgcataaaaattatgtaatttactaactgtaaaataacctttagagtttagaatcagtcaaataagtagaacagacaattgttatcaaagccatataaatggctattaaaattatgttttgctaccctcattttatctctgaagagacatcttgttaaaaaatgaataatagacacatataaatacctaattacaagcagagttaagattaaaattcagcctcattggggtgggatagaaatcagtacmgtaaagaatattttggtgcaggtagtttgtttcaaatgattcaaccttcaacattacttcacttaaattttagcaaactttctgctaaaatttaagcatacatacatatgacactagacatatgtcctgtgtaagcctgggctaggggagctctattaaatacttatataaaccccaaagatgtcctaagaaacacaatttggaaaaactttgatgtgctacagcacagattttctcatacagcaacagagcagacacttgaatgtagttatactcctgctttcc

SEQ ID NO: 725277 - DNA, 3508 bp, Homo sapiens
cataattgtattgtgtgtaaatatatctgtaggataagtttctatcagcgatattgttgcagtttatttagacagctttagaactgattgacttttgcttaggatttacgggctagtcagaatttgctttgcaatatttagacttggtgttgtcaattttatcagctagcttttttactctacacttgtacttaaaataattgaaatttatgtagaaaaaagtatgtttatgattgtgaatctggaattctgtagccgaagcacccacttcccaattgaataattgtttttataaccttactttaaggatttttttaatttagaaaaagtttttgataaagagagatatcttagacacatagctatcatattagaacagaccgtacctcctttctgctctgccaagaatctgtgcttcctaaagatcaatccagggcatttggcagctataggagatgtaactaatctcaaaaagaatgacagtgaccacatttacagtttatactgttcttcttttcatgtcttttggctattaaaaattatatttatataaatataaacatttttaggttatgtaaataattcacaaagttttctgaattcgcttttagattaaatttttaatattttccccattttgatagtaagaaaatgaattgtaaataaaatttccattacgtttctctatccttgaagtttctgtcttgggtaatacatatcttgtgattcatgaactgcaaagaaaaaaaatccacaggattttgtcatcagctacattctatgagcattttcagccagatttcagtacttgtttagatttatattattttgggagaatcttaatttgtagttaaaaaattaaatatgttgcaaaaccaattataaacttcctgttaatgttgaacttttgctagggaaagattctaaggggaatttcctttatccttttaaagggataaatattattcaaatcaccttagtaacagttggaccacagtcatgcaattagtttagtatcactttctaagttagatgatgttggtctggagttgacaacattgattttctgtgaagtttacaatttattattttttaaataagggggaaattttgctttttaaaacttttgcaatttatcacttagtttacgaggcaaaatagatttcaccattttgagaactgtgagttattttctatgtgaagaatatatgtggtaccattgtttttgattgggtctcatagtgcacattatgtaaaagaaaacaaatcttactgtcttttttatgatacagcaaagtgaagactgaggatcctgagtgtgcatagtgcatgcatgttatgtgttatatgtgtatgcatacatatgtgtatatatatagttttacaagtttaaaataatatcagtgacttgaaaattgtaagggcttaccagataatctctttgtaggccttggagtagcattgttttttttttttttttcctttggttattgatgggtaataatgctctggtaaatcagtcttttttttttttttgagatggagtttcgctcttgttgcccaggctggagtgcaatggtgcaatctttgctcactgcaacctctgtctcccgggttcaagtgattcttctgcctcagcctcctgagtggctgggattacaggcatgtgtcaccacgcccagctaaatttttttttttttttgagatggatttttgctcttgttgctccggctggagtgcaatggtgcaatcttggctcactgcaacctctacctctcaggttcaagcaattctcctgccgtagactccggagtggctgagattacaggcacccgccatcacacccgactaatttttgtggttttagtagagacagggtaataccatgttggtcaggctggtcttgaactcctgacctcaggcaatccacccgcctcagcctcccaaagtgctggrattacaggcatgagccaccacgcccagcctaattttgtatttttagtagagatggggttttatcatattggtcaggctggtctcgaactcctcacctcaggtgatccatccgcctcagcctcccaaagtgttgggattataggcatgatccaccacgcccggcctggtaagtcagtcttaaccttagttacttcaccctaagacagagctgggtagaaatcagaagacaagaattaggaaaaagggaagaggcagtgacccatcttaaggtttagactgtattgtttgattgcgagtaaattaaagcctttccttttttgtatgcttatagacctcaggggtcacattctgttcctgagaatagtagctaccattggcaatgaagtatgtgtgcatacatcctggatctaattaggtggttgtgctgcttccatatttttggaacattattctgactttatttgttctatttgtagataagaacattcagaggaacacatctctccccatgtaattatctcatttagcattttgcctactcagagggcatggctaaatgttttaggtacagggaaaagctgactttggtggcagttctttatactgtcttctcaaattaagagggtcctctattcaggaatgtttcctgcataacgaatagacattccttgaagcatgatgaccccccacccactgcatttgaatgtagagcaacatcttacatggaaacagtgatagtataggaaacacaaaataacgtcaaataaactctaattaatagcttcacaaattcaagaagacactgtattgactaaattagtacatattactatgcaaaagtatcattcagagaacagtgttcctgaaaataaaaaaatctgatcgcctgccctcctttatccattactaataaacagacaaaccaaaagccactaccaagtagtgaaatggatatagctaaaaatcaaatatttgaccttgaaaataagtccacgatatcacccaggataccaaataaaaagtaaagtgttaaaaatacaaatgaaaaattaagagacatcaaggatccatcaatttttaaatgtagattcccaaatatccaacattcattgtaaaagaagtctcagatgaacagaaacaatggaaagaaaattactcaaagtaataggatatttccttaatctaaagacgaatgtgagactatagataaaattgccaatcaagggccaagcaagaattatgagcaaagccaagacattatattctagtgatatctgtgatctcccaaagttaatgaaagacattgtgacagtttcaggtaggagaggatgagaaaaatatttggttaatggcctaggttggtagctagctagccagatccttgttctttctttcacttattttttttattcattcaacaaatgtttatagagcacttactatgtgccaaaaattttgttaggtaataatagacacagtggagtaaaaatagtctgatgacagaagtaaacaataatcacattataaataaaaataaattacacctgtgata

SEQ ID NO: 725278 - DNA, 3508 bp, Homo sapiens
cataattgtattgtgtgtaaatatatctgtaggataagtttctatcagcgatattgttgcagtttatttagacagctttagaactgattgacttttgcttaggatttacgggctagtcagaatttgctttgcaatatttagacttggtgttgtcaattttatcagctagcttttttactctacacttgtacttaaaataattgaaatttatgtagaaaaaagtatgtttatgattgtgaatctggaattctgtagccgaagcacccacttcccaattgaataattgtttttataaccttactttaaggatttttttaatttagaaaaagtttttgataaagagagatatcttagacacatagctatcatattagaacagaccgtacctcctttctgctctgccaagaatctgtgcttcctaaagatcaatccagggcatttggcagctataggagatgtaactaatctcaaaaagaatgacagtgaccacatttacagtttatactgttcttcttttcatgtcttttggctattaaaaattatatttatataaatataaacatttttaggttatgtaaataattcacaaagttttctgaattcgcttttagattaaatttttaatattttccccattttgatagtaagaaaatgaattgtaaataaaatttccattacgtttctctatccttgaagtttctgtcttgggtaatacatatcttgtgattcatgaactgcaaagaaaaaaaatccacaggattttgtcatcagctacattctatgagcattttcagccagatttcagtacttgtttagatttatattattttgggagaatcttaatttgtagttaaaaaattaaatatgttgcaaaaccaattataaacttcctgttaatgttgaacttttgctagggaaagattctaaggggaatttcctttatccttttaaagggataaatattattcaaatcaccttagtaacagttggaccacagtcatgcaattagtttagtatcactttctaagttagatgatgttggtctggagttgacaacattgattttctgtgaagtttacaatttattattttttaaataagggggaaattttgctttttaaaacttttgcaatttatcacttagtttacgaggcaaaatagatttcaccattttgagaactgtgagttattttctatgtgaagaatatatgtggtaccattgtttttgattgggtctcatagtgcacattatgtaaaagaaaacaaatcttactgtcttttttatgatacagcaaagtgaagactgaggatcctgagtgtgcatagtgcatgcatgttatgtgttatatgtgtatgcatacatatgtgtatatatatagttttacaagtttaaaataatatcagtgacttgaaaattgtaagggcttaccagataatctctttgtaggccttggagtagcattgttttttttttttttttcctttggttattgatgggtaataatgctctggtaaatcagtcttttttttttttttgagatggagtttcgctcttgttgcccaggctggagtgcaatggtgcaatctttgctcactgcaacctctgtctcccgggttcaagtgattcttctgcctcagcctcctgagtggctgggattacaggcatgtgtcaccacgcccagctaaatttttttttttttttgagatggatttttgctcttgttgctccggctggagtgcaatggtgcaatcttggctcactgcaacctctacctctcaggttcaagcaattctcctgccgtagactccggagtggctgagattacaggcacccgccatcacacccgactaatttttgtggttttagtagagacagggtaataccatgttggtcaggctggtcttgaactcctgacctcaggcaatccacccgcctcagcctcccaaagtgctggaattacaggcatgagccaccacgcccagcctaattttgtatttttagtagagatggggttttatcatrttggtcaggctggtctcgaactcctcacctcaggtgatccatccgcctcagcctcccaaagtgttgggattataggcatgatccaccacgcccggcctggtaagtcagtcttaaccttagttacttcaccctaagacagagctgggtagaaatcagaagacaagaattaggaaaaagggaagaggcagtgacccatcttaaggtttagactgtattgtttgattgcgagtaaattaaagcctttccttttttgtatgcttatagacctcaggggtcacattctgttcctgagaatagtagctaccattggcaatgaagtatgtgtgcatacatcctggatctaattaggtggttgtgctgcttccatatttttggaacattattctgactttatttgttctatttgtagataagaacattcagaggaacacatctctccccatgtaattatctcatttagcattttgcctactcagagggcatggctaaatgttttaggtacagggaaaagctgactttggtggcagttctttatactgtcttctcaaattaagagggtcctctattcaggaatgtttcctgcataacgaatagacattccttgaagcatgatgaccccccacccactgcatttgaatgtagagcaacatcttacatggaaacagtgatagtataggaaacacaaaataacgtcaaataaactctaattaatagcttcacaaattcaagaagacactgtattgactaaattagtacatattactatgcaaaagtatcattcagagaacagtgttcctgaaaataaaaaaatctgatcgcctgccctcctttatccattactaataaacagacaaaccaaaagccactaccaagtagtgaaatggatatagctaaaaatcaaatatttgaccttgaaaataagtccacgatatcacccaggataccaaataaaaagtaaagtgttaaaaatacaaatgaaaaattaagagacatcaaggatccatcaatttttaaatgtagattcccaaatatccaacattcattgtaaaagaagtctcagatgaacagaaacaatggaaagaaaattactcaaagtaataggatatttccttaatctaaagacgaatgtgagactatagataaaattgccaatcaagggccaagcaagaattatgagcaaagccaagacattatattctagtgatatctgtgatctcccaaagttaatgaaagacattgtgacagtttcaggtaggagaggatgagaaaaatatttggttaatggcctaggttggtagctagctagccagatccttgttctttctttcacttattttttttattcattcaacaaatgtttatagagcacttactatgtgccaaaaattttgttaggtaataatagacacagtggagtaaaaatagtctgatgacagaagtaaacaataatcacattataaataaaaataaattacacctgtgata

SEQ ID NO: 725279 - DNA, 3508 bp, Homo sapiens
cataattgtattgtgtgtaaatatatctgtaggataagtttctatcagcgatattgttgcagtttatttagacagctttagaactgattgacttttgcttaggatttacgggctagtcagaatttgctttgcaatatttagacttggtgttgtcaattttatcagctagcttttttactctacacttgtacttaaaataattgaaatttatgtagaaaaaagtatgtttatgattgtgaatctggaattctgtagccgaagcacccacttcccaattgaataattgtttttataaccttactttaaggatttttttaatttagaaaaagtttttgataaagagagatatcttagacacatagctatcatattagaacagaccgtacctcctttctgctctgccaagaatctgtgcttcctaaagatcaatccagggcatttggcagctataggagatgtaactaatctcaaaaagaatgacagtgaccacatttacagtttatactgttcttcttttcatgtcttttggctattaaaaattatatttatataaatataaacatttttaggttatgtaaataattcacaaagttttctgaattcgcttttagattaaatttttaatattttccccattttgatagtaagaaaatgaattgtaaataaaatttccattacgtttctctatccttgaagtttctgtcttgggtaatacatatcttgtgattcatgaactgcaaagaaaaaaaatccacaggattttgtcatcagctacattctatgagcattttcagccagatttcagtacttgtttagatttatattattttgggagaatcttaatttgtagttaaaaaattaaatatgttgcaaaaccaattataaacttcctgttaatgttgaacttttgctagggaaagattctaaggggaatttcctttatccttttaaagggataaatattattcaaatcaccttagtaacagttggaccacagtcatgcaattagtttagtatcactttctaagttagatgatgttggtctggagttgacaacattgattttctgtgaagtttacaatttattattttttaaataagggggaaattttgctttttaaaacttttgcaatttatcacttagtttacgaggcaaaatagatttcaccattttgagaactgtgagttattttctatgtgaagaatatatgtggtaccattgtttttgattgggtctcatagtgcacattatgtaaaagaaaacaaatcttactgtcttttttatgatacagcaaagtgaagactgaggatcctgagtgtgcatagtgcatgcatgttatgtgttatatgtgtatgcatacatatgtgtatatatatagttttacaagtttaaaataatatcagtgacttgaaaattgtaagggcttaccagataatctctttgtaggccttggagtagcattgttttttttttttttttcctttggttattgatgggtaataatgctctggtaaatcagtcttttttttttttttgagatggagtttcgctcttgttgcccaggctggagtgcaatggtgcaatctttgctcactgcaacctctgtctcccgggttcaagtgattcttctgcctcagcctcctgagtggctgggattacaggcatgtgtcaccacgcccagctaaatttttttttttttttgagatggatttttgctcttgttgctccggctggagtgcaatggtgcaatcttggctcactgcaacctctacctctcaggttcaagcaattctcctgccgtagactccggagtggctgagattacaggcacccgccatcacacccgactaatttttgtggttttagtagagacagggtaataccatgttggtcaggctggtcttgaactcctgacctcaggcaatccacccgcctcagcctcccaaagtgctggaattacaggcatgagccaccacgcccagcctaattttgtatttttagtagagatggggttttatcatattggtcaggctggtctcgaacycctcacctcaggtgatccatccgcctcagcctcccaaagtgttgggattataggcatgatccaccacgcccggcctggtaagtcagtcttaaccttagttacttcaccctaagacagagctgggtagaaatcagaagacaagaattaggaaaaagggaagaggcagtgacccatcttaaggtttagactgtattgtttgattgcgagtaaattaaagcctttccttttttgtatgcttatagacctcaggggtcacattctgttcctgagaatagtagctaccattggcaatgaagtatgtgtgcatacatcctggatctaattaggtggttgtgctgcttccatatttttggaacattattctgactttatttgttctatttgtagataagaacattcagaggaacacatctctccccatgtaattatctcatttagcattttgcctactcagagggcatggctaaatgttttaggtacagggaaaagctgactttggtggcagttctttatactgtcttctcaaattaagagggtcctctattcaggaatgtttcctgcataacgaatagacattccttgaagcatgatgaccccccacccactgcatttgaatgtagagcaacatcttacatggaaacagtgatagtataggaaacacaaaataacgtcaaataaactctaattaatagcttcacaaattcaagaagacactgtattgactaaattagtacatattactatgcaaaagtatcattcagagaacagtgttcctgaaaataaaaaaatctgatcgcctgccctcctttatccattactaataaacagacaaaccaaaagccactaccaagtagtgaaatggatatagctaaaaatcaaatatttgaccttgaaaataagtccacgatatcacccaggataccaaataaaaagtaaagtgttaaaaatacaaatgaaaaattaagagacatcaaggatccatcaatttttaaatgtagattcccaaatatccaacattcattgtaaaagaagtctcagatgaacagaaacaatggaaagaaaattactcaaagtaataggatatttccttaatctaaagacgaatgtgagactatagataaaattgccaatcaagggccaagcaagaattatgagcaaagccaagacattatattctagtgatatctgtgatctcccaaagttaatgaaagacattgtgacagtttcaggtaggagaggatgagaaaaatatttggttaatggcctaggttggtagctagctagccagatccttgttctttctttcacttattttttttattcattcaacaaatgtttatagagcacttactatgtgccaaaaattttgttaggtaataatagacacagtggagtaaaaatagtctgatgacagaagtaaacaataatcacattataaataaaaataaattacacctgtgata

SEQ ID NO: 725280 - DNA, 927 bp, Homo sapiens
cgccaagatccaatttttgaatgatgttgattaaaatttatagttacatcttttaggtacaatattctaactttattgatttaactgaatttagccttcttataaaaccctatttccattcagtggtagaaagaaaaatcaatctcactcatgcagggtaacttcgaaaattattttaaaacttggtttcttgaaggttaacttggtttcctctgggaaacttgctcctcatgccatttttctcctttattttatcttgaggactctcattcaaggcatctgggtacaagggaagctcatggctattatggtgttggaacmaggaggctctggttggaaagaggatgctcccaaggactccaggcttgttccatctggtttaacagcttctgccctcgtgtagcaggtcctatgtggcttttgagtgtttgcaggatgaacaactgctgtctgtggttcctagaatgcccctaggccctgaattcctatgaattccaccttccctatccctgacccccagccttgtcccacccaccaacaatctctcagcatttatgcaatacaacgtgtttttcaaggagatgatagtgccaagtgggtattttttaagaaataaaatcatgactcagatacaaaaataaaatgaatgcatatcaaagatttcgttcagctcattaattaatgagggaaccagtaagatgttacaatccagttcaaagggaaattttaagtacagggcctcgaattcttcccaccaatattcagatgatgtagagcaactgccacgaggaggctccaaaacacatttgggaggagacagtgcttgtccacacagccaaccccaggaaatctcagagtgctccctgccttgaaggtttgccttagtgtagcatttactgagcatgtacatatcggaacatcatttca

SEQ ID NO: 725281 - DNA, 620 bp, Homo sapiens
cctggcggaaaaccaaagaagtctctaaccctctcccaccacaatgtcagtaattttttagatggcatttttcctcagaataattaacattatacagcagacagaattctatcaaccctacaattcacagatagcaaaaaataaccctccaaaagccagaataatggaaaacatggatgaaatcataaagtcacagtaagaatttccatagagagtaaactgattccgttgcaagccagggagttctgtraaattatcttgtgttgtctaaaatagagaagtaactaagataggatattccatgcaacatgttgtccagggtagaacagactagtagtgatcactccaggctcaagatttaaccaataacctagtaataaggatgggtaactaacaatagaaacacaccgcagaggtggcggcgcctgtaatcccagctactcaggaggctgaggcagagaattgcttgaacccaggaggcggagcttgcagtgtgcggagatcgcgccactgcactccagcctgggcgacagattgagactccgtctaagacataaaaaaaaaaaaaaaaaaaaaaaaaaaggaacacaccaggagaaaaccgtctcccttctggctcc

SEQ ID NO: 725282 - DNA, 733 bp, Homo sapiens
tgagatcaaaacacagccaaaggccaggctattcagctgagacttgattccataatagcatgttctctctgccctgcacaaaattataccctgattatgtatttccatgccattgtgcccagaaggtggttaggcagcaacagctctagcatgggtggaaggtttaggcatctgaatatttggaaaagtagagaatggggggaagggaaagtttgtctctttttctgaagcatttttctgtcaactggaaatcaaacttaccaatgcttacattatacttttctgagtgatgaatacaatgctttggatgcatagttcaagtaaggtcgataagcaatttatcttttgaaattatttctaatgagagagcattggcaatttttttcaactgttgtgatttttatgcactaattaaaatcattataatacttatatatactagacacagcagaaatagcaaattttcattgtttaaaaagacatcagagaataacaatcttcttttcctttttttcttcccttcctcttttgtttttaccttttgaaatactaaaggcaacaaaatagcaagtaatgagcaccagcattgaaactacaagtcctaggttagggtatggggtctagcaaatacttaatttccttcagtaattcacgtcatctctctgaatctgttttaycatctctaaaatgggtaaaacactatctgcactatcatacctacaatttcataaaa

SEQ ID NO: 725283 - DNA, 918 bp, Homo sapiens
tttccttaattattaaacatgttttgttttaaactggtaaataatgtttaataaaggttttattattattttaaaaacatttttaatgaagttctttccattgaagcatttctaatttattctaatgaagcatttccaaagaataaagaaaagtaataatttagggttggttatctacatcaatatcattatcaaagtctactgtctgtccttcctcttttttcctccgtcttagaccagggagcatagtagatgaacatcatgcaggccagcacactgaggcyacgtgtaagcaggtgggaagattatgtgcatgaaacagacagtcgcataccacttttggttacaaacacttgccctggatgagagcaggaattgagaccacgtttgtgtcccagtgggttccaggactttttttccatcagtttccaccctgtcctggacaggcttagaaaaacatgtttcttaccaaaaaaagttacaaaaacaatgtttacattaaaattcaaagtccatgcaactgcctctggttcctcaaggtaactactgccaatgatttggtgtgtatccttctagacattttttgtaatgcacatagggtatatatacatataagtacctatagcaattttataagtgacctgttgtacatgaggtaactttatagacttaatgtaatgtgcgtatcttcccatgtgggtaaatatgatagagcagtgccaatctgcttaatggctgcttactactccacttatgtatactatcagtggatattgagatagtttctaattttctaccgttataaatatttcattgaacattatgtggttgtatttttatatgcttcttcaagtatatctggatgacacatttctaaaatggaattgttaggtaaaagaggacattgtacatttagat

SEQ ID NO: 725284 - DNA, 1196 bp, Homo sapiens
aagggttcaaaggtaacatactcctctaccccatcccctgtcctggtcaaggtatctcttactggctggaacattctttttcctattaccttatcccattggggagtgggaagtaaaggatcagacagggtatagcttctggtacctccagtctaggactaagactctgagagacacgaaaatatactagttatggactccttagagtgagtgcacagggagtattattttagtggtaaggcagtgcaatgggtctaggactgtcagtaagggtgggtgatgagttttacactagatatgtggtatcagtggaagcagctgatattgatgctaattataggtgctggcaaactaaaaagaaaagagagaaactattacaatatggtttggctgataaaaataatgttaattgtagtcttctgactcatttatttatttctatcctggcttcctctaaaaagaaatttgaggtggttaattgcagtcattacatcaacttattataatttatgttcagttacaattatacacaattaaccatgttaaaaatgtcagattaatgtatcaaagtttcatttgctagcaacacttaggtgtctatgctgagtacagtgtgtgttgtatatgcataaaggtcagttattaccataaaagcgtggtcatctgatggcttcttgttataggtttcattgggaggctgaggcgggtggatcacgaggtcaggagatcgagaccatcctgaccaacatggtgaaaccctgtctctactaaaaaatacaaaaaattagctgggcgtggtggcatgcgcctgtagtcccagctactcaggaggctgaggcaggggaattgcttgaacctgggagacggaggttgcrgtgagccgagatcacgccactgcactccagcctggtgacagagcaagactctatctcaaaaaaaaaaaaaaaaaattagctgggcatggtggcactttcctgtaatcgcagctactcgagaggcagaggtaggagaattgcttgaacgctaggggcagatgttgcagtgagctgagatcacaccactgcactcgagcctgggagtgagagactgtctcaaaaaaaaaaaaaagagagagagaggaatgaaagtccctgacctcagggagctcaagtccagagaggaagaaacataagtagtaccatttgataagtgaatgg

SEQ ID NO: 725285 - DNA, 1196 bp, Homo sapiens
aagggttcaaaggtaacatactcctctaccccatcccctgtcctggtcaaggtatctcttactggctggaacattctttttcctattaccttatcccattggggagtgggaagtaaaggatcagacagggtatagcttctggtacctccagtctaggactaagactctgagagacacgaaaatatactagttatggactccttagagtgagtgcacagggagtattattttagtggtaaggcagtgcaatgggtctaggactgtcagtaagggtgggtgatgagttttacactagatatgtggtatcagtggaagcagctgatattgatgctaattataggtgctggcaaactaaaaagaaaagagagaaactattacaatatggtttggctgataaaaataatgttaattgtagtcttctgactcatttatttatttctatcctggcttcctctaaaaagaaatttgaggtggttaattgcagtcattacatcaacttattataatttatgttcagttacaattatacacaattaaccatgttaaaaatgtcagattaatgtatcaaagtttcatttgctagcaacacttaggtgtctatgctgagtacagtgtgtgttgtatatgcataaaggtcagttattaccataaaagcgtggtcatctgatggcttcttgttataggtttcattgggaggctgaggcgggtggatcacgaggtcaggagatcgagaccatcctgaccaacatggtgaaaccctgtctctactaaaaaatacaaaaaattagctgggcgtggtggcatgcgcctgtagtcccagctactcaggaggctgaggcaggggaattgcttgaacctgggagacggaggttgcagtgagccgagatcacgccactgcactccagcctggtgacagagcaagactctatctcaaaaaaaaaaaaaaaaaattagctgggcatggtggcactttcctgtaatcgcagctactcgagaggcagaggtaggagaattgcttgaacgctaggggcagatgttgcagtgagctgagatcacaccactgcactcgagcctgggagtgagagactgtctcaaaaaaaaaaaaaaragagagagaggaatgaaagtccctgacctcagggagctcaagtccagagaggaagaaacataagtagtaccatttgataagtgaatgg

SEQ ID NO: 725286 - DNA, 2202 bp, Homo sapiens
acaatgagattcrgtacactggccaagatctctcagacaggatgtggagggcctagaatacgcgtccaagccaatggctcttaaacccgtgcttccaccagcctcctgtctgagctttctctctctctctctctctctctctctctctctctctctctctctctctctctctctctcgactcctacagatcctcagggctttggctcattttttcaagcagtcatccctgtttcttggttctaacatagagaaaaacaaagtagtcatgacagactttacagcatttaaagtcttaagattagagaaaaccatttcagaaagaaattatctgtgatatttctaagaaacacatgaaagcttttaacaaagtcttaaactaatagccttgagatctatctgcaatggacttgggaggagtaaactgaaaacgagtgaaaacatctttcacgtccaagggctaaatccctgtttctcattaagacaatgtagttctaaggccatgccgggagagctgtgacttagttgtcaatcttcaaccatcacgctctcaatcttttctctcgtagcaaagctttaactggagatgcgtatgttctacctcttgatataaattgttttaattgcttattaaggtttaaaatgtacaactgtgaaagcaagaagaatgcaaatttcctgtcagcattctttcttccgagaaagctcccagcaagtttagcacccatagagatttaactttatcaaatgtaacatgggaaggggagaatagccaatatatctaagacctggaaataggcttaatccacccactgaccctgggaagcattctagagagtggtcatttggccattttaataacagtcttgcaatgtaaatgctcatctattgaaatagaacatttctgagcactagaattaattctaagtgaatctgtcagaaataccttagagtaacatttccaaaggctctaatagtcaaatttaggaaatattatattttgaagaaattcacaatgtatattagtgtattaaagactctgaaagtttctgcaacaaagggaccagtttggaatcattcgatacatttaaatacactttggggaaatattgtcctacatggaaattggaaatatctttaccttaccaggttaatgcttacatttatacatttataattttccctgactctcaccccaactcataaagcctttagatatgtaggaatgttgagtcaattacagtcagtcttcatttttggcagatttcatatttgcaaatttgctaactcactaaaatgtatttgtaatccaaaaatcaatattcagagtgcttttgtgctcagacaagcacagagaggcaaaaactttgtcacccaacatgcatgttcccagctggggttgaatgttctgctgtgtttcaactctcatactgcaaatgagtgttcttttctccaaatagcaaatgccacatttttcacatttttgtggtttttgttggtgatttagctgttcaaaatgtcccccaaacctcctagtgctaaagttctgtctggtattcctaagggcaagaaggctgtgatgtgttttacatagaaaatatgtatgttagattagcttcattcaggcataagttatagtactattggcatatatagatatacatatagtatattatgtattttaaaacatgtgtatatttatataaaatatatatgacagtagcatggtaactcatgatggaatgcccatattttattaatatataatattaatgaatcaactatatgttcaataagctgtctttaaacagacacatttaaaacaaggctatgtattgtgttggttgacaaaaatatgactagaggctcacaggaacctacgcttgtatttcccctaggagcaggtgttcaagattggcaaattcagtgctgatgataactttatagaacataactactgtaaataatgagaactgactgtcttgtgttaataagttttaaattttcttcaacacataagaacaaggaaccaataggaaaactttatatgtgtcactctgtcttcgggaacttataatttaagaatagctgaatagaatcaaaagtataacatttactgagcactcactaagtgctaggcactgttttaagttcttcacatgtatacatcattaaatccttagaataacttgtggaggggaaac

SEQ ID NO: 725287 - DNA, 2202 bp, Homo sapiens
acaatgagattcggtacactggccaagatctctcagacaggatgtggagggcctagaatacgcgtccaagccaatggctcttaaacccgtgcttccaccagcctcctgtctgagctttctctctctctctctctctctctctctctctctctctctctctctctctctctctctctcgactcctacagatcctcagggctttggctcattttttcaagcagtcatccctgtttcttggttctaacatagagaaaaacaaagtagtcatgacagactttacagcatttaaagtcttaagattagagaaaaccatttcagaaagaaattatctgtgatatttctaagaaacacatgaaagcttttaacaaagtcttaaactaatagccttgagatctatctgcaatggacttgggaggagtaaactgaaaacgagtgaaaacatctttcacgtccaagggctaaatccctgtttctcattaagacaatgtagttctaaggccatgccgggagagctgtgacttagttgtcaatcttcaaccatcacgctctcaatcttttctctcgtagcaaagctttaastggagatgcgtatgttctacctcttgatataaattgttttaattgcttattaaggtttaaaatgtacaactgtgaaagcaagaagaatgcaaatttcctgtcagcattctttcttccgagaaagctcccagcaagtttagcacccatagagatttaactttatcaaatgtaacatgggaaggggagaatagccaatatatctaagacctggaaataggcttaatccacccactgaccctgggaagcattctagagagtggtcatttggccattttaataacagtcttgcaatgtaaatgctcatctattgaaatagaacatttctgagcactagaattaattctaagtgaatctgtcagaaataccttagagtaacatttccaaaggctctaatagtcaaatttaggaaatattatattttgaagaaattcacaatgtatattagtgtattaaagactctgaaagtttctgcaacaaagggaccagtttggaatcattcgatacatttaaatacactttggggaaatattgtcctacatggaaattggaaatatctttaccttaccaggttaatgcttacatttatacatttataattttccctgactctcaccccaactcataaagcctttagatatgtaggaatgttgagtcaattacagtcagtcttcatttttggcagatttcatatttgcaaatttgctaactcactaaaatgtatttgtaatccaaaaatcaatattcagagtgcttttgtgctcagacaagcacagagaggcaaaaactttgtcacccaacatgcatgttcccagctggggttgaatgttctgctgtgtttcaactctcatactgcaaatgagtgttcttttctccaaatagcaaatgccacatttttcacatttttgtggtttttgttggtgatttagctgttcaaaatgtcccccaaacctcctagtgctaaagttctgtctggtattcctaagggcaagaaggctgtgatgtgttttacatagaaaatatgtatgttagattagcttcattcaggcataagttatagtactattggcatatatagatatacatatagtatattatgtattttaaaacatgtgtatatttatataaaatatatatgacagtagcatggtaactcatgatggaatgcccatattttattaatatataatattaatgaatcaactatatgttcaataagctgtctttaaacagacacatttaaaacaaggctatgtattgtgttggttgacaaaaatatgactagaggctcacaggaacctacgcttgtatttcccctaggagcaggtgttcaagattggcaaattcagtgctgatgataactttatagaacataactactgtaaataatgagaactgactgtcttgtgttaataagttttaaattttcttcaacacataagaacaaggaaccaataggaaaactttatatgtgtcactctgtcttcgggaacttataatttaagaatagctgaatagaatcaaaagtataacatttactgagcactcactaagtgctaggcactgttttaagttcttcacatgtatacatcattaaatccttagaataacttgtggaggggaaac

SEQ ID NO: 725288 - DNA, 650 bp, Homo sapiens
gcccatcaatcaatgagtggatacagaaactgtgtgtatatatatatatacacgatggaatactactcagctataaaaggcatgaattaacggcatttgcagcaacctggatgagattggagactattattctaagttaagtaactcaggaatggaaaaccaaacatcatatgttctcactgttaggtgggggctaagctatgaggacgtaaaggcataagaatgatacaatgaactttggggatgagtgggagggggtgagggataaaagactacaaatatggtgcagtgtatactgctcgagtgatgggtgcaccaggatctcacaaatcaccactaaagaacttastcatgtacccaaataccacctgtatcccaataacctatggaaaaataaaattaaaataaaataaatgtaacatcaaagttgggttcaatccaggaatgcaaagtttatttattatttgaatatgaatgtaattcaacacattaacagattgtctctataggcattataaaaacaattgataaaattaaactttcattcatggtttgaaaggaaaacaaaacaaaacaacatctttgggcaaactagaagacttggttagtttaagccttaagaaaaatcccaatttagaatatgtttctca

SEQ ID NO: 725289 - DNA, 650 bp, Homo sapiens
gcccatcaatcaatgagtggatacagaaactgtgtgtatatatatatatacacgatggaatactactcagctataaaaggcatgaattaacggcatttgcagcaacctggatgagattggagactattattctaagttaagtaactcaggaatggaaaaccaaacatcatatgttctcactgttaggtgggggctaagctatgaggacgtaaaggcataagaatgatacaatgaactttggggatgagtgggagggggtgagggataaaagactacaaatatggtgcagtgtatactgctcgagtgatgggtgcaccaggatctcacaaatcaccactaaagaacttactcatgtacccaaataccacctgtatccmaataacctatggaaaaataaaattaaaataaaataaatgtaacatcaaagttgggttcaatccaggaatgcaaagtttatttattatttgaatatgaatgtaattcaacacattaacagattgtctctataggcattataaaaacaattgataaaattaaactttcattcatggtttgaaaggaaaacaaaacaaaacaacatctttgggcaaactagaagacttggttagtttaagccttaagaaaaatcccaatttagaatatgtttctca

SEQ ID NO: 725290 - DNA, 1235 bp, Homo sapiens
tgaagcactgtgttgggaaggattctgaggccagatctgtactcagaggaaaggtactaatattagagcggtccatgggcatgagcaatgcacacattgtccatccttgaaagatttagagtcttactcttgagtccaaaaggccagttcacaaggacatcagtatggaaggttggtgttgcaataatacatatgaagatttggagtttggaccaactacaggctcaatatgagccagcaacatgagagcattgccagagatggcagcatgggtggaggcatgttgtccaaggctagggaagcacgatctgcyctgtactggcaggattgtggcaggagtgttgggtttcattctagatgcatgcttggagagaactgttagtcaacagctagagagcagtgcactcgataaagggcttttgaatctatgtttcatggagaaaaacaaggatgttcaaactgaagagaaaactttcagggaatccagatacccacccttcttggtaatacctgttgcccccaaggtgagcttcccagattcttagcaaccactaacttatctaatgaggtaacccacagaagctctccagtgcatttacctgcctgccactatcctggtgggcctgctgcacccagatgtcaagctggtaggctgggatcaattagcaattgtaattaaaactgaatgtaattaaccacataacagtgagatgttcttgattaatttcctgaagttaagagactactataatgttctgacagaagacaataaataattcaaaaactcctaaatttggttatgcatttgagtttcatccaaataattgttcaccaagccattgttactgaataaaaatgcattggcccacacacataggttaacaatcttaattaatgatcttgtggcccactaccaaaaggcttgaatgcccctgctgactttaagtgcttagaaaatagatagctgatggctgtacaaccatgtaaatgtgcttaacaccactgaactgtggacttaaaaacggctaaaatggtaaatgttatgtcatgtatattttaccacaaaaaaaaaaaatgttcaggccaagaacaatagttcatatctgaatcccagcactttgggaggtcggggccggaggactgcttgaggtcaggagctcgagaccagcctgggcaatagagtgacaccttgtctctaacttagaaaaataaacaaagtttttaaaaatagcaca

SEQ ID NO: 725291 - DNA, 1235 bp, Homo sapiens
tgaagcactgtgttgggaaggattctgaggccagatctgtactcagaggaaaggtactaatattagagcggtccatgggcatgagcaatgcacacattgtccatccttgaaagatttagagtcttactcttgagtccaaaaggccagttcacaaggacatcagtatggaaggttggtgttgcaataatacatatgaagatttggagtttggaccaactacaggctcaatatgagccagcaacatgagagcattgccagagatggcagcatgggtggaggcatgttgtccaaggctagggaagcacgatctgccctgtactggcaggattgtggcaggagtgttgggtttcattcyagatgcatgcttggagagaactgttagtcaacagctagagagcagtgcactcgataaagggcttttgaatctatgtttcatggagaaaaacaaggatgttcaaactgaagagaaaactttcagggaatccagatacccacccttcttggtaatacctgttgcccccaaggtgagcttcccagattcttagcaaccactaacttatctaatgaggtaacccacagaagctctccagtgcatttacctgcctgccactatcctggtgggcctgctgcacccagatgtcaagctggtaggctgggatcaattagcaattgtaattaaaactgaatgtaattaaccacataacagtgagatgttcttgattaatttcctgaagttaagagactactataatgttctgacagaagacaataaataattcaaaaactcctaaatttggttatgcatttgagtttcatccaaataattgttcaccaagccattgttactgaataaaaatgcattggcccacacacataggttaacaatcttaattaatgatcttgtggcccactaccaaaaggcttgaatgcccctgctgactttaagtgcttagaaaatagatagctgatggctgtacaaccatgtaaatgtgcttaacaccactgaactgtggacttaaaaacggctaaaatggtaaatgttatgtcatgtatattttaccacaaaaaaaaaaaatgttcaggccaagaacaatagttcatatctgaatcccagcactttgggaggtcggggccggaggactgcttgaggtcaggagctcgagaccagcctgggcaatagagtgacaccttgtctctaacttagaaaaataaacaaagtttttaaaaatagcaca

SEQ ID NO: 725292 - DNA, 1235 bp, Homo sapiens
tgaagcactgtgttgggaaggattctgaggccagatctgtactcagaggaaaggtactaatattagagcggtccatgggcatgagcaatgcacacattgtccatccttgaaagatttagagtcttactcttgagtccaaaaggccagttcacaaggacatcagtatggaaggttggtgttgcaataatacatatgaagatttggagtttggaccaactacaggctcaatatgagccagcaacatgagagcattgccagagatggcagcatgggtggaggcatgttgtccaaggctagggaagcacgatctgccctgtactggcaggattgtggcaggagtgttgggtttcattctagatgcatgcttggagagaactgttagtcaacagctagagagcagtgcactcgataaagggcttttgaatctatgtttcatggagaaaaacaaggatgttcaaactgaagagaaaactttcagggaatccagatacccacccttcttggtaatacctgttgcccccaaggtgagcttcccagattcttagcaaccactaacttatctaatgaggtaacccacagaagctctccagtgcatttacctgcctgccactatcctggtgggcctgctgcacccagatgtcaagctggtaggctgggatcaattagcaattgtaattaaaactgaatgtaattaaccacataacagtgagatgttcttgattaatttcctgaagttaagagactactataatgttctgacagaagacaataaataattcaaaaactcctaaatttggttatgcatttgagtttcatccaaataattgttcaccaagccattgttactgaataaaaatgcattggcccayacacataggttaacaatcttaattaatgatcttgtggcccactaccaaaaggcttgaatgcccctgctgactttaagtgcttagaaaatagatagctgatggctgtacaaccatgtaaatgtgcttaacaccactgaactgtggacttaaaaacggctaaaatggtaaatgttatgtcatgtatattttaccacaaaaaaaaaaaatgttcaggccaagaacaatagttcatatctgaatcccagcactttgggaggtcggggccggaggactgcttgaggtcaggagctcgagaccagcctgggcaatagagtgacaccttgtctctaacttagaaaaataaacaaagtttttaaaaatagcaca

SEQ ID NO: 725293 - DNA, 1235 bp, Homo sapiens
tgaagcactgtgttgggaaggattctgaggccagatctgtactcagaggaaaggtactaatattagagcggtccatgggcatgagcaatgcacacattgtccatccttgaaagatttagagtcttactcttgagtccaaaaggccagttcacaaggacatcagtatggaaggttggtgttgcaataatacatatgaagatttggagtttggaccaactacaggctcaatatgagccagcaacatgagagcattgccagagatggcagcatgggtggaggcatgttgtccaaggctagggaagcacgatctgccctgtactggcaggattgtggcaggagtgttgggtttcattctagatgcatgcttggagagaactgttagtcaacagctagagagcagtgcactcgataaagggcttttgaatctatgtttcatggagaaaaacaaggatgttcaaactgaagagaaaactttcagggaatccagatacccacccttcttggtaatacctgttgcccccaaggtgagcttcccagattcttagcaaccactaacttatctaatgaggtaacccacagaagctctccagtgcatttacctgcctgccactatcctggtgggcctgctgcacccagatgtcaagctggtaggctgggatcaattagcaattgtaattaaaactgaatgtaattaaccacataacagtgagatgttcttgattaatttcctgaagttaagagactactataatgttctgacagaagacaataaataattcaaaaactcctaaatttggttatgcatttgagtttcatccaaataattgttcaccaagccattgttactgaataaaaatgcattggcccacacacataggttaacaatcttaattaatgatcttgtggcccactaccaaaaggcttgaatgcccctgctgactttaagtgcttagaaaatagatagctgatggctgtacaaccatgtaaatgtgcttaacaccactgaactgtggacttaaaaacggctaaaatggtaaatgttatgtcatgtatattttaccmcaaaaaaaaaaaatgttcaggccaagaacaatagttcatatctgaatcccagcactttgggaggtcggggccggaggactgcttgaggtcaggagctcgagaccagcctgggcaatagagtgacaccttgtctctaacttagaaaaataaacaaagtttttaaaaatagcaca

SEQ ID NO: 725294 - DNA, 631 bp, Homo sapiens
taaccctatgagatgggtattggtactgtatcatcattttacakaggaggaaatgaggttcagagaaattcaaagtagcttctccaacatcccatagctgataagagtcagagataagattacaacccagatctgtttgactccagcgctcaaactcattccaccatacatgctggctgtcccaagagcccacgtacagagttctctgcttgggattcagaatctgactcatagtctctgacctaaaaggaacgtttgagaatctcagttattacagtatgttctccaagcccactcttgtacactctgccttgtgatactggggatgggaccctgcacagcccatttctcctttgccagctgctctcttgaggtgttttctaggggtggggagtcctaaagggatacctaaaggagggagacgccatcggctacttcctgcctgcttcccatttaggtcagcatggccccagaaaggtttcttctttagaactcctatagcagtctgttgccacagcacagggattctgattgcagttttctcagcaccagccatgttgtaccactctccttccccctccccagaggcatcaggacccacctgagctaagaggtgcatccccttctccaa

SEQ ID NO: 725295 - DNA, 631 bp, Homo sapiens
taaccctatgagatgggtattggtactgtatcatcattttacataggaggaaatgaggttcagagaaattcaaagtagcttctccaacatcccatagctgataagagtcagagataagattacaacccagatctgtttgactccagcgctcaaactcattccaccatacatgctggctgtcccaagagcccacgtacagagttctctgcttgggattcagaatctgactcatagtctctgacctaaaaggaacgtttgagaatctcagttattacagtatgttctccaagcccactcttrtacactctgccttgtgatactggggatgggaccctgcacagcccatttctcctttgccagctgctctcttgaggtgttttctaggggtggggagtcctaaagggatacctaaaggagggagacgccatcggctacttcctgcctgcttcccatttaggtcagcatggccccagaaaggtttcttctttagaactcctatagcagtctgttgccacagcacagggattctgattgcagttttctcagcaccagccatgttgtaccactctccttccccctccccagaggcatcaggacccacctgagctaagaggtgcatccccttctccaa

SEQ ID NO: 725296 - DNA, 631 bp, Homo sapiens
taaccctatgagatgggtattggtactgtatcatcattttacataggaggaaatgaggttcagagaaattcaaagtagcttctccaacatcccatagctgataagagtcagagataagattacaacccagatctgtttgactccagcgctcaaactcattccaccatacatgctggctgtcccaagagcccacgtacagagttctctgcttgggattcagaatctgactcatagtctctgacctaaaaggaacgtttgagaatctcagttattacagtatgttctccaagcccactcttgtacactctgccttgtgatactggggatgggaccctgcacagcccatttctcctttgccagctgctctcttgaggtgttttctaggggtggggagtcctaaagggatacctaaaggagggagaygccatcggctacttcctgcctgcttcccatttaggtcagcatggccccagaaaggtttcttctttagaactcctatagcagtctgttgccacagcacagggattctgattgcagttttctcagcaccagccatgttgtaccactctccttccccctccccagaggcatcaggacccacctgagctaagaggtgcatccccttctccaa

SEQ ID NO: 725297 - DNA, 655 bp, Homo sapiens
ggactttgtgtcctctttctagtcaactttgctgtgactttttggcctttatctattttctctccattattaaaaagtgtaatggccagtactggacacagaacacatttaaggtgtaagctgatgaatagacactggaaggcgtattttagagtccttgcaagtcacactcctcccagggcatttcacaatgattttccttttattcctgatgactatacttcattgctgactcacattccattcatctgctctgacccctgctaggattattgtgacttggtccttggttgtctcttcctatctctatttatccatgtctggttttgtccccagataccccagcttgatctgtccttatttttttctgctcttggagggggtgtatcctggttgtcaagcctgcttttggcttttattcttgtctgtcagagtttctgcartcgtgtctctttttgtcacagctttggatttgaggagcttattcttgatagaaatagcctgtttgttggctggcttgattcgaataggagctgtcactgtggcaatccttaaggaattgagtggaatattagttccagcaggagatgcacgtagttgtgtctacagagtgtggtaaagccagtgagaagttgccttctttccattttatcgg

SEQ ID NO: 725298 - DNA, 825 bp, Homo sapiens
gtatttggagtgacaaataggtagactggtaaaatcagaagttatgattacatgtcttcaattgcataccttaagcagaagccttttayggtactattatagacacttaagtgcctctctgtccccatacctgtaaagggataaaataaaggaatcacctccaaactttgggcatattcctgtaagaaagaaaagaagtatgagaaaaagtgtaactgacgctattatatatcctccatatcatgattcattttatttttccacaaaaaaagtcaagtaaaaataatgtttctcaaattgttttggtcattgatattatgtgtgtattatgtatgaaaaaaaaattttaaaaattggaagccactttagaaccaatgaagtaacctgggaaccattgtcagaactggttttattttttaattgaaaaggatacaaatctaaatttgcatacatttcaaatttacatttgccattggcatattatttataaaaatttggaaacttctgaattattcctaatgaataagtaattgatttcgtaaaatatatactttacttaagtaaaattagtctaaattggttgtgtgaatagttcctttctaaagaaaatgctgatcatttttagtttactaatgttaagggtaaatatttgaaactgaaggaaaacattgtcaaattatcagacataaataaatatttaaaagaaaaatttgctttgaatttacatttcatgattaaagtgaaatgttgaaaaataattaaaatgttcataaaataatacattttatgggcaaaataaatcatactcttccaccaccctgtcac

SEQ ID NO: 725299 - DNA, 825 bp, Homo sapiens
gtatttggagtgacaaataggtagactggtaaaatcagaagttatgattacatgtcttcaattgcataccttaagcagaagccttttacggtactattatagacacttaagtgcctctctgtccccatacctgtaaagggataaaataaaggaatcacctccaaactttgggcatattcctgtaagaaagaaaagaagtatgagaaaaagtgtaactgacgctattatatatcctccatatcatgattcattttatttttccacaaaaaaagtcaagtaaaaataatgtttctcaaattgttttggtcattgatattatgtgtgtattatgtatgaaaaaaaaattttaaaaattkgaagccactttagaaccaatgaagtaacctgggaaccattgtcagaactggttttattttttaattgaaaaggatacaaatctaaatttgcatacatttcaaatttacatttgccattggcatattatttataaaaatttggaaacttctgaattattcctaatgaataagtaattgatttcgtaaaatatatactttacttaagtaaaattagtctaaattggttgtgtgaatagttcctttctaaagaaaatgctgatcatttttagtttactaatgttaagggtaaatatttgaaactgaaggaaaacattgtcaaattatcagacataaataaatatttaaaagaaaaatttgctttgaatttacatttcatgattaaagtgaaatgttgaaaaataattaaaatgttcataaaataatacattttatgggcaaaataaatcatactcttccaccaccctgtcac

SEQ ID NO: 725300 - DNA, 825 bp, Homo sapiens
gtatttggagtgacaaataggtagactggtaaaatcagaagttatgattacatgtcttcaattgcataccttaagcagaagccttttacggtactattatagacacttaagtgcctctctgtccccatacctgtaaagggataaaataaaggaatcacctccaaactttgggcatattcctgtaagaaagaaaagaagtatgagaaaaagtgtaactgacgctattatatatcctccatatcatgattcattttatttttccacaaaaaaagtcaagtaaaaataatgtttctcaaattgttttggtcattgatattatgtgtgtattatgtatgaaaaaaaaattttaaaaattggaagccactttagaaccaatgaagtaacctgggaaccattgtcagaactggytttattttttaattgaaaaggatacaaatctaaatttgcatacatttcaaatttacatttgccattggcatattatttataaaaatttggaaacttctgaattattcctaatgaataagtaattgatttcgtaaaatatatactttacttaagtaaaattagtctaaattggttgtgtgaatagttcctttctaaagaaaatgctgatcatttttagtttactaatgttaagggtaaatatttgaaactgaaggaaaacattgtcaaattatcagacataaataaatatttaaaagaaaaatttgctttgaatttacatttcatgattaaagtgaaatgttgaaaaataattaaaatgttcataaaataatacattttatgggcaaaataaatcatactcttccaccaccctgtcac

SEQ ID NO: 725301 - DNA, 3393 bp, Homo sapiens
  misc_feature 2330, 2331, 2332, 2333, 2334, 2335, 2336, 2337, 2338, 2339,2340, 2341, 2342, 2343, 2344, 2345, 2346, 2347, 2348, 2349,2350, 2351, 2352, 2353, 2354, 2355, 2356, 2357, 2358, 2359,2360, 2361, 2362, 2363, 2364, 2365, 2366, 2367, 2368: n = A,T,C or G
  misc_feature 2369, 2370, 2371, 2372, 2373, 2374, 2375, 2376, 2377, 2378,2379, 2380, 2381, 2382, 2383, 2384, 2385, 2386, 2387, 2388,2389, 2390, 2391, 2392, 2393, 2394, 2395, 2396, 2397, 2398,2399, 2400, 2401, 2402, 2403, 2404, 2405, 2406, 2407: n = A,T,C or G
  misc_feature 2408, 2409, 2410, 2411, 2412, 2413, 2414, 2415, 2416, 2417,2418, 2419, 2420, 2421, 2422, 2423, 2424, 2425, 2426, 2427,2428, 2429: n = A,T,C or G
aattattattatacttcaagttttagggtacatgtgcacaatgtgcaggttagttacatatgtatacatgtgccatgttggtgcactkcacccactaactcgtcatctagcattaggtatatctcccaatgctatccctccccactccccccaccccacaacagtccccagtgttcaggccacagcagagacactggtggaattggaggagactgaaaagacatattatctaaatgtaatgtgggctctgggaccagaccgggaacagaaaatggacattggcagaaatatcagtgaaataaatacaaataaaaccagcaatttaatttctgacattgcaccagtggcaatctgagtttgcttagtggagttctctgtactctctttgcaacagccctgtgagtctaaatgtgttttagataattttattttttaaaaaaacggcatataagtaccctcaaagctggcttcttctctaaggaagtgttgtaagaattgaatgagcttgtagatcaggtatcatttttatatgtttaattaattgtaattctaatagtaattcatgttttatttaatctgatttaaaaatcttctgttactcaacagcaattgcctgtgcattatttaattgacagtccgtgccacaactgtgtgtctccatgtttatgtgtagagagacattttaggagttattaatttgtttaaggtgttgttagcctttttaattaattaattttaatatgtaatgccagttcaatgctcatttggaagaggaaaccataagcatccaaattaaaatcaatcttatgatattgctgaaatctttttaagtacatgtttttacttctattaaccatgagttaaaaattaaattgcatttctaaaatgtattaattccgcacttgtgtaataagactaacctcataagcaacaggtcatcagagattcattgtgcataattcctattcaatatggggtttgacactcatttttcccatttctcctgaatatgtcagtgagctctcccatccctacgtatgttctatttggctaaaagacatgagacagaatgagtctcattcctttattttaaattgaaaagatagacctggtaagaggtcatttcatttgaattacatagtgtcaaggtcggggattaaagagaatttttagtttaatattttacctggcacccaatacactaaccatgggaaagagaaaatttattcactctttttagacagaacagaatgttaggaatttgtaacaatacgtttgggtcagtctaaacatagtgacaataattagcttattcatctaaccagtcagttcagtgaatcaacttgtttagcattttcttcttatccttatatgatggggtgtcttcctgcatttattcaattcattattttccacagcattgccttctccaaggaagataataaacccgtgtttgctgttattttttcctttgtttgttttgtttcattttgttttgatagtcattatttgcatgttttgtgttttatcaatgagccaaacagtaaattgaattatgttttctttttccaacccattgttttagccagttcttttacaatgaaatactgctttacagaaagaagtatttcattgtaaaagaacaaccctgatcattttatggcaaacgtatggtgatagaatcaataaatagcattcatagaaacaaaaaacgccagttaaagaaatctctctgtcccaagggtgggaggttgaggtgtgtgtctagaattttgtggtgggagctagagggatatggcagcaggctgatatgtatttaagtcttaggcttatcatgcaccgtttgaaaatgttatgcttacattgataagaaaaataattaagataaggcttcctgaaatagagatattttcaaattcttctctggactcgtgatctaactcctgaaatccctgttgtatttcaggttaatttagatttgtcgtgttccaggaacagttcaatagtcatctataaagcatcagtgtgaaggggaaggactctctgggagtcaagcaattaccttggagtccaattccggagctctctgcagttgtgaaaaggaacagaggctcctctttcatcatcgatttgtggggatggactgattaatagttttttttatttttttaacttatgtttttgcaataaattgactctcctaggtctctattttatagcactgtagctctgtataaacaaaaaatgtggtgtaaacatcattgccgaatgtaaattacacagaaaagacttgatgttttgctaaataagaggaactttgtggaagtgannnnnnnnnnnnnnnnnnnnnnnnnnnnnnnnnnnnnnnnnnnnnnnnnnnnnnnnnnnnnnnnnnnnnnnnnnnnnnnnnnnnnnnnnnnnnnnnnnnncgcaaggcgccactccccccgattcatgacctttaatttatcgacgctgcttgccttttatttcaggtgacggacatctgacgccagcccctgcttccccaacccttctatctatgtcaacgattttccgcagcccacaactttaccaactcgttgcttgagatcgaatcccaatggagctcgcactgcagcacttcaactctatggcaatagttaggactctcttcaatgggtattttttttagtaagtcaaagaacattttatcacatcagttaattccaaagtatcgcagcgttctgttctaaaagccaaggggtcagcatactctgttttgggggtaaattttactaaaatagaacaattagaactaacttttgattttgaggaataccactaagaatatccccaagaaaacatttcatcagcatggtggtggtccagtgcttggattagattttccatgtaatttgggctgtctataatctcttactaaccattatcatcaacatcaatcttgtcggcagcatagagaagtaaactaagtcaagaacgattttcctaaagactaatggaaagaagacatacattattatgaatttggataatttgtttttcaatatgatatggtttggctgtgtccccacccaaatgtcatctcaaattgtaatccgcatgtgtggacagaggaacgtggtgagaggtgattggatcgtgggggtggtttcccccatgctgttctcatgatagtgagggcactctcacaagatctggttgtttgataagtgtctggcatctcccgtttgctctctttttctgcggccttgtgaaggaaggtactggcatctccttcaccctctgccatgattgtaagtttcccgaggcctccccaaccatgtggaattatgagtccattaaactacttttctttataaatttcccagtcttgggcagttctttatagca

SEQ ID NO: 725302 - DNA, 3393 bp, Homo sapiens
  misc_feature 2330, 2331, 2332, 2333, 2334, 2335, 2336, 2337, 2338, 2339,2340, 2341, 2342, 2343, 2344, 2345, 2346, 2347, 2348, 2349,2350, 2351, 2352, 2353, 2354, 2355, 2356, 2357, 2358, 2359,2360, 2361, 2362, 2363, 2364, 2365, 2366, 2367, 2368: n = A,T,C or G
  misc_feature 2369, 2370, 2371, 2372, 2373, 2374, 2375, 2376, 2377, 2378,2379, 2380, 2381, 2382, 2383, 2384, 2385, 2386, 2387, 2388,2389, 2390, 2391, 2392, 2393, 2394, 2395, 2396, 2397, 2398,2399, 2400, 2401, 2402, 2403, 2404, 2405, 2406, 2407: n = A,T,C or G
  misc_feature 2408, 2409, 2410, 2411, 2412, 2413, 2414, 2415, 2416, 2417,2418, 2419, 2420, 2421, 2422, 2423, 2424, 2425, 2426, 2427,2428, 2429: n = A,T,C or G
aattattattatacttcaagttttagggtacatgtgcacaatgtgcaggttagttacatatgtatacatgtgccatgttggtgcactgcacccactaactcgtcatctagcattargtatatctcccaatgctatccctccccactccccccaccccacaacagtccccagtgttcaggccacagcagagacactggtggaattggaggagactgaaaagacatattatctaaatgtaatgtgggctctgggaccagaccgggaacagaaaatggacattggcagaaatatcagtgaaataaatacaaataaaaccagcaatttaatttctgacattgcaccagtggcaatctgagtttgcttagtggagttctctgtactctctttgcaacagccctgtgagtctaaatgtgttttagataattttattttttaaaaaaacggcatataagtaccctcaaagctggcttcttctctaaggaagtgttgtaagaattgaatgagcttgtagatcaggtatcatttttatatgtttaattaattgtaattctaatagtaattcatgttttatttaatctgatttaaaaatcttctgttactcaacagcaattgcctgtgcattatttaattgacagtccgtgccacaactgtgtgtctccatgtttatgtgtagagagacattttaggagttattaatttgtttaaggtgttgttagcctttttaattaattaattttaatatgtaatgccagttcaatgctcatttggaagaggaaaccataagcatccaaattaaaatcaatcttatgatattgctgaaatctttttaagtacatgtttttacttctattaaccatgagttaaaaattaaattgcatttctaaaatgtattaattccgcacttgtgtaataagactaacctcataagcaacaggtcatcagagattcattgtgcataattcctattcaatatggggtttgacactcatttttcccatttctcctgaatatgtcagtgagctctcccatccctacgtatgttctatttggctaaaagacatgagacagaatgagtctcattcctttattttaaattgaaaagatagacctggtaagaggtcatttcatttgaattacatagtgtcaaggtcggggattaaagagaatttttagtttaatattttacctggcacccaatacactaaccatgggaaagagaaaatttattcactctttttagacagaacagaatgttaggaatttgtaacaatacgtttgggtcagtctaaacatagtgacaataattagcttattcatctaaccagtcagttcagtgaatcaacttgtttagcattttcttcttatccttatatgatggggtgtcttcctgcatttattcaattcattattttccacagcattgccttctccaaggaagataataaacccgtgtttgctgttattttttcctttgtttgttttgtttcattttgttttgatagtcattatttgcatgttttgtgttttatcaatgagccaaacagtaaattgaattatgttttctttttccaacccattgttttagccagttcttttacaatgaaatactgctttacagaaagaagtatttcattgtaaaagaacaaccctgatcattttatggcaaacgtatggtgatagaatcaataaatagcattcatagaaacaaaaaacgccagttaaagaaatctctctgtcccaagggtgggaggttgaggtgtgtgtctagaattttgtggtgggagctagagggatatggcagcaggctgatatgtatttaagtcttaggcttatcatgcaccgtttgaaaatgttatgcttacattgataagaaaaataattaagataaggcttcctgaaatagagatattttcaaattcttctctggactcgtgatctaactcctgaaatccctgttgtatttcaggttaatttagatttgtcgtgttccaggaacagttcaatagtcatctataaagcatcagtgtgaaggggaaggactctctgggagtcaagcaattaccttggagtccaattccggagctctctgcagttgtgaaaaggaacagaggctcctctttcatcatcgatttgtggggatggactgattaatagttttttttatttttttaacttatgtttttgcaataaattgactctcctaggtctctattttatagcactgtagctctgtataaacaaaaaatgtggtgtaaacatcattgccgaatgtaaattacacagaaaagacttgatgttttgctaaataagaggaactttgtggaagtgannnnnnnnnnnnnnnnnnnnnnnnnnnnnnnnnnnnnnnnnnnnnnnnnnnnnnnnnnnnnnnnnnnnnnnnnnnnnnnnnnnnnnnnnnnnnnnnnnnncgcaaggcgccactccccccgattcatgacctttaatttatcgacgctgcttgccttttatttcaggtgacggacatctgacgccagcccctgcttccccaacccttctatctatgtcaacgattttccgcagcccacaactttaccaactcgttgcttgagatcgaatcccaatggagctcgcactgcagcacttcaactctatggcaatagttaggactctcttcaatgggtattttttttagtaagtcaaagaacattttatcacatcagttaattccaaagtatcgcagcgttctgttctaaaagccaaggggtcagcatactctgttttgggggtaaattttactaaaatagaacaattagaactaacttttgattttgaggaataccactaagaatatccccaagaaaacatttcatcagcatggtggtggtccagtgcttggattagattttccatgtaatttgggctgtctataatctcttactaaccattatcatcaacatcaatcttgtcggcagcatagagaagtaaactaagtcaagaacgattttcctaaagactaatggaaagaagacatacattattatgaatttggataatttgtttttcaatatgatatggtttggctgtgtccccacccaaatgtcatctcaaattgtaatccgcatgtgtggacagaggaacgtggtgagaggtgattggatcgtgggggtggtttcccccatgctgttctcatgatagtgagggcactctcacaagatctggttgtttgataagtgtctggcatctcccgtttgctctctttttctgcggccttgtgaaggaaggtactggcatctccttcaccctctgccatgattgtaagtttcccgaggcctccccaaccatgtggaattatgagtccattaaactacttttctttataaatttcccagtcttgggcagttctttatagca

SEQ ID NO: 725303 - DNA, 3393 bp, Homo sapiens
  misc_feature 2330, 2331, 2332, 2333, 2334, 2335, 2336, 2337, 2338, 2339,2340, 2341, 2342, 2343, 2344, 2345, 2346, 2347, 2348, 2349,2350, 2351, 2352, 2353, 2354, 2355, 2356, 2357, 2358, 2359,2360, 2361, 2362, 2363, 2364, 2365, 2366, 2367, 2368: n = A,T,C or G
  misc_feature 2369, 2370, 2371, 2372, 2373, 2374, 2375, 2376, 2377, 2378,2379, 2380, 2381, 2382, 2383, 2384, 2385, 2386, 2387, 2388,2389, 2390, 2391, 2392, 2393, 2394, 2395, 2396, 2397, 2398,2399, 2400, 2401, 2402, 2403, 2404, 2405, 2406, 2407: n = A,T,C or G
  misc_feature 2408, 2409, 2410, 2411, 2412, 2413, 2414, 2415, 2416, 2417,2418, 2419, 2420, 2421, 2422, 2423, 2424, 2425, 2426, 2427,2428, 2429: n = A,T,C or G
aattattattatacttcaagttttagggtacatgtgcacaatgtgcaggttagttacatatgtatacatgtgccatgttggtgcactgcacccactaactcgtcatctagcattaggtatatctcccaatgctatccctccccactccccccaccccacaacagtccccagtgttcaggccacagcagagacactggtggaatyggaggagactgaaaagacatattatctaaatgtaatgtgggctctgggaccagaccgggaacagaaaatggacattggcagaaatatcagtgaaataaatacaaataaaaccagcaatttaatttctgacattgcaccagtggcaatctgagtttgcttagtggagttctctgtactctctttgcaacagccctgtgagtctaaatgtgttttagataattttattttttaaaaaaacggcatataagtaccctcaaagctggcttcttctctaaggaagtgttgtaagaattgaatgagcttgtagatcaggtatcatttttatatgtttaattaattgtaattctaatagtaattcatgttttatttaatctgatttaaaaatcttctgttactcaacagcaattgcctgtgcattatttaattgacagtccgtgccacaactgtgtgtctccatgtttatgtgtagagagacattttaggagttattaatttgtttaaggtgttgttagcctttttaattaattaattttaatatgtaatgccagttcaatgctcatttggaagaggaaaccataagcatccaaattaaaatcaatcttatgatattgctgaaatctttttaagtacatgtttttacttctattaaccatgagttaaaaattaaattgcatttctaaaatgtattaattccgcacttgtgtaataagactaacctcataagcaacaggtcatcagagattcattgtgcataattcctattcaatatggggtttgacactcatttttcccatttctcctgaatatgtcagtgagctctcccatccctacgtatgttctatttggctaaaagacatgagacagaatgagtctcattcctttattttaaattgaaaagatagacctggtaagaggtcatttcatttgaattacatagtgtcaaggtcggggattaaagagaatttttagtttaatattttacctggcacccaatacactaaccatgggaaagagaaaatttattcactctttttagacagaacagaatgttaggaatttgtaacaatacgtttgggtcagtctaaacatagtgacaataattagcttattcatctaaccagtcagttcagtgaatcaacttgtttagcattttcttcttatccttatatgatggggtgtcttcctgcatttattcaattcattattttccacagcattgccttctccaaggaagataataaacccgtgtttgctgttattttttcctttgtttgttttgtttcattttgttttgatagtcattatttgcatgttttgtgttttatcaatgagccaaacagtaaattgaattatgttttctttttccaacccattgttttagccagttcttttacaatgaaatactgctttacagaaagaagtatttcattgtaaaagaacaaccctgatcattttatggcaaacgtatggtgatagaatcaataaatagcattcatagaaacaaaaaacgccagttaaagaaatctctctgtcccaagggtgggaggttgaggtgtgtgtctagaattttgtggtgggagctagagggatatggcagcaggctgatatgtatttaagtcttaggcttatcatgcaccgtttgaaaatgttatgcttacattgataagaaaaataattaagataaggcttcctgaaatagagatattttcaaattcttctctggactcgtgatctaactcctgaaatccctgttgtatttcaggttaatttagatttgtcgtgttccaggaacagttcaatagtcatctataaagcatcagtgtgaaggggaaggactctctgggagtcaagcaattaccttggagtccaattccggagctctctgcagttgtgaaaaggaacagaggctcctctttcatcatcgatttgtggggatggactgattaatagttttttttatttttttaacttatgtttttgcaataaattgactctcctaggtctctattttatagcactgtagctctgtataaacaaaaaatgtggtgtaaacatcattgccgaatgtaaattacacagaaaagacttgatgttttgctaaataagaggaactttgtggaagtgannnnnnnnnnnnnnnnnnnnnnnnnnnnnnnnnnnnnnnnnnnnnnnnnnnnnnnnnnnnnnnnnnnnnnnnnnnnnnnnnnnnnnnnnnnnnnnnnnnncgcaaggcgccactccccccgattcatgacctttaatttatcgacgctgcttgccttttatttcaggtgacggacatctgacgccagcccctgcttccccaacccttctatctatgtcaacgattttccgcagcccacaactttaccaactcgttgcttgagatcgaatcccaatggagctcgcactgcagcacttcaactctatggcaatagttaggactctcttcaatgggtattttttttagtaagtcaaagaacattttatcacatcagttaattccaaagtatcgcagcgttctgttctaaaagccaaggggtcagcatactctgttttgggggtaaattttactaaaatagaacaattagaactaacttttgattttgaggaataccactaagaatatccccaagaaaacatttcatcagcatggtggtggtccagtgcttggattagattttccatgtaatttgggctgtctataatctcttactaaccattatcatcaacatcaatcttgtcggcagcatagagaagtaaactaagtcaagaacgattttcctaaagactaatggaaagaagacatacattattatgaatttggataatttgtttttcaatatgatatggtttggctgtgtccccacccaaatgtcatctcaaattgtaatccgcatgtgtggacagaggaacgtggtgagaggtgattggatcgtgggggtggtttcccccatgctgttctcatgatagtgagggcactctcacaagatctggttgtttgataagtgtctggcatctcccgtttgctctctttttctgcggccttgtgaaggaaggtactggcatctccttcaccctctgccatgattgtaagtttcccgaggcctccccaaccatgtggaattatgagtccattaaactacttttctttataaatttcccagtcttgggcagttctttatagca

SEQ ID NO: 725304 - DNA, 3393 bp, Homo sapiens
  misc_feature 2330, 2331, 2332, 2333, 2334, 2335, 2336, 2337, 2338, 2339,2340, 2341, 2342, 2343, 2344, 2345, 2346, 2347, 2348, 2349,2350, 2351, 2352, 2353, 2354, 2355, 2356, 2357, 2358, 2359,2360, 2361, 2362, 2363, 2364, 2365, 2366, 2367, 2368: n = A,T,C or G
  misc_feature 2369, 2370, 2371, 2372, 2373, 2374, 2375, 2376, 2377, 2378,2379, 2380, 2381, 2382, 2383, 2384, 2385, 2386, 2387, 2388,2389, 2390, 2391, 2392, 2393, 2394, 2395, 2396, 2397, 2398,2399, 2400, 2401, 2402, 2403, 2404, 2405, 2406, 2407: n = A,T,C or G
  misc_feature 2408, 2409, 2410, 2411, 2412, 2413, 2414, 2415, 2416, 2417,2418, 2419, 2420, 2421, 2422, 2423, 2424, 2425, 2426, 2427,2428, 2429: n = A,T,C or G
aattattattatacttcaagttttagggtacatgtgcacaatgtgcaggttagttacatatgtatacatgtgccatgttggtgcactgcacccactaactcgtcatctagcattaggtatatctcccaatgctatccctccccactccccccaccccacaacagtccccagtgttcaggccacagcagagacactggtggaattggaggagactgaaaagacatattatctaaatgtaatgtgggctctgggaccagaccgggaacagaaaatggacattggcagaaatatcagtgaaataaatacaaataaaaccagcaatttaatttctgacattgcaccagtggcaatctgagtttgcttagtggagttctctgtactctctttgcaacagccctgtgagtctaaatgtgtttyagataattttattttttaaaaaaacggcatataagtaccctcaaagctggcttcttctctaaggaagtgttgtaagaattgaatgagcttgtagatcaggtatcatttttatatgtttaattaattgtaattctaatagtaattcatgttttatttaatctgatttaaaaatcttctgttactcaacagcaattgcctgtgcattatttaattgacagtccgtgccacaactgtgtgtctccatgtttatgtgtagagagacattttaggagttattaatttgtttaaggtgttgttagcctttttaattaattaattttaatatgtaatgccagttcaatgctcatttggaagaggaaaccataagcatccaaattaaaatcaatcttatgatattgctgaaatctttttaagtacatgtttttacttctattaaccatgagttaaaaattaaattgcatttctaaaatgtattaattccgcacttgtgtaataagactaacctcataagcaacaggtcatcagagattcattgtgcataattcctattcaatatggggtttgacactcatttttcccatttctcctgaatatgtcagtgagctctcccatccctacgtatgttctatttggctaaaagacatgagacagaatgagtctcattcctttattttaaattgaaaagatagacctggtaagaggtcatttcatttgaattacatagtgtcaaggtcggggattaaagagaatttttagtttaatattttacctggcacccaatacactaaccatgggaaagagaaaatttattcactctttttagacagaacagaatgttaggaatttgtaacaatacgtttgggtcagtctaaacatagtgacaataattagcttattcatctaaccagtcagttcagtgaatcaacttgtttagcattttcttcttatccttatatgatggggtgtcttcctgcatttattcaattcattattttccacagcattgccttctccaaggaagataataaacccgtgtttgctgttattttttcctttgtttgttttgtttcattttgttttgatagtcattatttgcatgttttgtgttttatcaatgagccaaacagtaaattgaattatgttttctttttccaacccattgttttagccagttcttttacaatgaaatactgctttacagaaagaagtatttcattgtaaaagaacaaccctgatcattttatggcaaacgtatggtgatagaatcaataaatagcattcatagaaacaaaaaacgccagttaaagaaatctctctgtcccaagggtgggaggttgaggtgtgtgtctagaattttgtggtgggagctagagggatatggcagcaggctgatatgtatttaagtcttaggcttatcatgcaccgtttgaaaatgttatgcttacattgataagaaaaataattaagataaggcttcctgaaatagagatattttcaaattcttctctggactcgtgatctaactcctgaaatccctgttgtatttcaggttaatttagatttgtcgtgttccaggaacagttcaatagtcatctataaagcatcagtgtgaaggggaaggactctctgggagtcaagcaattaccttggagtccaattccggagctctctgcagttgtgaaaaggaacagaggctcctctttcatcatcgatttgtggggatggactgattaatagttttttttatttttttaacttatgtttttgcaataaattgactctcctaggtctctattttatagcactgtagctctgtataaacaaaaaatgtggtgtaaacatcattgccgaatgtaaattacacagaaaagacttgatgttttgctaaataagaggaactttgtggaagtgannnnnnnnnnnnnnnnnnnnnnnnnnnnnnnnnnnnnnnnnnnnnnnnnnnnnnnnnnnnnnnnnnnnnnnnnnnnnnnnnnnnnnnnnnnnnnnnnnnncgcaaggcgccactccccccgattcatgacctttaatttatcgacgctgcttgccttttatttcaggtgacggacatctgacgccagcccctgcttccccaacccttctatctatgtcaacgattttccgcagcccacaactttaccaactcgttgcttgagatcgaatcccaatggagctcgcactgcagcacttcaactctatggcaatagttaggactctcttcaatgggtattttttttagtaagtcaaagaacattttatcacatcagttaattccaaagtatcgcagcgttctgttctaaaagccaaggggtcagcatactctgttttgggggtaaattttactaaaatagaacaattagaactaacttttgattttgaggaataccactaagaatatccccaagaaaacatttcatcagcatggtggtggtccagtgcttggattagattttccatgtaatttgggctgtctataatctcttactaaccattatcatcaacatcaatcttgtcggcagcatagagaagtaaactaagtcaagaacgattttcctaaagactaatggaaagaagacatacattattatgaatttggataatttgtttttcaatatgatatggtttggctgtgtccccacccaaatgtcatctcaaattgtaatccgcatgtgtggacagaggaacgtggtgagaggtgattggatcgtgggggtggtttcccccatgctgttctcatgatagtgagggcactctcacaagatctggttgtttgataagtgtctggcatctcccgtttgctctctttttctgcggccttgtgaaggaaggtactggcatctccttcaccctctgccatgattgtaagtttcccgaggcctccccaaccatgtggaattatgagtccattaaactacttttctttataaatttcccagtcttgggcagttctttatagca

SEQ ID NO: 725305 - DNA, 1284 bp, Homo sapiens
gcaggacagttgtcttactcctttataccttcggcactggcatagtgcctggcacataatgggcacataataaacatctggtgagtaaatgtatacattggcatcactaatgacttgatgacaagctagagaagggttactggtggaatgacgcagggttcaattcttaggcacacactgtccactgtctttttaacaatgacttgactagagacagacatgaagggcaggcttatcaaaccttcagatggcacaaaactgggaagaagagctaatgctatagatgccagaatcaagattcaaatgaccttaacagcccagcattctgggcgaaaaacaaagccgattgtgcaaaagtacgggctgggggcaggtctaaacttcctgaagtccacgagacctgccctggcaaccattcatgggaaacagagaagggtgccatcctgaccacaaggttcatcagagcccacagtgcccagagtaatacaatcttcaaaggcattaaaagtaggacagcatctggttcacagaaaaaatggtaatactcacactgtaccctgctgtggtcaggccacaagtggaggattcagctcagggcaccacacttcttttaatgtattgtttttaatagattccagtcacatggtttaaaagacacccaatggtttatagtgaaaagtccctattccacccccaagtcaaaagcaaccaacattacccattgcttttgtacccttccaggtgtagtatatgcacatacaagcaaatgtcctgtcctgtttttgcacaaatgatagcataccatacagcttaacattattttttcacataaaaaatatatgctacagagtcccatgtcagtacttaaaaagctgcctcatttctttctgtggctgcacagtctttgattgcatgaagacactatactgatggacatttaggttttccagtctttygctaccacaaacaatgctgtcagaaatggacatacatcttttttcacatatgcaggtatatctgtaggacagattccacaaagtggaattataggataaagtgggtatctttgtaattttgatagatattgtctaattggataccaccttttaaagagagaaacggacaaaatggagttttctaaaaaggggggctggaatttatgtcccggatggaagaactaaagaggcttaatatggagcaaagagggctgcagggaaagatgagcaccatcaccctcagatacccacagctaccatcaataagttcagtcctccttcaccaacc

SEQ ID NO: 725306 - DNA, 597 bp, Homo sapiens
gtgataagagtttgggaaccagactgaagtcactctagagcagggatggtgatgcatcattttagaatccttaacacagtgccttcttaccacacacacccatgaagtgctcattatgtttcaaacacacacatgaaaaggacacatagtagacccccatgcatccattacccagccccaagaatcatccctcaagcccagtctagcttttctatgctcccatcagctgmcctctaaatatcccaaagaccattttgaagcaagtgccgaaattatataatttcacctacaaatatttcagtatgtcactctgagataagtaatatgtaaatatagccacaaaatcattatcagacctaaaatgttaataatacttccttaaatatcattttttatcattatgattttttttgagacagagtaagaacctatcaaacaccatggagctgggtcaagagggctcaggagcaaattaagagatccccacagtcccactggccaatggtagaagaatcaatgaggattataacttcattgatctcaaactcattaaatatattaaacccatgaatttttaatgacacttagaaaaaaaaa

SEQ ID NO: 725307 - DNA, 1281 bp, Homo sapiens
  misc_feature 513, 514, 515, 516, 517, 518, 519, 520, 521, 522, 523, 524,525, 526, 527, 528, 529, 530, 531, 532, 533, 534, 535, 536,537, 538, 539, 540, 541, 542, 543, 544, 545, 546, 547, 548,549, 550, 551, 552, 553, 554, 555, 556, 557, 558, 559: n = A,T,C or G
  misc_feature 560, 561, 562, 563, 564, 565, 566, 567, 568, 569, 570, 571,572, 573, 574, 575, 576, 577, 578, 579, 580, 581, 582, 583,584, 585, 586, 587, 588, 589, 590, 591, 592, 593, 594, 595,596, 597, 598, 599, 600, 601, 602, 603, 604, 605, 606: n = A,T,C or G
  misc_feature 607, 608, 609, 610, 611, 612: n = A,T,C or G
tgatctcatttatctcagaaacaactaaagctcagagacagcaggttgctgtagagttggtggcaagtcacgtataccaacagtctgatgaactctcaccccaaaaccaagaagccaaaaatgaaaaaggttgaaattcagtctccatctgggctagcatttagtcttcagcagtctacaagaatgatttcagaaaggaaacgacgacatgagaagaaacagaaactgtggatcatgatggctcataaaataggaatgactcggattaagttcagttattcaagttttaggttggttgggctttcttggtggtggtggtggtgtgaaattccttttctaraatctacagatgctttagaaggtaccagacccaaaaactaattctttgtttcattaaaacactggtgacttctgttgtccagttttatatttttgtctattaaaaggaaaaaaacctaagaaacattcaactcctttgagttcagtagttcacttctatttgaaaaaattaannnnnnnnnnnnnnnnnnnnnnnnnnnnnnnnnnnnnnnnnnnnnnnnnnnnnnnnnnnnnnnnnnnnnnnnnnnnnnnnnnnnnnnnnnnnnnnnnnnncagcctttgccaaagcctgtaagctacattgctcttaggcactggaacttctacaagccatttcaatgactaaatttaatttactgttattacatttcaggtatttttctcattcaatagttatatcatccaaaagttcattgagggttcactaagtgaaaacatacctgaaaatcagtaattttgcaatgaaaagttagacatcataaaattttctgaagaaggccaaacaggcaccatgatttacagggctagaagttagaagatatttatgattatcttcaaaatatcaaggataaatgctacaagataacaaatatactgtgatggttgtggtagatagttgcattccacctgtacccctcaactgccattgactgatacgagaaaatcagttctgactcatgcacatcttcatctatttgtgggcttctggcataaaatgcagctgtcccatatttgctttgtctgtttcccagacaaatcgtctcattgagcttcttccatctcctcgttgggcgccttagttttcccattttgaggctcctagtgagttcctttagtcttgcagtctccagctgccatagacatttttgcctcttcccaccatcactggctccaaagcctatttgcctcctcctccgactgcctatgtgagccttcctccgt

SEQ ID NO: 725308 - DNA, 2176 bp, Homo sapiens
tgcccatcccaaaaacctaagcgagtaagattatttaatctaggaaatggttatttactctatagaaatctgatcttctcattgcccaataaccatggaatgctgaagagttgcctcagatggcagggagcctgcatgctagctcacacactatccctaatagccatttaattttgggaaaagacccgtcttttctctggactttagttttctcctctttagaaataagaagctggttagccaatcagtcatgtctctttcaggtatatgttctacgctttgcaactgcaaagttgacaatctgagaatgtgtgcacgccaaaggggcttaaaaaataatattatctaacacttaagcacttgatgtgtattaactcatttaatccttcaataaccatatgaggtaggtattataattattacccctatattttagatgagaaaagaagaaatagagagaggttgagtaacttgacccattatccagtagttttaaggctggggtttgtatttttaaccaccatatgcaggataatgggcagatctgaggactaagcttccttgacgtttgcatgcttagaaggttacagagggagtgtgagaatcacagttaatctgcaaatcaatggtatataccgaaaatcaggacaggggccagagtgtcctcactgttacctgttggattcccttggcattatttagtgcacaacattaccataggaaaatcacaagcacttttatggcaatggtgtaaattaggaggattctgacagtaaagcccagagtcattccaagataaaacgatcagtttgggatctcttggccacctactgacctgtcagtgtattgaggcagtttggggtaggaagtatgtcaaatgatactggaggagggaatacaagaggccgggcagagagtgacttatttattaattatctatttatttatttttggttgaggcagagtctcgctatgttgcctaggctggtctygaactcccaccttggctcccaaagtgctgggattacaggtgtgagccaccatgcccagccccagagagtgactcttgactagtttggagaaataaactgacttcaagggtcttcaaaacacagccacttggaggtcctgactgcccttttctgatctccagcatgagcctctgcagaagcaagtgcctttcactgagtctgaccctagctgagtgagatctttgcagaggaaaggacaacatgcttattttttttaaatgggcccataagaaccccgaaaccaaacaagaaaatcaggaaagtttcttgttagtctactacagacaggtagtgatgagaacttggaatactatctagattctgagctcattgctctagggcccagggtcccaaatggtgcctcttttcaatgcttatttaccatagtttcatagaaacatgaccaagtgtcagttagttctttacccttcgggttttttccatcattaatcctcttggcacagggtggggctgagctgggaacaatatcatataactctagttgcagctgtccttatgcaaaccagcatatccgcaagttaccatgaccttttgggggaaaccaacataacagtgctggtggacacagcttcaggctgctagaggtcactgatatgtaccattgcaacttggaaggaattccatatattgatactttctttgattctatcaaccaaacggctttgtggggcacatgctatagtactgaatgaaatacctttctttcccttgagccaaaagcacataataagctatagattctttgctgctatgccattgatttacctactgtactttgtaacccaggagggctatgaatcatccttcctaatttcagcttcacaaaacaggttgcttttaatacaatctcttctttatctagatttatttgttctgaaccctaacacattcttagggcattatttcttactgaagacaactctcccttagtgtttgtttaatggtaattttttattcaagttcttcctgggtgtccgcttgccctttaattttctttttcacagtgctttatattcctaggaatacctgagtcacaagtggtcagattgccagcattcagcaatcccaggcagggggcagattttattgcctttctctcttctcctccacgggttgctcaacag

SEQ ID NO: 725309 - DNA, 785 bp, Homo sapiens
tgtgaaggataaattacaaatgaattatacacttaatgtataaaaatgaaactaygcaagtcttgaattcctctgaacccggaagtggaataaacaccctaactataactcaaaatccagattataatatgggaaataaaatttgatggtaaaagtactaacttttatatggctaaaaatacaagttaagtaaaaaaagaagtgacaaattggacaagagtatttgcgatttctatcacaaagggttaatatccctaaaaaatcgataagactgtcaactcaacaagaaagtgggcgatacatgaacagatagtttacagaaaaataattgcaaatgactcttacacgtagaaaaagacgcctaacctttcaactggtaagaaatacgcagacactttactgaaatgtcatttcttactgattatattgacagtacttaaaaagttcgacaagctgttctcttgatgatgctgtggagggaagggaagaagcaggactctcagacattgctggaggaaatgctaaatggtgtaaatactagggaagagaatttggcactatttagaaaaattacatttatgtttaccctttggcccagcagctctacttcgagggatttgtctcagtgttacaccagcaaaaataagaatagacacaaacacacactaggctgtttatcacagcactgtttgaaatagcaaaaggtagaaacaatccaaatgttggttagtacaggatttgttgaataacttttactgtatctacacctgtaaaaaggaatgagg

SEQ ID NO: 725310 - DNA, 785 bp, Homo sapiens
tgtgaaggataaattacaaatgaattatacacttaatgtataaaaatgaaactatgcaagtcttgaattcctctgaacccggaagtggaataaacaccctaactataactcaaaatccagattataatatgggaaataaaatttgatggtaaaagtactaacttttatatggctaaaaatacaagttaagtaaaaaaagaagtgacaaattggacaagagtatttgcgatttctatcacaaagggttaatatccctaaaaaatcgataagactgtcaactcaacaagaaagtgggcgatacatgaacagatrgtttacagaaaaataattgcaaatgactcttacacgtagaaaaagacgcctaacctttcaactggtaagaaatacgcagacactttactgaaatgtcatttcttactgattatattgacagtacttaaaaagttcgacaagctgttctcttgatgatgctgtggagggaagggaagaagcaggactctcagacattgctggaggaaatgctaaatggtgtaaatactagggaagagaatttggcactatttagaaaaattacatttatgtttaccctttggcccagcagctctacttcgagggatttgtctcagtgttacaccagcaaaaataagaatagacacaaacacacactaggctgtttatcacagcactgtttgaaatagcaaaaggtagaaacaatccaaatgttggttagtacaggatttgttgaataacttttactgtatctacacctgtaaaaaggaatgagg

SEQ ID NO: 725311 - DNA, 785 bp, Homo sapiens
tgtgaaggataaattacaaatgaattatacacttaatgtataaaaatgaaactatgcaagtcttgaattcctctgaacccggaagtggaataaacaccctaactataactcaaaatccagattataatatgggaaataaaatttgatggtaaaagtactaacttttatatggctaaaaatacaagttaagtaaaaaaagaagtgacaaattggacaagagtatttgcgatttctatcacaaagggttaatatccctaaaaaatcgataagactgtcaactcaacaagaaagtgggcgatacatgaacagatagtttacagaaaaataattgcaaatgactcttacacgtagaaaaagacgcctaacctttcaactggtaagaaatacgcagacactttactgaaatgtcatttcttactgattatattgacagtacttaaaaagttcgacaagctgttctcttgatgatgctgtggagggaagggaagaagcaggactctcagacattgctggaggaaatgctaaatggtgtaaatactagggaagagaatttggcactatwtagaaaaattacatttatgtttaccctttggcccagcagctctacttcgagggatttgtctcagtgttacaccagcaaaaataagaatagacacaaacacacactaggctgtttatcacagcactgtttgaaatagcaaaaggtagaaacaatccaaatgttggttagtacaggatttgttgaataacttttactgtatctacacctgtaaaaaggaatgagg

SEQ ID NO: 725312 - DNA, 2166 bp, Homo sapiens
ttctttgcctacatgaaaaggggcggctcccaatgactggaaatctccctatagctgagaattatatctagagtttataaatcatgtcactaattaatcaaactacatttggttatgaaaatttgtgaaagtgaaaaaaaatggttctgccatggactgacctcagggaaaaaggtctcaggctattttaaggcttaatgaaaaatgggggttagctacatctataaatttatatttgactcatataaactgatctccacagtcatctagtaccagctttaaaaaaaaatcctgagatcttaaggatcctcaaggaaaaaaaatggcacttgggagaatcagctcaattataatattttaagatttattgactttaaagatttttgataaaattaaaaagtttttgaaagtattgaaataagccattaatagaccatttcataggaatcacacatcatcccacaacagttatttctaaccaaatgccctgtttgatcacagtaggatacattttactttttttttttttttgacaaggtctggctctattgcccaggctggagtgcagtgacccgatctcaactcactgcaacctcctcccaggctcaagccattctcccacctcagcctctagagtagctgggactacagatgcatatcaccacacccggctaaattattttgcattttttgtagagaaagggttttgccatgttgcccaggcctatcttgaactcatgaactcaagagttccacccacctaggcttcccaaagtgctgggattacaggagtsagcactgcacccagcctgaatacatcttattttctaggaaacctaaagacacaataatgcaaatatgccaaatgtattgatacatcaattactttattcaatatagaccccaaaatgaaagaaggaggcatgagagcaggctgagttattctcccaagatgcattagatgcattgtgttggataaaaagtgagtccaggatgaaggaagaaatattttatgagatcctcaaagtcctaatgtgtccctagagcagaagctaagggccaggaagaaatctgcgatacttcagcattttgtcatggcacaagtgaagttgtgacaggctcatcgccaaacctccagatggcttcctaaatgacatcacagccatcctgtgcagtggaccatagccaactgccctctgctaccagcactgctggggactaggaaagcaaggggtcaaagtgtgctggaggatgttattttatccatgtacctctaacactgcgttttgtggattccattcactgttatggacctaccattctaccattcatgaggtcagaaagcttttgaaccacaagccactagaacttcaagttctgtgaagattgaggctaagctatacttgtctaatggttaatactgagatttacctctaccgtctttcctaacgtgcaatataaaacataatgttaaataacatcccaatagattactagaattaactcctttctcctaatcaaaatccccaacagtatacaaatatttaagtaacttatttggacttctccataactttatgattggtcaataactcttgagaacattgggtttttataatatatttccgtaacattacctcttctgagataagacaatgattagaaataaaatttgtgtttattcactttcagattaatcaaaatgtgtctcccttttgttaatattcaactaatttaaatagtcttataactttttctgaatgtgtatccttgtaccatttatacttatttcttattttcatatggacattttgcttcatgctcacggaaaaaaggattcatgcttctgttaagaactggtattgtattggatttctctcagttccttacattgcgaaccaaaagcccatgatcgattgcagccatgattatgagaactttggaaataattatgaggtaaagccaaggggtcaatgtgtctcaatgaatcctttctttttattgctgtgtctaatgttttcatttagcaacctgggatgacgtcttcttgatataaaagtcagaagtatatagacatagtaggtttcttagagattattcctattcaaaatgcatactatttttcctaacaaaaaggagctggcatctgaagaggttcagtgactc

SEQ ID NO: 725313 - DNA, 2547 bp, Homo sapiens
agggcaggaaaagggtagcatttggagtccgggtgaggaaagaaagttcttccatctacaggtagcatgaatttaagccgcaaattaattgcaaggtacatttcaccttccctaaagcagatacacctgagggagaccgtgggcacagcagaagcatagagcagtggttctcaaagtgggatccccattaacaacatctggggacttattggaaatgagaattctcaggcttataaatcacagactttgagagcaggggctagaaaagcatgtttttaaaagccctccaggcattttgatgcagctaaagttggagaaccagtcctagaaacagcacagcatacagcaaggttagagtccatcctcaaactgctgtgtgccagcccgggctctgctgaccttgaccaagtgatgtaattcttgaaacctcagttttcatctggaaaacaggcagtaacaattaagctgttgggaccattttgtgaatgtattttgcctgttacacacttaatatagtgtctactgattaaaatactccacgaataatagttgtcattgcttttattcctttggaaacactaggactggaacaaagtatacactcaataaatgagatgaacaaaggaatccatgaatgaatgtcaggactctaggtggttagcttgtgttgagaagaaagatgctaatggcactatataactagacctctgcattttagagaagcatttagaaacatactgttctctgagaccttgtgaacagcaaatgcatttaacaaatagaaaaggtaggaaaagaggaaggaaagagaaaagagaagggaatggaaagggtaagaattggggtagtttttctgcatcccattttatatgcagactgtggctcagagcatttatttctccaagtatctaccctagagctgtgaaatccataatgccgttagggatttatttctctttccctctacccttctcccttcagttgagggcaacttgttcctgatgaagagctactttttgttcccccaaattctgacgcttgctggggaggagtgctcaaacggggaaattggcgaggggttctgagagtgccaggtaatgggatgaaagaggtggggcccaggggctcttgagggagctccgaggacaactgattgggatcacagggagcatctgctcatgggattataggggtgtctgcttatgggatcacagaggttgtttgatcatgaaattacggggggtgtctgattatgacttcagaaaacaatgtcaccacacccacatcaggtttgaagttagatcagaaaaggcaaggagagactgtattttgagagcaaaagaaatttatagtgacaggagacaaccaaatgcctgggcagataggggtggctcctggtgaaaccccacctccaagccgaagacagtttaaagcctgaaagccaagctaccagttaaatcctcagactaggttgagaacttgtcttcccatttggtgtgttttcctctgattggtccccacccttcacctattttacatatacctactcttatttaattggtttttctacactgtcatgcccacatttaagtggtgccttcactttaacttttttggcatattcacaaaccaattagcacgcaatccccattctgagttcataaaaagccctggacccagccacacgcagaactttctcacctttgggtagggggaccacccccatgtcccctctcagctgaaagctgttttatcactcaataaaattcttctccaccctcctcaccgttcaatgtccagcatatcttcattcttcttgggcgtggtacaggagcttgggaactgctgaacgtaggtacaagctgtaacacaggcaagctggggcatgccagcatgcaagcagggcccacgtggggcatcaccagccagaagtccctggcttgcaaagtgaccaacaagaaaaatcatacatcaaaagctgaggcagctgcagaatgttaaaaggtgcatgtcaaaacgagtttagctgagcatttcttcattwttcttcccatatcaggcctataggaggagtcaaaaaaacaacaaataaaagaatctatatgaattgtgagggaaagacacttcttgaaagtcagaagcatagcactctgaaggaagatccccggctcaccccaaggcttgaggcaacagagctccctgcttttaatgacatatttgcagcagggtctttgtggctatgacccacaaccgccattccaccttccccagccctgccctgagtccagtttctgcagataaagcaccccaagagccatgacttcttttgatgagacttccttcataaaggatacaactgtgagtcaggatataaactccctccaagttaggttaattgtaagccaacatagtagacacaagatgttgtttatcctcagtagaaggatgtcttaactgaattcctcccctctggtcaccacagattttgagcatctgaaactatttgatcaaacaactcttctacatgaaagagatttctgctcttct

SEQ ID NO: 725314 - DNA, 2547 bp, Homo sapiens
agggcaggaaaagggtagcatttggagtccgggtgaggaaagaaagttcttccatctacaggtagcatgaatttaagccgcaaattaattgcaaggtacatttcaccttccctaaagcagatacacctgagggagaccgtgggcacagcagaagcatagagcagtggttctcaaagtgggatccccattaacaacatctggggacttattggaaatgagaattctcaggcttataaatcacagactttgagagcaggggctagaaaagcatgtttttaaaagccctccaggcattttgatgcagctaaagttggagaaccagtcctagaaacagcacagcatacagcaaggttagagtccatcctcaaactgctgtgtgccagcccgggctctgctgaccttgaccaagtgatgtaattcttgaaacctcagttttcatctggaaaacaggcagtaacaattaagctgttgggaccattttgtgaatgtattttgcctgttacacacttaatatagtgtctactgattaaaatactccacgaataatagttgtcattgcttttattcctttggaaacactaggactggaacaaagtatacactcaataaatgagatgaacaaaggaatccatgaatgaatgtcaggactctaggtggttagcttgtgttgagaagaaagatgctaatggcactatataactagacctctgcattttagagaagcatttagaaacatactgttctctgagaccttgtgaacagcaaatgcatttaacaaatagaaaaggtaggaaaagaggaaggaaagagaaaagagaagggaatggaaagggtaagaattggggtagtttttctgcatcccattttatatgcagactgtggctcagagcatttatttctccaagtatctaccctagagctgtgaaatccataatgccgttagggatttatttctctttccctctacccttctcccttcagttgagggcaacttgttcctgatgaagagctactttttgttcccccaaattctgacgcttgctggggaggagtgctcaaacggggaaattggcgaggggttctgagagtgccaggtaatgggatgaaagaggtggggcccaggggctcttgagggagctccgaggacaactgattgggatcacagggagcatctgctcatgggattataggggtgtctgcttatgggatcacagaggttgtttgatcatgaaattacggggggtgtctgattatgacttcagaaaacaatgtcaccacacccacatcaggtttgaagttagatcagaaaaggcaaggagagactgtattttgagagcaaaagaaatttatagtgacaggagacaaccaaatgcctgggcagataggggtggctcctggtgaaaccccacctccaagccgaagacagtttaaagcctgaaagccaagctaccagttaaatcctcagactaggttgagaacttgtcttcccatttggtgtgttttcctctgattggtccccacccttcacctattttacatatacctactcttatttaattggtttttctacactgtcatgcccacatttaagtggtgccttcactttaacttttttggcatattcacaaaccaattagcacgcaatccccattctgagttcataaaaagccctggacccagccacacgcagaactttctcacctttgggtagggggaccacccccatgtcccctctcagctgaaagctgttttatcactcaataaaattcttctccaccctcctcaccgttcaatgtccagcatatcttcattcttcttgggcgtggtacaggagcttgggaactgctgaacgtaggtacaagctgtaacacaggcaagctggggcatgccagcatgcaagcagggcccacgtggggcatcaccagccagaagtccctggcttgcaaagtgaccaacaagaaaaatcatacatcaaaagctgaggcagctgcagaatgttaaaaggtgcatgtcaaaacgagtttagctgagcatttcttcatttwtcttcccatatcaggcctataggaggagtcaaaaaaacaacaaataaaagaatctatatgaattgtgagggaaagacacttcttgaaagtcagaagcatagcactctgaaggaagatccccggctcaccccaaggcttgaggcaacagagctccctgcttttaatgacatatttgcagcagggtctttgtggctatgacccacaaccgccattccaccttccccagccctgccctgagtccagtttctgcagataaagcaccccaagagccatgacttcttttgatgagacttccttcataaaggatacaactgtgagtcaggatataaactccctccaagttaggttaattgtaagccaacatagtagacacaagatgttgtttatcctcagtagaaggatgtcttaactgaattcctcccctctggtcaccacagattttgagcatctgaaactatttgatcaaacaactcttctacatgaaagagatttctgctcttct

SEQ ID NO: 725315 - DNA, 578 bp, Homo sapiens
gggctgggccgtagtcggctcgatttaaggctggtatccaaggctgcggccggtcaggcgaggcgaggcgaggcgacgtgagcgagggtgcttagggagaacagccgctggcagctcaatgctgggtggctaacgctcgacggtgccyggcagcaacccggccgacaccccgacccggatcccgagctgcgtcgcggacaatgccgcgggcccgtcccggactacgactcccgacgggctctgcgaccgctccggggcggcccagcgtgcactgcgccggccagtttgacagccgggcgccctactcggctagctctgctcccagccagggacgctggccttctcgcggctttcccccgatgtctctctttattccagctgcctgaaactcggtcccacgaatggcaggcagcgtccaaaattcaaccccgtaaagccagcaccagccaataaagcgcacggatggaggccacgtgacagcagtgggccggccctccggctgagccctgatctctatggtttccgcggctcgctagaaggagtgcggtccactggaggtctccctacattcttcctcc

SEQ ID NO: 725316 - DNA, 578 bp, Homo sapiens
gggctgggccgtagtcggctcgatttaaggctggtatccaaggctgcggccggtcaggcgaggcgaggcgaggcgacgtgagcgagggtgcttagggagaacagccgctggcagctcaatgctgggtggctaacgctcgacggtgcccggcagcaacccggccgacaccccgacscggatcccgagctgcgtcgcggacaatgccgcgggcccgtcccggactacgactcccgacgggctctgcgaccgctccggggcggcccagcgtgcactgcgccggccagtttgacagccgggcgccctactcggctagctctgctcccagccagggacgctggccttctcgcggctttcccccgatgtctctctttattccagctgcctgaaactcggtcccacgaatggcaggcagcgtccaaaattcaaccccgtaaagccagcaccagccaataaagcgcacggatggaggccacgtgacagcagtgggccggccctccggctgagccctgatctctatggtttccgcggctcgctagaaggagtgcggtccactggaggtctccctacattcttcctcc

SEQ ID NO: 725317 - DNA, 578 bp, Homo sapiens
gggctgggccgtagtcggctcgatttaaggctggtatccaaggctgcggccggtcaggcgaggcgaggcgaggcgacgtgagcgagggtgcttagggagaacagccgctggcagctcaatgctgggtggctaacgctcgacggtgcccggcagcaacccggccgacaccccgacccggatcccgagctgcgtcgcggacaatgcygcgggcccgtcccggactacgactcccgacgggctctgcgaccgctccggggcggcccagcgtgcactgcgccggccagtttgacagccgggcgccctactcggctagctctgctcccagccagggacgctggccttctcgcggctttcccccgatgtctctctttattccagctgcctgaaactcggtcccacgaatggcaggcagcgtccaaaattcaaccccgtaaagccagcaccagccaataaagcgcacggatggaggccacgtgacagcagtgggccggccctccggctgagccctgatctctatggtttccgcggctcgctagaaggagtgcggtccactggaggtctccctacattcttcctcc

SEQ ID NO: 725318 - DNA, 962 bp, Homo sapiens
tgggaactgtgggtcaaactacgatagacaaatagatcttgctccagaggaagaacgattggctgagataatacctcaggacagctggaataactttaggcacaattcaaatgaatgcttttcgaggaggagcgttttaaaagtcaagggaagttctaatcggatagcaagtcaggatagagcattcccattagcataattcccctcccaatagatgcagacatgggagaaaggggaaattgcaagtatttctaatgatgatgggacacagccagatgacaagatgacaaacaaggtgacccccgtgggaagcgcttactgattcaaaaattaaataatgaaggctgtaagaaagtaagggcaaatttagccgagttaatgtctgttctttaggtttattagagaagggcaaaagccagacacttgacattgttattgttaattaactaccattatcaccgcctgctttctagtgtctagatactttctggaatctagtgttatcttcagtcaaatgttcattggatgtgccctgtcatgagtgtgatattgcaaaaacattctacattaaccactgcaaaasagcgatgtaaatttggctcactctaggagagcccatctctaccaaatgttgagatggaaaatggggaaacgacgttgtagtcagtttcctctagatcatgtcaaacattcaaagactgattatttatttaaaaaatctatatatgctgcaataaaaatctaaattaaaaaagtgaagaaacaggcaaaaggacaggagaggaggcaggccagtgaatgtgtagtataccactggatttctacacggccctggaggtgtcagacataaacttgagtctaaaatattcagcttgtggccaggcacggtggctcacacctgtaatctcagcactttgggaggccaaggtaggtggaccatttgaacccaggagttggagacc

SEQ ID NO: 725319 - DNA, 962 bp, Homo sapiens
tgggaactgtgggtcaaactacgatagacaaatagatcttgctccagaggaagaacgattggctgagataatacctcaggacagctggaataactttaggcacaattcaaatgaatgcttttcgaggaggagcgttttaaaagtcaagggaagttctaatcggatagcaagtcaggatagagcattcccattagcataattcccctcccaatagatgcagacatgggagaaaggggaaattgcaagtatttctaatgatgatgggacacagccagatgacaagatgacaaacaaggtgacccccgtgggaagcgcttactgattcaaaaattaaataatgaaggctgtaagaaagtaagggcaaatttagccgagttaatgtctgttctttaggtttattagagaagggcaaaagccagacacttgacattgttattgttaattaactaccattatcaccgcctgctttctagtgtctagatactttctggaatctagtgttatcttcagtcaaatgttcattggatgtgccctgtcatgagtgtgatattgcaaaaacattctacattaaccactgcaaaacagcgatgtaaatttggctcactctaggagagcccatctctaccaaatgttgagatggaaaatggggaaacgacgttgtagtcagtttcctctagatcatgtcaaacattcaaagactgattatttatttaaaaaatctatatatgctgcaataaaaatctaaattaaaaaagtgaagaaacaggcaaaaggacaggagaggaggcaggccagtgaatgtgtagtataccactggatttctacacggccctggaggtgtcagacataaacttgagtctaaaatattcagcttgtggccaggcacggtggctcacacctrtaatctcagcactttgggaggccaaggtaggtggaccatttgaacccaggagttggagacc

SEQ ID NO: 725320 - DNA, 1496 bp, Homo sapiens
tatctgtcttgcttcctcttctccaccttccaaacaggattatttgtgatgattattgtggtaaaagagaaaagagaaaaactgaagaggaagatgaaaacaaccttcaaatattaagatagttatatgataagggagagtagacgccattggtgtctaagagattaaaaaatcactttcttctcattccctattgagaaactttgtaaaatataaaaggccatattaagaatatagggttattatgatgataactcaggagagaattgaacatactatctttgtcatttgaggcaatggagataattaatcttcttcaagttttttgaaaatggtaactaaatcctaaaagtcctaaatacctagctgaggaaaacaaattgttcttcagcttctcagaatatcaagttcttttttccataatataattagaacccccaaggattcatttaattcacagtataaaggcaaaacaacaaagttgaaataaaggaaggctggtttcacaggttgcccacaaaactgagaattttttactacagcacaatgcaataaagaggcttacaaattgagtcctgggggaaggacacgagctgtatttgttgcatgtgggtataaraggccagaagttggcctcttctattctgtgaagtgccatgtgcataaatttgtagactgtaattccctttaactcaaaacactcgtgaacaaacagttggaacaaagccacctccagaacatgatgaaccatagcacttagaacactgatcatctctcattgctcaaacaaataagcctttaaaatactgacatgctttacttggagtttttttatttatgcgtgtcttaactgatttcaaaagaatcttagggagtgggggccgtagaagtaatctagacatccctcccctccacctccccatgctagaagattctttttcacatcattctgtacagaggccaaacatttcagagataagagtgctccattggcttggttgccccactgaagttaaagttggtaagtaccaggggtaacacaattcccctgcctaaggtttccatgagtggcctcctgctagagtaacattttgatcttttttgtttcagcccacttcaaggataccaaaaagaatttttgtgcagatatgaactaggtttcctcctctctcattcacagtcgagaagtcaggtgcacccctggcttcaggatgcacactttctccttctccttcacacaggaactgccctcctcctgcaaacaacagttgtccagggccttacctgactctgagagtgtgtttaactagggaagggtataaaaggcctgattgtagccacagatcaggccacattctctaatatggttttactggaataaagctgacattttgttctccatcaacctgatgccagagtccatttctcaacagggaatgagaagtcatttttttactctcttagacaccaatggcatctactctttctcatcatgt

SEQ ID NO: 725321 - DNA, 948 bp, Homo sapiens
gggccttggtgggccaggagggtcccagcatggatgggaggggcaatggaatgatgctacggggagtgtggactggagtgcatggaggaggcatggatgagatgtggcgcagaggtgatctgaaggggaaagttcctcatggaatgatacaggtctggactccagagaaagcaggactcttctccagcccggacacctgctcctcaatggctttcaatcacaactggctcgtagaccccagaagagaccctgcaggtgagagacaggtcagcatgtccccctcgataccccatttcctgagcgctccactggaccaggcctctggaggtgtttcacaagcaggtactgttaaccagccctgtgttgcaaaggggctaaaaccgtgccccagcgatggtaagtcccttgcccacagtgacacagatagtaagcatcagagtctgtggggcctgcagagcccttccgggcacatctggctgtgccaccccatcctcacggtcacctcggcagggagtcactgcatcctgccccacttgacaggtgaagaaactgaggctcagagggatgtgagggtgaccaagagggcagtgggaagtcaggaaacctggtcagctcctttccctgccgagcccaggcccagccctggagtcggggactctcggggctcagcatgtagctctgctgtgatctcgctcccaaccagattggtttctttccccaagatgcttcctcattttcagagggggccagggaggggtgtgtttacaaacccataaggaagccagcccctcagtttccttcttgctcaccgccccctcacccccacccsagagcagcccaggaggctactgggaggtgatagctgccattccaggccgtggccagcaggagtcagcagagcagcttgagagggtagcctctgcgcagcggcctggccacgcctcttcc

SEQ ID NO: 725322 - DNA, 633 bp, Homo sapiens
tcttttgtctccggctttctttgctcaacgttgtttgtcagactgcttcctgctgtgagtggcagcagcttgttcatcctcagcactgcacagtatgcctcgggttttgttttgagtaattccctgatgacagaggttgaaacctgcccttctcagctgacagtcacctgcccttctgcaacctgcagtcccaagcaatcaaccccatggctgcccttggtggttctaaactacaaatgtgactcggattcacascttctgtggctcccacccctccaggtacagtccaaacccctccccttgactcctcctgacttcaagctccctcccaggccagccagcccctctttcccgctcagcacgctcgcccttgccgtgcctctgccgcaggctgctcttctcccacccgccacctgctaatcctactcatgccccagaaccgagcccagcatcacctccttagggcctgtggccatagcactgattggatttgcgcacctcccctcactggagggccctgcaggggtgggggccacatctccagggcccagcctgagccccacaccagaaggagcccaagaatttgtctggggggagcctagggggagcagggagccacaggtatgctgcccc

SEQ ID NO: 725323 - DNA, 649 bp, Homo sapiens
tgggtgccaccagaagactcaggtgggaagagctgagtagagaagagccagatgggtgggggggaccaggtgagtgttgcttatgcacctccaatgatggagacctcacagaatctcagaagaatgcagctcctctctagggagcttggactttgaaaagtgcttcttgggccagccacagtggctcacgcctgtaattccagcactttaggaggccgaggcgggtagatcacgaggtcaggagatcgagaccattctggccaacatggtgaaaccccatctctactaaaaatacaaaaattagytgggcgtggtggtgagcgcctgtaatcccagctacttgggaggctgaggcaggagaattgcttgaaccagtgagttggaggttgcagtgagcttgagattgtgccactgcactctggcctggtgacagagtgagactctgtctcaaaaaaataaaaaataaaaaaataaaaataaaataaaaatacaaaaattagctaggcatagtggcgcatgcctgtaatcccagctgtacttgggaggctgaggcaggagaatcgcttgaacccaggaggtggaggttgcagtgagccaacattgcaccactgcactccagcctgggtgacagagtgagaccctgtctcaa

SEQ ID NO: 725324 - DNA, 1467 bp, Homo sapiens
agagacctctggctctgtggcctgggatgtctttcccctcaccccttctgcattcactgctcaaactcttttcccagcttctgtgggaattcttcctagtgtaccacggggctcctcccctcctggaacctgagctccttgagggcagtgtctggtccccttttgcccttgaaggaattggggctctcagaggcgaagtgacttgcccgtggtcacacaggcagggtgaggtggggacaggaaaagccagacgggcctggctccgcacgcccccaccatccccagagcccccaggtctccactcaagatgcaaaaatacacacctcactggccactggctgctgaagaagctgaggatcgctttactgggagcccccaaccggaagacgtggtcctgaggccgcatgcagcgctggaccagaaggctgtgctcgacccaggygacacaggacacgaagccggagcgtaggtgtgtttattcctgtacaaatcattacaaaaccaagtctggggcagtcaccgcccccacccatcaccccagtgtgcaatggctagctgctggcctcctccatctggtccctccagcctcacagcctcctcctgaagccctttccttccaggctccagaagagcaggagacaaacacaccccactgaggcccagctttaataaagtgcctgatacagagccaggggacagaacccaggtgatacagctcccgacagccatcccaggacgacagagggtcgagggagaccctcggaagcccccagtgactccagacaaaggggcagccccaaaggcgcctccaacagttggaaaacctccctgctagagggcagaaaaggaggcctggccctttaagagccaagctaatggcagctggctgaggggctaagaaaacagcttaaggttttgtcccgtttccttcagagtcccccaaccctgaaggagtttgcgcaaaaataccctaaagttttccaggaggtggggaggtcaccccagaccccccaaagagctgagccttccagcaagggatagtggctgggagggtccagacggggaggacagacccgagggcacttgtaggggaggtggaaagggtctcagactccgcactggaaactggtgtgggcagaagggtgcccagagagggggaagggtttgtccaaggtctcagggcagagccaagacctggatgccggcctcccacctctgggacctccccaccgcccccacaacctccacaaccccacaaattctctggccgggcctccagacagcttctacccccacacaatctctctttctggtgctggaaattgagggggcaacaccaagttcccagctccttgggacaggaccccattatcccaggagagtggggagtgattggggggtccattcctggggctctgaaccaaggcctcatgggaaaggacatgtccttagcctcagattgactca

SEQ ID NO: 725325 - DNA, 1414 bp, Homo sapiens
tccaaaattttttaaatatttaggtataaatctaacaaaatatgtacaggagctatatgttgaacatattgggttaaaaatatattaaagttgcttttactactttttttcttaaggagatgtaagatgtartctcattctgtcacccaggctggagtgcagtggcaccatcctggctcactgcagcctcaacctcccgggctcaagtcatcctcctgcctcagcctcctgagtagctaggactacaggtacaagccaccgcacacagctattcactaattttaaagtgcgattactatgaaaataaatgacatatgtggctcacatagatttctattgggcagcactggcctagctttcctagggagattagtcacagcagggcatgctgggagtgatgcatcgctggagcagagcatgccaggagcaactgtgtgcttaaggcaagacatgctgggaacagtcaagactttacattgggtacactatggggagcttctctcagaaagatgctaggactgactgtgcaacctcagagcagagcatgctgggtgggagcccttgtgccctcacagcaaggtatgccaggagaaagccctcttggacaaaccaggccatgcagagcatgctggaaaggacccatgtgaacagctggacatgaagagaactctcctaggaggcccaaccagaggacggcgggacttgactacccctcagagcagtgcatgctgggagcaacaggccctctggatggggcatgctgagaaggagcacagtgctggccagagggggcaggcaggaggctggtacctgtccttgcccgtctcaccccggaagaggtcgtcaaattgccgcatgcggccgggagagacggcatatgcttccatgttggggaacaccaggcccgctcgctggatcacacgcacgaggctgccctggggcttctgcatcttgctcgggggcccccagaagatgaacacggtttcaggggtccggttgacaaactcctggggcctcctcagcacgcggaacacactggaatgggccacgacgcggtaggtggtcttgttgcccacatcagctgagtagccagtggtgggtgcatcattcatgcggattgtacactcagcccgctcgatctcagggcccagcttggtgcccagcaggtggctggagctgctgacaatcacacactggtggcaccgagagggcagtgtctggtggataaggaaagtcaacattatcacggccactctgtgctggccctgtgctccatacatccaggcctccaggacccaggaattgttatgcccattttaaagacagggaaactgagcccattcattccacattcagcacacattgatagcaagctggttaatggccaagtcctggggcagagcaaggagcaaaa

SEQ ID NO: 725326 - DNA, 1018 bp, Homo sapiens
tttatatttatatatttatatcaatataaaattcaaattataaattataaatttgaattttattgatttgctagtttgatctgcatttcatttataattttattttggctttacggatgtgtaagagttgtaagaacacagagttcatatctagtcttagatctatagtttttgaaatgtcattctaatataaataatttaggtcaactgtggtaaatcatgagacctttccctctaaaaagaagaataatgctcaagtttgggaaacattgtcaaacacaaggctttactgcagggccaaaccatgaatgagaaaatatgtaggcttggtgaggtgagggtggggagagccacatggcatcttgggaggtggagttatcacaagcacactgctataggcagaaatgtgagtaggccacctatcagtgcctatctgaaattgcagtgtttcatatactcaatcaattcagcaagtcagggaaccaaacagagacaacagagaaaaagcctatgtgagtctagcagaacctgactggacaattgccagcaagacactagagcccagataaagaagctgcgtgtatctgccaacccctttaatccagtcaagttgacacctaaaattaaccaccgcacatatacaayaaatgtgtacttttttttttttttagacagtatcattctgtcacccacgctgaagtgcagtggtgtgatctcagctcactgcaacctctgcctccctggttcaagcaattctcttgcctcagcctcctgagtaaatgggattacagccgtgtaccaccacgcccagctaatttttttgtatttttgtagagacggggtttcactatgttgcccaggctggtcttgaactcctggcctcaagtgatccgcccatcttggcctctcaaagtgttgggattacaggtgtgagccaccacgcctggccataaatgtgtacatcttaaatgtgttgttcaatgagatttcacagataaacacacttacataatcatta

SEQ ID NO: 725327 - DNA, 2599 bp, Homo sapiens
cgtttcatcttcagggtctgtactcaatgaacagagtggaaatgcaattggaaaaactcttaatataaaatcctattaaggactacctgggtgtttccatctggggcttctttaccataccgacaggagagaaattccttcattgttgcatgttccccctttactcctgtgtatcatgtgtccaaaagcttgtggaaatggctttctacttattagaattaagcaactttggaatttaatttctttatgccactattaggaaaatcaaggtaataataatatctacaccacctactgcagcatgagcataagggtaagatgggwttatattcatgacagcaaacagttggaatgtttcctttatgccagtcactgttctgagtgttctacatgtattaacctatctgttctccaaaactcctattaagatggacactacatctcaatggggcaattgcaacatctgttttttctaatttgtcctatattttccaacaataattctccatgtttggccatttataacttaatgatagagctgtaatatggattgaggtagttttgatccgcaaaacactgacgtctcacagattttgacaaccgtttacagtgaataacagagaacttgcatgatcatgcacacttaggctttctacctacaaggaagaggagtctaggtagattggtgatttcacatggaatccaataaaggaaagaaccaataaaaccaaaggctggctttcttttgtaatagggatttgaagaggtctatgaaatgcagtcaaccagagaataagatgcaacgaatgtggaatagaaatccaaattttatatgcagcagaactggaaacatactcatttattcattcattgattctttcactatcgggcattttgttaattattgtcaatagatgaataagacagtacattgcctaaaagtgcaccctgtttactggtgaagacagtattgcttgtcatcctgaagtctgtggcatgaacttgagtgaatcactcaattgcttagctcctctattccctcgcttataaataaggataaaatctcctacattacaaggtttctgtgattatttagagaaggactgcatacaatgcttgaaagaaattgtcgctgaataaagtggttgttatcatgaaggtggtgtgtggaggaagttgaagttacaaaagtaatttacacactcaaaaaaggataagaggaaacaataaaggatatttaacagggatatgtgatatcaggttttcatattagaaagttcatcttggtagcaggatggagactgggcttcaaggggactaaatgaaagatagtgtatctattaggaattattaagtagaggaagaaggctgataaggccaagaggggttgtggacacggaacagaaacaagaaaaatttttaatatagaatacatttttctactttaaccatatcttaaacagggctatttcatgggatttaaaaacagaaccttaggaaaaatcaagaacacaactaagcagttttagtgaacaaatcctatttagaacatttctcttaggtttggggcagccaaaaggtagggattctagatgttaacttcctgcctttgagctcgctccattccccattcctgagagtcagtataggtcactttatttggggccattggacatctttccacaacttatttctagcacatacctcaccttgttacacttttttttcatgtatgtatcccccaataaatggagagttcattgagcgaagattgtctttttctgaatcccaaatatttagatgatgcatggaattcagtaaatgcttgtttcataaataaatgaacaaatgagagcataggagttaatcatgagatccctgaagtaagactgacaggttttgagtcctgattgcaccatcaattactagcagaataacaaacctctaggcctatttcctcatctatgaagtggaaattacaattttaaagagttgcagtgaagttaaatgacacaaatatatgctaagtccttagccttctccctgacacacaatcagcatttattttattaaatgagagctgccactattactatcaatattattatcataaagacactggactcttaatttctgaggaaccattttccttccaccttctactttctgctgcccaatataattctgctttggaaaattgctttgatggaatcaatgattataataactaaacttgatgaacagtaggatggattgatttttattttctttatttttatagcttactctgtcattatctgtctccatgcaatcaatgaatcttagaatatacacattttagttatttagggttaagatggtagataggaggcagggctaacttgccgctcccactcagatggacagagcagcatgtgggcactcacatcctgaacttttgctccaagaaccactgccagaacataccaggaaagctaaaagaatccacagaccctttgaaggaatggatcacttctgcaggctccctgagttgtcaaaaaaaaggtgtctgcttgctttctccacaggggtaccatggtctgaggaaagttcttagccc

SEQ ID NO: 725328 - DNA, 2599 bp, Homo sapiens
cgtttcatcttcagggtctgtactcaatgaacagagtggaaatgcaattggaaaaactcttaatataaaatcctattaaggactacctgggtgtttccatctggggcttctttaccataccgacaggagagaaattccttcattgttgcatgttccccctttactcctgtgtatcatgtgtccaaaagcttgtggaaatggctttctacttattagaattaagcaactttggaatttaatttctttatgccactattaggaaaatcaaggtaataataatatctacaccacctactgcagcatgagcataagggtaagatgggattatattcatgacagcaaacagttggaatgtttcctttatgccagtcactgttctgagtgttctacatgtattaacctatctgttctccaaaactcctattaagatggacactacatctcaatggggcaattgcaacatctgttttttctaatttgtcctatattttccaacaataattctccatgtttggccatttataacttaatgatagagctgtaatatggattgaggtagttttgatccgcaaaacactgacgtctcacagattttgacaaccgtttacagtgaataacagagaacttgcatgatcatgcacacttaggctttctacctacaaggaagaggagtctaggtagattggtgatttcacatggaatccaataaaggaaagaaccaataaaaccaaaggctggctttcttttgtaatagggatttgaagaggtctatgaaatgcagtcaaccagagaataagatgcaacgaatgtggaatagaaatccaaattttatatgcagcagaactggaaacatactcatttattcattcattgattctttcactatcgggcattttgttaattattgtcaatagatgaataagacagtacattgcctaaaagtgcaccctgtttactggtgaagacagtattgcttgtcatcctgaagtctgtggcatgaacttgagtgaatcactcaattgcttagctcctctattccctcgcttataaataaggataaaatctcctacattacaaggtttctgtgattatttagagaaggactgcatacaatgcttgaaagaaattgtcgctgaataaagtggttgttatcatgaaggtggtgtgtggaggaagttgaagttacaaaagtaatttacacactcaaaaaaggataagaggaaacaataaaggatatttaacagggatatgtgatatcaggttttcatattagaaagttcatcttggtagcaggatggagactgggcttcaaggggactaaatgaaagatagtgtatctattaggaattattaagtagaggaagaaggctgataaggccaagaggggttgtggacacggaacagaaacaagaaaaatttttaatatagaatacatttttctactttaaccatatcttaaacagggctatttcatgggatttaaaaacagaaccttaggaaaaatcaagaacacaactaagcagttttagtgaacaaatcctatttagaacatttctcttaggtttggggcagccaaaaggtagggattctagatgttaacttcctgcctttgagctcgctccattccccattcctgagagtcagtataggtcactttatttggggccattggacatctttccacaacttatttctagcacatacctcaccttgttacacttttttttcatgtatgtatcccccaataaatggagagttcattgarcgaagattgtctttttctgaatcccaaatatttagatgatgcatggaattcagtaaatgcttgtttcataaataaatgaacaaatgagagcataggagttaatcatgagatccctgaagtaagactgacaggttttgagtcctgattgcaccatcaattactagcagaataacaaacctctaggcctatttcctcatctatgaagtggaaattacaattttaaagagttgcagtgaagttaaatgacacaaatatatgctaagtccttagccttctccctgacacacaatcagcatttattttattaaatgagagctgccactattactatcaatattattatcataaagacactggactcttaatttctgaggaaccattttccttccaccttctactttctgctgcccaatataattctgctttggaaaattgctttgatggaatcaatgattataataactaaacttgatgaacagtaggatggattgatttttattttctttatttttatagcttactctgtcattatctgtctccatgcaatcaatgaatcttagaatatacacattttagttatttagggttaagatggtagataggaggcagggctaacttgccgctcccactcagatggacagagcagcatgtgggcactcacatcctgaacttttgctccaagaaccactgccagaacataccaggaaagctaaaagaatccacagaccctttgaaggaatggatcacttctgcaggctccctgagttgtcaaaaaaaaggtgtctgcttgctttctccacaggggtaccatggtctgaggaaagttcttagccc

SEQ ID NO: 725329 - DNA, 644 bp, Homo sapiens
aagtgaaccaacgtacctggttaatttttcaattttttgtagagatgaggtctcactatgttgcccaggtcagtctccaactcctggcctcaagcaatccctcccaccttggcctcccaaagcactaggattataggcatgagccaccatgtttgtccagcaaagtcaatttgaatgtcacatctagcccccaaaatggtgtcagaatggaaacatctcagtgtgacaaactagatgaactacagaatttagcagactcattactcaaagaaaatgaggcttaggctaaaaaacaaaacagatacacaaatatgtaacaaacaagtattaacttgaattgcaaagggaaaatcgatttacatgagaacattaaactaytgccactatcatcacatgtattactgccacggtaagaactctgggttcatacacatttaataagtaaataaatatatctataattgtaagatttggggaagctaattgctagtaatttgccataaaacttaagttcattactgaccctgatggagaaaatgagaaaggcttgctgaactgcccagaagcagatggggttgaagtcacagctgtttctatcttggctgtccctgaaattatggaaaaaaaaaaaaaaaaaaaaaaaa

SEQ ID NO: 725330 - DNA, 2069 bp, Homo sapiens
tagatccaatcaacgtgtaggggtaagtgggacagccggcaaaatttgagtatcaactgtatatgagataactgtatacgttaaatttcctgaacctgcaaactgtattatggtgtgtaagagagcacctttgttcttgggaggacacatgctgaaatatttaggaataaggggcgttgtcttcagcttattctcagatagttcagcaacaattgtggcaaacagtagtaaacatatgggtgaggggtaagtgggtgcttactgtactcgcaattggaagtttcaattttttcaaaataataaattaaaaataacaaaaaatgtcaaattaaaaaaaaaaggcaaaggcaaaactctcacataagcccatataatcgtgccttaggggaagaaggaaaactggggtatgcaagagggcttctaaaaaacggcaatattctgtttcttgacctgggtagaggctacagggatatacgtttttgttttgtgcacttaatgtgtgttgtttttcacaattttaaaaattcaaagtgtttacatgctgagttattcttcccagcatgcccactaacattaaatgagtatcatgtgcagttatctgcttaatgtctgaattcctcctcttaaatgaaaagcttcatgtgggcagagaccatgtttctcttatttaccactgattggaacaaactaggcaatcatatttattgaatgaatgaataagtaaattacataaatctcacttgtaaggactctatctaaatatataatctgatgtgggctaaagatttgtgaacaaagacgttctgagaaaattttggcaacaagattagcaacaggcattatggccttctaatacaaggaaatattgtgctgtctttataaggcatgtgttcaaagaatatttaaacacagaaggcagaggaaaaggttaagattttaagtttaaatcttttttccaatttttaaaatttggtaaaatgtaacataaaatttaccatcttaagtgttttaaagtacacagttcattggtattaagtacattcacattgttgtgtaatcatcaccaccatccatctccagaactattttccctgtgcaaaactgaaactctatacccattaaataataactccccatgaccccccacctcagtccttcaggcaacccctattcttgtttccatctctatgaatttgatgtctctagatacttcatataagtggaatcatacagtatttgtctatttgaggacacttagcacaatgtcctcaaggttcacttatattgtaacatgtgtcaaaaattcctttttaaagactgaataatattccattgtatagacagacattttgtttatccattcattcattaacagacacactgtttccacctcttggctattaccaataatgctgtcatgagcatggatacaaaagtatctctttgaaaccttattttcaattatttggggtatatacccagaagtgaaattgctggatcatccagtaatcacatttttaattttttgaggaaccaccaaactgttttctacagtggctttaccatttcacattcccaccaatagtgcacaaagcttccattttttccatatcttcaccaccagcatttattttgtttaatagtaagggctcatgaattttaaattagaaaaaaatcaagacacaaaactgttataatctcaatttcattttaaaataaatcagatttacatatgcaaagaaaaaagtttggaactaaaccaaaataactaagtgaggccatatctgggttgagagagagtaattttttaactttttaattttttttagagattctgttgctcaggctggagtgcagtggcatgaccatagctcactgcagctgcaggctcaagcaaccctcctgcctcagccacctgaagagctaagattacaggtgcatgccaccgcactcagctaatattttttattctcctttatactttccatatttttcccaattacctaccaagagaatgtattctttaggtaaaraaaaattatttgaaaattaacttgtctgtgactatt

SEQ ID NO: 725331 - DNA, 652 bp, Homo sapiens
gcttctcgtgaagtgatgcttttcttccttgaacactcctggtgggctgctgcatccagcggctccttggggaagagacgtgccttccagatggcctttctgaccttctggatatgtctctcccaactcggccggatgagtgggggctggggggggggtcaaagggcgtattggtccatgggaggaccacgggaggaccatggggcctgcagagccttctggggacgcaccctccagccatacacacgggctctggccaggaacaggggaagtcccaggacggccccaaagggccagagcgtgagcctcgcgtgttcccgccagcgctcctgcccgccctcyacgtggggccgcgtggggctgtttcttcagcctgggactcgccatgggaaggccggagggcagcccctcccgcgtggcctacagaagctcagtgcgggagccacgtgaggtcaaggctgcctgtgcaacctcagaatcccctccgtgagggagggaagggtctgccgaaggcgttcccgccacgctgcacccatggagcccactcgcccggctcggcacccacccaactcctgccgggcactgacgccaggccgacgagagcccagacagctgggtcaggacaggtggccccaaaattgtccaaaatagg

SEQ ID NO: 725332 - DNA, 652 bp, Homo sapiens
gcttctcgtgaagtgatgcttttcttccttgaacactcctggtgggctgctgcatccagcggctccttggggaagagacgtgccttccagatggcctttctgaccttctggatatgtctctcccaactcggccggatgagtgggggctggggggggggtcaaagggcgtattggtccatgggaggaccacgggaggaccatggggcctgcagagccttctggggacgcaccctccagccatacacacgggctctggccaggaacaggggaagtcccaggacggccccaaagggccagagcgtgagcctcgcgtgttcccgccagcgctcctgcccgccctccrcgtggggccgcgtggggctgtttcttcagcctgggactcgccatgggaaggccggagggcagcccctcccgcgtggcctacagaagctcagtgcgggagccacgtgaggtcaaggctgcctgtgcaacctcagaatcccctccgtgagggagggaagggtctgccgaaggcgttcccgccacgctgcacccatggagcccactcgcccggctcggcacccacccaactcctgccgggcactgacgccaggccgacgagagcccagacagctgggtcaggacaggtggccccaaaattgtccaaaatagg

SEQ ID NO: 725333 - DNA, 606 bp, Homo sapiens
cacgttgtggtgcagcctctttggaaaacagttgacctgattcttacaaagccacaacccagcaattgcacttttaggcgtttagcccagagggcgggaaatgcaccttcacacaaacgcacacacgagtgtttacagcaaccctgtgtccgtccacaagcaaatggtcaaactccgctctgtccacttggggttaatgctgccaagcaacagaagcagagaacggtggctccggyccggacagacctccaggagttgggctgaggacaaagccagcatcagaagcttcacacaccgcagggtgcggcttgcagagcatctcaaggcggcagagctccagcactgcacagttagcgtgcctggcacgggggcccgctgctgacacaccagttgtgtgtctcgactgtggctgcaatgccaaaccctacctgagaaaggaaccacggcacccgcagttcaccgagagcttgaaccagtctcatttcccagctttgccattggctgcagctgtgcggtcaccgctggggaaggccggggagcggacccgctgcgccgtgtactgtttttgcaacttcctgtgaatctataattaatttgacataaaaa

SEQ ID NO: 725334 - DNA, 606 bp, Homo sapiens
cacgttgtggtgcagcctctttggaaaacagttgacctgattcttacaaagccacaacccagcaattgcacttttaggcgtttagcccagagggcgggaaatgcaccttcacacaaacgcacacacgagtgtttacagcaaccctgtgtccgtccacaagcaaatggtcaaactccgctctgtccacttggggttaatgctgccaagcaacagaagcagagaacggtggctccggtccggacagacctccaggagttgggctgaggacaaagccagcatcagaagcttcacacaccgcagggtgcggcttgcagagcatctcaaggcggcagagctccagcactgcacagttagcgtgcctggcacgggggcccgctgctgacacaccagttgtgtgtctcgackgtggctgcaatgccaaaccctacctgagaaaggaaccacggcacccgcagttcaccgagagcttgaaccagtctcatttcccagctttgccattggctgcagctgtgcggtcaccgctggggaaggccggggagcggacccgctgcgccgtgtactgtttttgcaacttcctgtgaatctataattaatttgacataaaaa

SEQ ID NO: 725335 - DNA, 606 bp, Homo sapiens
cacgttgtggtgcagcctctttggaaaacagttgacctgattcttacaaagccacaacccagcaattgcacttttaggcgtttagcccagagggcgggaaatgcaccttcacacaaacgcacacacgagtgtttacagcaaccctgtgtccgtccacaagcaaatggtcaaactccgctctgtccacttggggttaatgctgccaagcaacagaagcagagaacggtggctccggtccggacagacctccaggagttgggctgaggacaaagccagcatcagaagcttcacacaccgcagggtgcggcttgcagagcatctcaaggcggcagagctccagcactgcacagttagcgtgcctggcacgggggcccgctgctgacacaccagttgtgtgtctcgactgtggctgcaaygccaaaccctacctgagaaaggaaccacggcacccgcagttcaccgagagcttgaaccagtctcatttcccagctttgccattggctgcagctgtgcggtcaccgctggggaaggccggggagcggacccgctgcgccgtgtactgtttttgcaacttcctgtgaatctataattaatttgacataaaaa

SEQ ID NO: 725336 - DNA, 606 bp, Homo sapiens
cacgttgtggtgcagcctctttggaaaacagttgacctgattcttacaaagccacaacccagcaattgcacttttaggcgtttagcccagagggcgggaaatgcaccttcacacaaacgcacacacgagtgtttacagcaaccctgtgtccgtccacaagcaaatggtcaaactccgctctgtccacttggggttaatgctgccaagcaacagaagcagagaacggtggctccggtccggacagacctccaggagttgggctgaggacaaagccagcatcagaagcttcacacaccgcagggtgcggcttgcagagcatctcaaggcggcagagctccagcactgcacagttagcgtgcctggcacgggggcccgctgctgacacaccagttgtgtgtctcgactgtggctgcaatgccaawccctacctgagaaaggaaccacggcacccgcagttcaccgagagcttgaaccagtctcatttcccagctttgccattggctgcagctgtgcggtcaccgctggggaaggccggggagcggacccgctgcgccgtgtactgtttttgcaacttcctgtgaatctataattaatttgacataaaaa

SEQ ID NO: 725337 - DNA, 995 bp, Homo sapiens
acctgtattcaaatctagtgatcttttctgccataatgtccaatctgatattaagaccattgggtaaactttggattttaaatattataatgtcttttgtttattttatatagttctcatatctcttctgaaataccatatctttttatttgttatatatgtatttttctgcagattctttaccatatttagaaaattggttttaaaataattgctaatgcccttaactgggttaactgtgggttttcttctaattgctatgttttttcttgattgtgagtcacattttctttgtatgtcttataattttttattacattatggaggttgtgtataaaatgatgatggagattgctatataatttagtttttattgctttatttacttgtaaaataatgcaagttatttcctctgtctaggggttggggtaaggggctactagagtaagtttgagtctgagctttaatttagatagaagtaagtgatttgtccaagctaaacttttgtagcttcacctgcatcttccgttaaccaagacaatatttgacctaagagacaaccaaatattagcttttttttccctttttttgttcaccctggtttcaactccagcaggtttctataatagaagaattttgaggatgtctgggaccattgctatttctytctactttaaagaataccctttattgttcctttcatggcaaaattcagtgtttggttagggaaagagacttactgggccacatgatttatttttacatttgccactcttccagattctaaaaaatgtcaccagcccacactgtcatctaaggctcagctgatttctcttcattttcttcaatctctttgtttctatgtggtttattctaccatccatccacctatactgagacctggaacctgctctcaggttcagaagatgctgaagctctctcctcactatgaagggctatttttttctgaaattcagtttaacaaagattcattg

SEQ ID NO: 725338 - DNA, 591 bp, Homo sapiens
ttaaaatgtgaaaaaggtgtcactaagtagaccaagaaaagcacacttgtgtacagyatgatggctgaaacatagagacagagcatcacgttatttcccctcagctgagaacgtatatgtcaggtcactcagttttttgccactctgcaagtgttcacacatgaccatgaaaatgccctatcatcttgagattaaaaataaattttcacaagtgaacaaattcacaaacacaaactctgcaaataacgaagatctgctgtatatagtccacctcagaatggagctcttaatattttggagtaataacataatctcccatactgttgagtatataatactgtagacctttttattagatttattgaacttttattttcatagaaatgactttgtatttctatttgaaaaatgaagctggttttttctttgtgtcttattttatcaaaatataatactttattcttttagaagatagttttgtaggttttgacaaccacagtacagtcatgtaaatgcaatcaaaatcaaaatatagaatagttcccatacctcaaaaatctccccatggtccttagtcatcctctcccccaa

SEQ ID NO: 725339 - DNA, 2574 bp, Homo sapiens
tatcaaaatagaaataaatttaccttttcagaaagcatactctaaattaaagtcgaactacctctactccctccacatcttattttctgccaatgttgtatttgtttacttgtttacttatttttgtcctaacscttgacatccccacttcccaaaacacacaaacaagagaaaggctgggccttcgtatgtgtcttttcactttcatatgttcagaccctaacacagtgactgctaaatagcaagtgtttataacacacacacacacacacacacacacacacacacacacacagagagagagagagaacatgagcatatgtttataaataataatttgtaatgaaagaactatcctaatacttatatcatcaagacagactgtgttaataattacttattaactatcaattaactatgattaaaatcaggattttgctaggttctttaggaaacatgtcttttaatgacactcaacttaccgaaactgcttctcagcaaccgtattttacactcagaactaccttctgagatagcaacagtcccatttttataggagagattgaaataggaaaagcttagccagttaagatctcatggtcagttaactgtggaagttgttctagtccaaccattttggaatatttggccatgctggttctttggttgtaaagttcctttgtaattacttctctatttgtggagatttaggagacacactatgaaatgctagaagtgaatgtgctttgagaatagaaggttttttttgttttttgagatggagtctcgctctgtcacccaggctggagtgcaatgacatgatcttggctcatcactgcaggctccacctcccaggttcaagtgattctcctgcctcagcctcccgagtggctgggttacacgcacctgccaccacgtccagctaatttttgtatctttagtagagacggggtttcaccatgttggtcaggctggtcttgaactccttacctcaggtgatccactcgcctttgcctcccaaagtgctgggattacaggcattagccactgcacttggccaagaatagaagtattatttaatattattgtgtacggttctcatatttttactgatgttctactgttttagcatgatattatctatatctttgtgaaagctttccattttgatctagattattccagagactgaaagacagggatattattatctgacttgacttgggactcctttgtatttcttgattatgaaaataattgttttgttgaaataatgcttaaagattttagaattgtcatatgaggagaaaaaaagtacacatctccttggatgctacagaatccagattctatcggtttttgatcttgggcaaattacttaaccttactagacctgtggcagagagaaattgggctaagggaggaaggggagttaagggaataagataggttagaggataaaatctaagtgtacgtgaaactaatgcttttaatactttttagtttttttcaattccattcactccagaaattttcatcgtatttggtgatgaaatagatcaggattttgcttctattttatcttttctttttgtgtaataattccatatttttctccttccattttgcggtcataagacaaggcaccatttctaaaatattttgtccatcagacatactcgtttttttgtttgtttattttattttgttttgtttttgtttttgttttttttgagacagagtcttgctctgtctccaggctggagtgcagtggcgcgatctcggctcactacaaccaccacatcccaggttcaagtgattctcctgcctcagcctcccaggtagctgggactacaggtgtgcaccaccaagcccagctaatttttttgtatttttagtagagacggggtttcaccatgttggctaggatggtctcaatcttttgaccttgtgaaccacctgcctcggcctcccaaagtgctgggattacaggcgtgagccactgcacctggcctatgctgtttttatatggataagtcacacagaaggaaaggaaattgatttttgtacagatactgtataccatgtgttctgtcaatcatttcctgggttaatgcagaaagcattattttcaacatgtaatatgtatattctgaaatttggcagtgtagaaaagccctaaattctaatgttcataaactattagtcatatacttatggagacttttagatataaagaagaactagaagattatctagggtggagtcttctctttacagatgaacagagggaggcccaggtagggtaagtaatggtttttaaatggcatgtaactagattcaggaacatgactgccagggacctagaaacctcttctgttgggaagacttcccaagagaagcaatacccacagggaatttagaggtaagtggacattagtgagatgaagccctggaaggggttggctgtgttgagaaccatttcaggctcaggaagcagcaggtgggagaagtcctgagtctggaagcggcaaggcacattcaagaaacagagatgtccgaacatgcaaaatg

SEQ ID NO: 725340 - DNA, 3760 bp, Homo sapiens
aataaattccttctatctctgttcatccagactcaatttatgttgcttataaccagtcctaactgacacagtgattttcctgatgcttagatacatttactttggaatgtagcaaaatattcaaagcaattgtcaatttaaaaaggcatcgtaagacaggacatagtggctcatgcctggaatcctagcactttgggaggcataggcaggaggagctcttgatgccaggagttcaagatcagcctaggcaacatagggagactctgtttctattaaaaaaaagaaattttttaaagaaaggcaacatagaaaaataaggaggaatttaactataatttcctattactaaaacccaagtagaaaagcaaaacagagacttcacctaactttacatttaaaaataaaactaacccacatatgtctaaaacacatgcacacacacagtcacacacacacacaataataataataataataataataataataaggtagactttatgagcagcaacaactctttgttctatctccacctccattctagtccctggaagtaacatcttttaatcattttgttttttagatttttcattgtgttcttatttttacataagttactaattttactgttcctgttttttattgtaaatattattatcaccttcctattatgacatgtaaagacttagattctttgcatcagcatttttaattttcactttattttaaagctacacacttacatccttttttcttatctcatgaactgaagagaaaatatctgatctcccacaatataaaaatgaggattttattttccctaaattttctttcagctcttagtatgtggcatctgtttatgtacttttacatttttaagtttgatacgttttatatttaattcagcaactttacagttattgcattttgcccattgaatttaaatgttgaaagttaatatagagcattttcaatattatcactctttcttctttccttcctttctactttccccaagctcttaaacagcattttccctttctgttctaggagttgaggcacagtggtaaattctgtccattacacagacaggtgatatgcattatatatcttctgcaatatttttattttcctgaaaatgctaatccttttaatccactcacaccaacgtaagatttttttccttttctttttctttcgtttttaaattctctgcttaccatgttcttaattgtgcaaagtattagttttctaactgcccctcttctctcagccccactgtttctccatggagaccctccttctgaagcctccaccttttggttctaagctggaactgttagacatctatcatcctggggcaacccttcataaatgtgctgattagatctgcctctaaccggaccccatgacttcattctttacttaatcccttttcatgctgtagcatatcctcaataaactttctaagataatatgcaggaaatacagccgtgtctagaaagtctttcttttgtccttatatgcgatttgatgatttagttcaatataggatatctagtctaaaattattagtcctcataattttaaaggtatttctctgttactttctagcatttaatattgctgataatgtccgatgccagtctgattttgctctttttgtaagataaagaaatattttatctccttccttcttccttccttccttccttcatttcttcctttcttcccttctcctttccttttttctttatctccttcccttctttctttctctttctggaaatgtttgaggtttctctttatttttagtgtcttaaaattttacaatgatttatttgttttttaaaattcgtatttcacgatttgtttattattatatttttcctgtgatcagcattctctgggaccctgtgacctttccattctgggataatttcattgactatttatatgataattgaattccatctattgatttttttttcaaattctagaattcttaatacttggataatgggcctagtggatagaatattcacatctctatatgttttactttcttatcttcttattctaatattaaatttatttctctgacaatcagaaagcctgtctctgcaatcagggactgatgaacttccactgcctcataagggctgcacagggaaacagagggtacccgaacaaatgtgaaaatctttaaggaagaaggaatggaaccatgaatactaaaaaggcaaccaaaatatccattatacttgcaatctatttatatcaaccagtcagttaatgacaatatattcaagttactgtgccatagaaggtgtttgatagactctagtaaataaaccattataatggagatatttatgctaagatgatgagcctggagagagaggcagggtccagataaaggagagtcttacaagccgtcaaaaggaatttggacattagttttatgcatcagaaattgttaaagggttttatatagaagagtcacttaataccacctttaaataatatctcctggggacagctgtttggtggctggacttacagagagcagggctagagtcggagaagctgtttaggatgccctttgtatggcctcctgtcagaattctgaaatttttaatccctttgcatctgttattctgattattgtttttgaatgttaattgccaaaatgtaagcatagatgaggtgaattctctcaagtctactgttaaacaactgcaggcatccttttcataacttgttttctcatcacagatatgctaaatatcacatcactgccatctaatttactttgaggaatgttttagaaattataacccccttccctttgcttctgtttcatgggacatgaaacagatgtttcatgttaattgatgttaattgatgtttaaatctacaatatgattagttcacacacagtatatgatacttgtttattctacttttaatcaattttttgtcaaagttatttacaagttgatttacacttctaaattcaggggttttgtttgcaaagtatctataatgtggtaattaaatatagcttttaataacggaaaactcaaaagcaaatctaaactaacataagtatgtctacctaaaattatgaaagtttttttttttaactttcactctgaactttacccgttttgcctaatcctgattattttttaaagtacatctgctaagaattctgcagtatttctacaagctggcattttcatttttgaaaggattatttgaaatttagatttggcatctgtcagaaaaaaaaaaaaaacactgtcatcctattggatgttatcatacagcaggtaatgattgctgaaatttaaccaatcacacagaatgacagtggaaaaacaccctgacaagaattttatgtcaaaaccatagaggaaaaagcaaaagagctgcaagttaatgccgtcctagtataatagattttattctgattagcctatgcaaagttgatggtgccagataatccacaaacagagtcaayataatatttttttgtaaagtcctgtcagaaacttttacgctggtaccagtattgtgatcctcagttcgagggcctgtctgacagtctaggacacagagagctgtcaacccaggagccggccgaagatgattgttaaggggatttggtactccttctatttgcctaatagggagccttgcgctcagcatttcctaaagcaaaagaagacagatgaaatctctgggcacttca

SEQ ID NO: 725341 - DNA, 214 bp, Homo sapiens
tgctcaatgactttctaataatagaaagcccaaggcggagcctcactgaccrccgacccagggcagcttccgagaggcaggtgggaactgcagaccctctgcgagtctcagccgtggccaggcagtgcccccgggtcatagtgcacctcagaccctcagaccctgaccctcacaggcctccagggcagaggcagccactgcccaccttgaggca

SEQ ID NO: 725342 - DNA, 628 bp, Homo sapiens
ccctggtgtggtgctttgctaaacctccgccctccctccatcttcctyccacaacagaacagtgttgaggctctgccaggcgagatcactgcctcgtcctgactccctgggcccgggaccatccctggcaggcacttgaggggggccagcagcctggggcccggggctcaaggccccgtggggtctggcgagaggcaagggcccaggcactgattctctgagtgctggcaaagggcctgtggtgtccgctggtgtctgggaattgctggagggtcaaaagcattaggcttagccaggaaagtcatggttagggttaaactcatgtctgctgaaaattgcctgaattaaaattgaacaaatgtgccttaactcgaaagaaaagagcagacattcagaataacacgttgccaagaaccctgaagggtggcccctctgaggcaccagctacccccagccgggctggcgtggaggatggcgggggttgtctgctggttgggtggcatgtggacttgtcttggatgccatgatttatatacatatatatatatatacttttttttttttttttttgagacactctcgctctgtctcaggctggagtgtagtgatgtgatctcggctcatggca

SEQ ID NO: 725343 - DNA, 628 bp, Homo sapiens
ccctggtgtggtgctttgctaaacctccgccctccctccatcttcctcccacaacagaacagtgttgaggctctgccaggcgagatcactgcctcgtcctgactccctgggcccgggaccatccctggcaggcacttgakgggggccagcagcctggggcccggggctcaaggccccgtggggtctggcgagaggcaagggcccaggcactgattctctgagtgctggcaaagggcctgtggtgtccgctggtgtctgggaattgctggagggtcaaaagcattaggcttagccaggaaagtcatggttagggttaaactcatgtctgctgaaaattgcctgaattaaaattgaacaaatgtgccttaactcgaaagaaaagagcagacattcagaataacacgttgccaagaaccctgaagggtggcccctctgaggcaccagctacccccagccgggctggcgtggaggatggcgggggttgtctgctggttgggtggcatgtggacttgtcttggatgccatgatttatatacatatatatatatatacttttttttttttttttttgagacactctcgctctgtctcaggctggagtgtagtgatgtgatctcggctcatggca

SEQ ID NO: 725344 - DNA, 355 bp, Homo sapiens
ctttcagcastttccaacctgcatgaggataaattcagataatgaagaaacacagagtagaaaaaaagaaaaaagaaaaagaaaattttcctgacattgtcttaattagtcctcaaagttaacagtagctacagttcagctactgccacttcatgaatctatacccactgtattaggggccactttatttactctctagctcaactgtcttttttttttttttttttttttttgagacagagtctcgctctgtcgccaggttggagtgcagtggtgcaatcttggctcactgcaacctccgcctaccaggttcaagcagttctcctgcctcatcctcctgagtagctgggactac

SEQ ID NO: 725345 - DNA, 618 bp, Homo sapiens
ttttgcatgtgggacagcatgttctataaatgctgaaaggtgggagaagcacaaacacagtccactctttaaaaaaaatacttcaaagtagaattttctatcccctccattctccagtaaaaaagtagtgctgggatctggcagccagatttggtttttatcctgaccatttacaaagtgttcccccatatgacttgcatcattagggttatagataataataattaattcacttggaagaaaattgtgtctagtccttcctcctcttcttgccttcatgctcatattccatggggcggctgctatctgagggtcttttagagccacsgtgctgtttcacttcttccaaaaacttgtccaaaccaaaaggatcttcctcaaactgaactggtccttctcggcctctctgcttacagcctgaaccagaaaactctttgtcgggaacaaatctgttggtctttattctgggttctaggtcatcgttatacatgtccttgtccagatttttactgggcctataactactgtgggccatatctttaccacctctctaggcttgatcataaacattataaattccatcttctccacctgcaaatccactgtccatacccttgg

SEQ ID NO: 725346 - DNA, 615 bp, Homo sapiens
cttatgtgcaaaacctttcttccctgagtctttcaacaagcctcatcttacatctcattgacccaaaagagctaaggacttcccatcctagaaaaagaaacggagttatatgactggctttgtctgatcagttggcgtagagtagacagggctctcaatttcaattatgcaagaaacatgtaaaggaaaaacaagggaaagtaacactttggaaatagtgagggaaaaatgttttaaggagggaacggtcaactgtcaaatgatgcacaraaacgtcaagcaagataagtatgactaaaggctccttggatttagcaacaaggaggtcattggtgatctcagcaaaagcaatttgcttaaatgttggggggggaatccataggaatctgcattaaggggtaagtaaagaaacctgtaaaactcaagaaagaagtaatgtactaaatgtaccatgtcttcttcctactattatgataagcaggttctgattatcccatattatagcaattttgcctaaaatccgagatttctgaacctataaatagatatgtccacctatcacctctcagagtagagagaataaggaccactttaaatattcaaatttagtttttg

SEQ ID NO: 725347 - DNA, 668 bp, Homo sapiens
atatttagacatatactttaactggaactagatataagaataaaaataactacaactaatttaaccactttttaacatggacatatactagaggcctttcagtaatgggtatttttaaaatgagccagaaaaagtcataataaatcagaagcacaagttaagtgtcttctctgaggtctcctattgaaaacagggtttgcctttttttaaaactatgggaaaaatgctaattttcttgcgtaggaaattttaacagtccaattacagaaaaaagtaaaaatagtttcctagtgggaatacattgaggatattgaaataaaaacccactcayagcatcaaatatcagctaaagtatatggataattaggatagaaaagttccagtgaaaggcagaaataaaaatttggaaatagtttattatctaagtcattgtctggccctggtggctagcatggttctttctatattgtttaaatgatgttgtaccaggataaatatgagattaaggttcatataatactgctgctgctgttaacagactaattttacaatgctatttttccttcagttactaagtagttcctcagaaaatatctaagagcgaaggatggccattatgagccctttcttccccagcacagtgaaggacatgttgctgtaaagaaaaa

SEQ ID NO: 725348 - DNA, 2327 bp, Homo sapiens
tgctctaaattctttcaactctttatttatcctctaagaccctgatttctttgttatcctacctctgctgccctgctctttgctcctggttgcttattgtctgggttgtctatcttcaccatttctcagaccagggccaccccccaaacccagtagcacatgctctgctaccaagttcccagacatggctgttggtcagcatygtggaatctgaagtttggaacagaccagaaaagtcagctggtctatgtaatgctagtctctggcacaacatccatgctatgaataatttctcatcaagtatagaatttaagagaatcaagggtatggtagtaatactttgggtttataaacttgtgtatatttggtttaggtgttttaggagacttggcctttaaaagttaagaggtcagtctgtgattccaaactgaaatgtataactaattgatttagacttgtaattttgggttgaaattttattgtttatatagttttccaatatttgagagacactaagaagccatctttattgttttagtttattagatttatgaaaagatttttcacacaattactctatttgaaaagaaacccagaaacccaatatattaaattcataactgcagtttaaaatatttgaagtggggtctccctgccaccctattttagaacatatcccattccaccttccctattttaattgactttatagaaattaccaccttctaggccaggcgcagtggctcacgcctgtaatcccagcactttgggaggccgaggtgggcggattacctgaggtcaggagttcgagaccagcctgaccaacatggagaaaccctgtctctactaaaaatacaaaaaaattagctgggcatggtggcgcatgcctgtaaccccagctacttgggagactgaggcaggagaatcgcttgaacctgggaggcagaggttgcagtgagctgagattgcaccattgcactccagcctggccaacaagaacgaaactctgtctcaaaaaaaaaaaaaaaagaaagaaagaaaagaaaagaaattaccaccttctaacatagcatataatttgataatttgtttgtttactttgcttattttctgtcttctgtccattagtatgtaagcttcatactatgagtatgtgtatgggtcaactgcagatattttgtctgttttgttcctgatattcccagtgcctagaccaaagactgtcaactgatatttttcaatgcataaataaatgaataaggtttataagttgaacctaaaccataagcaggagaagggatttttaaatgtgtcattttaataaagtattatttgttaaaaataataaatttctgggaactctttttagactgcagaaataaccctcaagtatatttcaaagtttacatttgaaattttgcaatttctctcagtttcctgggccaacaggccagctctaatgtagaacacatgattgctcactaacaattttgtcattcctcaaagactcccattatcctttctttatagttaattttcagcatgaatgtcattctcttggacaagaaaagcaggaacaaagcaagatccaaggagctccactgtttattactcagtgttgcactgtcaggcccaaatgggggacatattagcttcttcttttcttgctttaataagaacttgtatttcaaagactttttttgttacagtttttctttacaattcagtacattggctgggtgcagtggctcacgcctgtaatcccagcactttgggaggccgaggcgggtggatcacgaggtcaggagattgagaccatcctggctaacatggtgaaaccctgtctctactaaaaatacaaaaaattagccgggcgtggtggtgggcgcctgtagtcccagctactcggaaggctgaggcaggagaatggcgtgaacccggtaggcggagcttgcagtgagccgagatggcgccactgcactccagcctgggcgacagagtgagactctgtctcaaaaaacaaaacaaaacaaaaaacaattcagtacatttgaggttttaactttcctgacacaggttcatgtcaacatgtcctatttagctcagttgcacattgtactattcttttgaagtctaaactcaaagagaggtacttgatacagctacactggcttctacagatcctccctctctttttccacatctgattcagttcagttgcagtcacagcatagacatcagaaaagcaccaacagctgcaagaccattaacactgtagcagtcttgacggacattggtagcacatattattatcaattgccacaata

SEQ ID NO: 725349 - DNA, 2327 bp, Homo sapiens
tgctctaaattctttcaactctttatttatcctctaagaccctgatttctttgttatcctacctctgctgccctgctctttgctcctggttgcttattgtctgggttgtctatcttcaccatttctcagaccagggccaccccccaaacccagtagcacatgctctgctaccaagttcccagacatggctgttggtcagcatcgtggaatctgaagtttggaacagaccagaaaagtcagctggtctatgtaatgctagtctctggcacaacatccatgctatgaataatttctcatcaagtatagaatttaagagaatcaagggtatggtagtaatactttgggtttataaacttgtgtatatttggtttaggtgttttaggagacttggcctttaaaagttaagaggtcagtctgtgattccaaactgaaatgtataactaattgatttagacttgtaattttgggttgaaattttattgtttatatagttttccaatatttgagagacactaagaagccatctttattgttttagtttattagatttatgaaaagatttttcacacaattactctatttgaaaagaaacccagaaacccaatatattaaattcataactgcagtttaaaatatttgaagtggggtctccctgccaccctattttaraacatatcccattccaccttccctattttaattgactttatagaaattaccaccttctaggccaggcgcagtggctcacgcctgtaatcccagcactttgggaggccgaggtgggcggattacctgaggtcaggagttcgagaccagcctgaccaacatggagaaaccctgtctctactaaaaatacaaaaaaattagctgggcatggtggcgcatgcctgtaaccccagctacttgggagactgaggcaggagaatcgcttgaacctgggaggcagaggttgcagtgagctgagattgcaccattgcactccagcctggccaacaagaacgaaactctgtctcaaaaaaaaaaaaaaaagaaagaaagaaaagaaaagaaattaccaccttctaacatagcatataatttgataatttgtttgtttactttgcttattttctgtcttctgtccattagtatgtaagcttcatactatgagtatgtgtatgggtcaactgcagatattttgtctgttttgttcctgatattcccagtgcctagaccaaagactgtcaactgatatttttcaatgcataaataaatgaataaggtttataagttgaacctaaaccataagcaggagaagggatttttaaatgtgtcattttaataaagtattatttgttaaaaataataaatttctgggaactctttttagactgcagaaataaccctcaagtatatttcaaagtttacatttgaaattttgcaatttctctcagtttcctgggccaacaggccagctctaatgtagaacacatgattgctcactaacaattttgtcattcctcaaagactcccattatcctttctttatagttaattttcagcatgaatgtcattctcttggacaagaaaagcaggaacaaagcaagatccaaggagctccactgtttattactcagtgttgcactgtcaggcccaaatgggggacatattagcttcttcttttcttgctttaataagaacttgtatttcaaagactttttttgttacagtttttctttacaattcagtacattggctgggtgcagtggctcacgcctgtaatcccagcactttgggaggccgaggcgggtggatcacgaggtcaggagattgagaccatcctggctaacatggtgaaaccctgtctctactaaaaatacaaaaaattagccgggcgtggtggtgggcgcctgtagtcccagctactcggaaggctgaggcaggagaatggcgtgaacccggtaggcggagcttgcagtgagccgagatggcgccactgcactccagcctgggcgacagagtgagactctgtctcaaaaaacaaaacaaaacaaaaaacaattcagtacatttgaggttttaactttcctgacacaggttcatgtcaacatgtcctatttagctcagttgcacattgtactattcttttgaagtctaaactcaaagagaggtacttgatacagctacactggcttctacagatcctccctctctttttccacatctgattcagttcagttgcagtcacagcatagacatcagaaaagcaccaacagctgcaagaccattaacactgtagcagtcttgacggacattggtagcacatattattatcaattgccacaata

SEQ ID NO: 725350 - DNA, 1456 bp, Homo sapiens
ttggatttgttaataaaaagttttactgtgtacattttagaaggaacagctatgacaatatagtaattagagaataatttgctcaattttgtccccttttgttcttctgtgtactactaatgttgagggaatagttgacagatacttgtattcacatgtatctgtctgaattgtaggttgagaattgttcttaaaaggaagcaataggctaatgtttacctcataaatcaatgcaaattttggtagattttaagcaatttattgcttaataatttgcattaaaaagcttaatatgaaacaatttcattaatctactttcttcagacagtaagtgccacaaggaaaacctgactaataaagttgccttataagattttctcaagaaaaccaaaacccaaaaaacctaataaaatgagagtctcaaaccacaacagacgtgtcagatggacttgaaaattactgattattgccccagaatatccagtttgtgaaataaattgtgggatctgactctagtaaatctagggtttattataaagtttttaaaagtgaagtactaaatgtaaaaggcaatttgatcttgtcactgtgtagggaattacgtaggtgtaatactgaaaaggtgattcaaactggtgtttgtacttttagaaatcatggaaattacacaaaaatgtcacaaaccacagccattggaatttggcctgaaataccaagccagataaatgagaattgcttgagaaaatcggaaccagcttaaatgaaagcagcttatcattggcatgtagtatgtcttttaaaatgtataattatctaacagaaggaaaatagaatatttggagtagattacctcttcaaaaacaaaaagcatatgctatgtatccaaggtaaatttttaaaaaactaactcaaccctaaaaaatggcaaacttcaatgagtgaaagattttttaaaataacatattcaaaaaaatttaaatcaaatttatattttttaaagttcactttttaatgaaggactaaatcttgaactgtaaagrttatattagggttaaatgttttgcataagttattgttctaggatttggataatagaataatttacaaggccattgtttcaatacattctttatatgtttaccattacaaacatataaacaaaatactctgaaagatctgaatggaaagtattatatgaaattttatttttctataaatattgaggtatatatataattattttttgtttttatttcttagctacatctgctggaatgagatgtatgatgatttagagttggttctcttaagtgcagtatttctttaggataatcagtgatagtgcatatatgattgagctactgttgtgaacataattgatggcagaatgccttgatgcagctcttaccaacaatttatggagattaaaagggtggtagaactggtgggttagaaa

SEQ ID NO: 725351 - DNA, 1456 bp, Homo sapiens
ttggatttgttaataaaaagttttactgtgtacattttagaaggaacagctatgacaatatagtaattagagaataatttgctcaattttgtccccttttgttcttctgtgtactactaatgttgagggaatagttgacagatacttgtattcacatgtatctgtctgaattgtaggttgagaattgttcttaaaaggaagcaataggctaatgtttacctcataaatcaatgcaaattttggtagattttaagcaatttattgcttaataatttgcattaaaaagcttaatatgaaacaatttcattaatctactttcttcagacagtaagtgccacaaggaaaacctgactaataaagttgccttataagattttctcaagaaaaccaaaacccaaaaaacctaataaaatgagagtctcaaaccacaacagacgtgtcagatggacttgaaaattactgattattgccccagaatatccagtttgtgaaataaattgtgggatctgactctagtaaatctagggtttattataaagtttttaaaagtgaagtactaaatgtaaaaggcaatttgatcttgtcactgtgtagggaattacgtaggtgtaatactgaaaaggtgattcaaactggtgtttgtacttttagaaatcatggaaattacacaaaaatgtcacaaaccacagccattggaatttggcctgaaataccaagccagataaatgagaattgcttgagaaaatcggaaccagcttaaatgaaagcagcttatcattggcatgtagtatgtcttttaaaatgtataattatctaacagaaggaaaatagaatatttggagtagattacctcttcaaaaacaaaaagcatatgctatgtatccaaggtaaatttttaaaaaactaactcaaccctaaaaaatggcaaacttcaatgagtgaaagattttttaaaataacatattcaaaaaaatttaaatcaaatttatattttttaaagttcactttttaatgaaggactaaatcttgaactgtaaagaktatattagggttaaatgttttgcataagttattgttctaggatttggataatagaataatttacaaggccattgtttcaatacattctttatatgtttaccattacaaacatataaacaaaatactctgaaagatctgaatggaaagtattatatgaaattttatttttctataaatattgaggtatatatataattattttttgtttttatttcttagctacatctgctggaatgagatgtatgatgatttagagttggttctcttaagtgcagtatttctttaggataatcagtgatagtgcatatatgattgagctactgttgtgaacataattgatggcagaatgccttgatgcagctcttaccaacaatttatggagattaaaagggtggtagaactggtgggttagaaa

SEQ ID NO: 725352 - DNA, 597 bp, Homo sapiens
gacagggctgcagaacaacaagcaacggggttaaacttctsaaacaacaagcaacttctttatttgtacagagtaagaatatagaagaaaagcatcattttcctttttagcccttttattagtgttttgcctccacccaagttactgcataccaagcagctaataaaaaccaactgacttaaagtctctgaaatgcatgcaacttaaaattccctaaagcacacatcggttccgagtctgatttttacagggcagaggctacggtgctgctgggttaccaggggtgtctgtcatgctgctggggtttgaagtcgctgctgctgtggcttctggctgctgggtttctgtgtggggatcttctgcatttccagcatttttcttgcccttgtctgctgccacggcacccatctccatgattgcctgcagtggctgatctgcttcaaggttgctgggctggagttcatagacctggacttgacctgggacatcaatggctttctgttcaagtttttccaagatggtctgaaccttcctgacaccgtctctcctggcctgacgcacatcggctcgtccctcggggtccactgaatccagggc

SEQ ID NO: 725353 - DNA, 592 bp, Homo sapiens
tgaatttttaaaccatccattcatttattcattcattcaatgtcaaggaagaattttttaaataactgaaaaaaatatataattctactttaataaacactgaggaagatactttaaaacagcaaacgtttgttctccaattgaatgctaaggaatttccgtaaaaagtctccccagttcactggggcacagctctgtgctgggagctcttggacagctgagctgtttacaggctcctgacgcacagagctggcactctgcgattctaggcttttctgaattgacagtgaataagaaccttcacgtatacggtgtctgatcttgctgccagccacacgaaaaaaaatttttaagagactcttttcacagtgccaggggctgctctctgcmcagctatggaagtagggtctggctgctgccagctcccagcctctccagccctgctgtaagatgctgtgtcattgggagaaacaaaaaagagcttctccagacctgtaaggatgaacttagggaatcaatactgaagtcctttgtgcagagaaggccattcacaaagtgacaaaaaggagcaggcctctggggacctttagga

SEQ ID NO: 725354 - DNA, 1226 bp, Homo sapiens
tgtgtatttttaaataaaaagaatcaagtaaaagacaccctggtccccaatatattaaagcctatttcttgttcagtagtaacaggcaacatctaatttatgtatcataataactatcccagttttagaaatgaatttaacccctgtaaaaatttgtaatatgaaacacactaaaggtagttagaaacagcaaaatagaccttaacacagtgaccgtatcatattagtgtttttaggcagtggaaactccagctgataaattatccaaaggcataattatagcacatttctgcaaataggagctggatgtatacaaaataaagtctgattaggtgccatcagaatggcaccaatggatcaacagcctaaataacttaatgttagtgattaagatgatgactaattagttgttcatttgtctttaaaaaaaaagtgaaccctagcatggtcagttgccatttcgattatgaatcattatttttttccttgttatagagggagagcaaacagttggttcttttaaattgcttttccctggcatctggaacaggtcttgtgagtcagagtgaaatttccgatttaaatcaccccagccaagtatcatttgatcaagagtagaaaatagtgacggttagtaaattaacttctctcagtatagataaacacataataatttcaaactctccaggaaataccatcctattacaagaatttgtttaaaaattgtgagattttctccatgctgtgcaattgcccgtaagttgctgtaaagggagaagaacttggcttcgtttgaaggctgcagttcccagccctgcttcatcattgaacaaatgaagatcacgccttagctctttatctattaagtgagataaatcagaatgttctgattccatgtctctrgagtgaactttatcaccgggtgttcacatgagcagaagctaaatagttccaggtggtttgatgtgtctctcagactcgacatctgccctgtaatacagttccaagttttcatgccattgaccatttagaagtaaagcatgatcttgaacccagtctggccactagcttctctgacctaatcaaggtattgagcttttgctcgactctctccccacctggattcttgctccaataacatcttgcatcaataagaactcttagttttcaatgagtgaaaactgttttaaatcattgtaatctaaaagagaaaatttattggttca

SEQ ID NO: 725355 - DNA, 1226 bp, Homo sapiens
tgtgtatttttaaataaaaagaatcaagtaaaagacaccctggtccccaatatattaaagcctatttcttgttcagtagtaacaggcaacatctaatttatgtatcataataactatcccagttttagaaatgaatttaacccctgtaaaaatttgtaatatgaaacacactaaaggtagttagaaacagcaaaatagaccttaacacagtgaccgtatcatattagtgtttttaggcagtggaaactccagctgataaattatccaaaggcataattatagcacatttctgcaaataggagctggatgtatacaaaataaagtctgattaggtgccatcagaatggcaccaatggatcaacagcctaaataacttaatgttagtgattaagatgatgactaattagttgttcatttgtctttaaaaaaaaagtgaaccctagcatggtcagttgccatttcgattatgaatcattatttttttccttgttatagagggagagcaaacagttggttcttttaaattgcttttccctggcatctggaacaggtcttgtgagtcagagtgaaatttccgatttaaatcaccccagccaagtatcatttgatcaagagtagaaaatagtgacggttagtaaattaacttctctcagtatagataaacacataataatttcaaactctccaggaaataccatcctattacaagaatttgtttaaaaattgtgagattttctccatgctgtgcaattgcccgtaagttgctgtaaagggagaagaacttggcttcgtttgaaggctgcagttcccagccctgcttcatcattgaacaaatgaagatcacgccttagctctttatctattaagtgagataaatcagaatgttctgattccatgtctctagagtgaactttatcaccgggtgttcacatgagcagaagctaaatagttccaggtggtttgatgtgtctctcagactcgacatctgccctgtwatacagttccaagttttcatgccattgaccatttagaagtaaagcatgatcttgaacccagtctggccactagcttctctgacctaatcaaggtattgagcttttgctcgactctctccccacctggattcttgctccaataacatcttgcatcaataagaactcttagttttcaatgagtgaaaactgttttaaatcattgtaatctaaaagagaaaatttattggttca

SEQ ID NO: 725356 - DNA, 1226 bp, Homo sapiens
tgtgtatttttaaataaaaagaatcaagtaaaagacaccctggtccccaatatattaaagcctatttcttgttcagtagtaacaggcaacatctaatttatgtatcataataactatcccagttttagaaatgaatttaacccctgtaaaaatttgtaatatgaaacacactaaaggtagttagaaacagcaaaatagaccttaacacagtgaccgtatcatattagtgtttttaggcagtggaaactccagctgataaattatccaaaggcataattatagcacatttctgcaaataggagctggatgtatacaaaataaagtctgattaggtgccatcagaatggcaccaatggatcaacagcctaaataacttaatgttagtgattaagatgatgactaattagttgttcatttgtctttaaaaaaaaagtgaaccctagcatggtcagttgccatttcgattatgaatcattatttttttccttgttatagagggagagcaaacagttggttcttttaaattgcttttccctggcatctggaacaggtcttgtgagtcagagtgaaatttccgatttaaatcaccccagccaagtatcatttgatcaagagtagaaaatagtgacggttagtaaattaacttctctcagtatagataaacacataataatttcaaactctccaggaaataccatcctattacaagaatttgtttaaaaattgtgagattttctccatgctgtgcaattgcccgtaagttgctgtaaagggagaagaacttggcttcgtttgaaggctgcagttcccagccctgcttcatcattgaacaaatgaagatcacgccttagctctttatctattaagtgagataaatcagaatgttctgattccatgtctctagagtgaactttatcaccgggtgttcacatgagcagaagctaaatagttccaggtggtttgatgtgtctctcagactcgacatctgccctgtaatacagttccaagttttcatgccattgaccatttagaagtaaagcatgatcttgaacccagtctggccactagcttctctgacctaatcaaggtattgagcttttgctcgactctctccccacctggattcttgctccaataacatcttgcatcaayaagaactcttagttttcaatgagtgaaaactgttttaaatcattgtaatctaaaagagaaaatttattggttca

SEQ ID NO: 725357 - DNA, 627 bp, Homo sapiens
gtactcagccactgagatgttagggttattcaattctatcaactagcatccgcttacacattctttaacagacctaatattccctgtaatatacctcagctattcccscatgttaaacagtttcttatttagagcaaagaactgtatccaactaaaagttccatattgtaccttacctctttacattagatgtggtgaagtcccattcagaatttcttaaattttagttttatatgttttatgttctaaaagctttgtctaccccagagctgcaaaggttttctctcatttttttgtagaggttttccagttttagattatacattttgaattaatttttgtgtatgactgaagaaaaggtcaatgttcattgttttctcatcagaatatctagttaatctaacaccattttgttaaaaaagttttcttccttaattaaattggcttggcaactctgtcaaaaaatgaagtcattatatatgtgagaatcaatgtctgacctctcttttctatttcattgatctataagtctatctttccaccagtagcaatctatttgaattactgtatcctcatagtaaaattaaattatataaggtaagtcatctaactttaaaaaaatgcttt

SEQ ID NO: 725358 - DNA, 627 bp, Homo sapiens
gtactcagccactgagatgttagggttattcaattctatcaactagcatccgcttacacattctttaacagacctaatattccctgtaatatacctcagctattcccgcatgttaaacagtttcttatttagagcaaagaactgtatccaactaaaagttccatattgtaccttacctctttacattagatgtggtgaagtcccattcagaatttcttaaattttagttttatatgttttatgttctaaaagctttgtctaccccagagctgcaaaggttttctctcatttttttgtagaggttttccagttttagattatacattttgaattaatttttgtgtatgactgaagaaaaggtcaatgttcattgttttctcatcagaatatctagttaatctaacaccattttgttaaaaaagttttcttccttaattaaattggcttggcaactctgtcaaaaaatgaagtcattatatatgtgagaatcaatgtctgacctctcttttctmtttcattgatctataagtctatctttccaccagtagcaatctatttgaattactgtatcctcatagtaaaattaaattatataaggtaagtcatctaactttaaaaaaatgcttt

SEQ ID NO: 725359 - DNA, 627 bp, Homo sapiens
gtactcagccactgagatgttagggttattcaattctatcaactagcatccgcttacacattctttaacagacctaatattccctgtaatatacctcagctattcccgcatgttaaacagtttcttatttagagcaaagaactgtatccaactaaaagttccatattgtaccttacctctttacattagatgtggtgaagtcccattcagaatttcttaaattttagttttatatgttttatgttctaaaagctttgtctaccccagagctgcaaaggttttctctcatttttttgtagaggttttccagttttagattatacattttgaattaatttttgtgtatgactgaagaaaaggtcaatgttcattgttttctcatcagaatatctagttaatctaacaccattttgttaaaaaagttttcttccttaattaaattggcttggcaactctgtcaaaaaatgaagtcattatatatgtgagaatcaatgtctgacctctcttttctatttcattgatctataagtctatctttycaccagtagcaatctatttgaattactgtatcctcatagtaaaattaaattatataaggtaagtcatctaactttaaaaaaatgcttt

SEQ ID NO: 725360 - DNA, 596 bp, Homo sapiens
acaaaaaaaaataaccagcagataatttttttttttttaaagttgatgtattgctctattcttgttttaattttttaatggtaacaatttaactttttactggtaaaatctaatttgaaaagatatttttaactgaaaagcaaggaaggtaaatatattctgaaaaaatacactaaggcaagaaaaaatacatttatattaatgaataagcaacttttcttyccccccaaaaatgtataataaacaccagttcagaatcttgattacccctggtgttagatggagggtaagtatgaggaataggagaagaaagtgattgaaattatgtaggagaatagcagctttcaactgttattatggaattttattttctaagctagttactgaggtgtcatttaatcagtctttataatttttaatgtattaaatattttagaacacatcttttacattacatctaaagcagtagggccacaaataacttaaaaagattgtttcccttttctctttctacctctaaggaaggttatgtcaaaaccacaatgcaaaagccaatgcatttcttatacgtattgtttgtaaaaatcacacacaga

SEQ ID NO: 725361 - DNA, 596 bp, Homo sapiens
acaaaaaaaaataaccagcagataatttttttttttttaaagttgatgtattgctctattcttgttttaattttttaatggtaacaatttaactttttactggtaaaatctaatttgaaaagatatttttaactgaaaagcaaggaaggtaaatatattctgaaaaaatacactaaggcaagaaaaaatacatttatattaatgaataagcaacttttctttcccccmaaaaatgtataataaacaccagttcagaatcttgattacccctggtgttagatggagggtaagtatgaggaataggagaagaaagtgattgaaattatgtaggagaatagcagctttcaactgttattatggaattttattttctaagctagttactgaggtgtcatttaatcagtctttataatttttaatgtattaaatattttagaacacatcttttacattacatctaaagcagtagggccacaaataacttaaaaagattgtttcccttttctctttctacctctaaggaaggttatgtcaaaaccacaatgcaaaagccaatgcatttcttatacgtattgtttgtaaaaatcacacacaga

SEQ ID NO: 725362 - DNA, 596 bp, Homo sapiens
acaaaaaaaaataaccagcagataatttttttttttttaaagttgatgtattgctctattcttgttttaattttttaatggtaacaatttaactttttactggtaaaatctaatttgaaaagatatttttaactgaaaagcaaggaaggtaaatatattctgaaaaaatacactaaggcaagaaaaaatacatttatattaatgaataagcaacttttctttccccccaaaaatgtataataaacaccagttcagaatcttgattacccctggtgttagatggagggtaagtatgaggaataggagaagaaagtgattgmaattatgtaggagaatagcagctttcaactgttattatggaattttattttctaagctagttactgaggtgtcatttaatcagtctttataatttttaatgtattaaatattttagaacacatcttttacattacatctaaagcagtagggccacaaataacttaaaaagattgtttcccttttctctttctacctctaaggaaggttatgtcaaaaccacaatgcaaaagccaatgcatttcttatacgtattgtttgtaaaaatcacacacaga

SEQ ID NO: 725363 - DNA, 663 bp, Homo sapiens
atattcaggtaacaaacctgtacatgtatcccctgaatctaaaagaaaagttgaaattaaaataataataatacaaaaataaggaaattataggcttgatcccttttagtgtttaagttctcaaatgatgttgtttaacatttgaatgagtttttgatggatctatttgaacactgattggggtggcaaagatgattcttccaatatcattggaagactttgatcataactgatcaggcattacctttagaaggttttataatctttcattgctcaataattgagtgtcttctatggcaacatggaatgcaattgaattttattttgaactcttctttatgtctagtaacacagttttatcatctttttctaaattcaattttccctttttgggagaaaagcatgtgggtattatataattcctagaagtctctttctgtaagatggaggggggctaatataactagaaggcaaatgtgagtcctttgacacctagttgaaaagttagcggctgagacttgwatgctgatacaggagtatttgtgacacataccgtttaaattttttgtttactctgagcaatggaatcttgtcataaggtggaatttcttacatatagtgtggatccacatcagcaagagcttgtgctcacaacaagagctt

SEQ ID NO: 725364 - DNA, 1332 bp, Homo sapiens
agtaataaatattcaccataaatattttgaaaaatataaaactgtctataaaagaaatttgaaatgattgctaatctcaaaatatagatacctgtcagtactttggcattttatcctccttgtggctgaggtcacatatcttgagactgaagcacaaaatttctataccatacagtttatagtttaggccacaacatcatttttaaaattgtttctttggtttttacttgatttgctgatgttttattttttagaaaattgcagatgtgatttttaggcagctgattggaatgttctggttgctctgaataggactarctactttgttttttactgaaggacaaatattattcctacacacataaaaaacctcaaagaatgagtaatgatactgtttaaatctgcccttataactccaaagaatgacttcaaattttctttcttccaaagcaacttttaaaagcctttccactgcacagtgaaagaaaaccacaaactccttgtttaataagtgggatcacgtgcttttaacacgaggaaaaggtcaatctgaagcaactgatatggaactgccagagtaggtacgtaaatttaggagttacatcaatttgggagggctgcagaaatgtggatcagattttaatcacactgaggaagtttctttgagcaaaagacgtgatggttgttctctagaacctttctgtcctgtccgttgctttgccaagggagctagaaaagaaataaacatttaagaacttaaaaggcttctggataaaactcagcttggtgcaacacattttagctatcacagctttactcccaagcttccacctttcctaggagcgcagtaaaaacctgagccaaagaaaccaaacaatagaactgaaattctttaaacttgagttcttgaggttatagtctttgtgcactccataaagtcaaagccctaaaaagatttttagaaaacaaaacacttgtatctgtatctatttccccaaacctctctacatttacttaccttttgcagactcatgctttctcttttccttgtgattgcatttggatagaatgaagacctctcctacagttctcaacttaaattctttcttttatttcttagctacgaaagaaaattcaaaaaattcaatgctctactttgtaactccctggacatagtgagtccattatgtacatcatgaggagggagtggagaaagtggaattcttatgtaaattcatacagctttggaaaatggtttagcagtacctactaaagctgagcatatgcaaaaccagtgacccaggaatgtcatgggtacataacctacaaaaa

SEQ ID NO: 725365 - DNA, 1075 bp, Homo sapiens
tcggggtagggagaggggagtgggagagggatgctagtgatcgacatggaatttttttaaaaaacagttttccagagtttaaatcaaacttattgcaggaacaacaaarcacttggatagttggattcctggtaagaatgtgaatattcttgtgcaggataaaatgctttattttctaaaggtttataatctctgcagaagtttctaattcaacagttcctttgggaaggtgcatagcaaagatgccttattcatcagcacagcaatagatctaacgttcccgccaggggtactggtcagcgttggttctttagaaagcctgtgtagaatcgattaaaaattgctcagcacttactacagccattttcaaccaagaaaaaaataattttcgggactcacttatattccacagtttaaatatggacaattaataggtcaaggtccaggctggaaggggaccacttcgaatcttgaatgcaggggcaaacagctcaagacaccatggctgatgaagacgctatgtacacgctttccagtatgaaaaccaatgagctacatggggctggcgaacacttgaaaggtggtgagttagagttgagatgtgctggacgtgtaaaataatacatcctggagtttgaagacttttgtataaaattacttaagatatctgaatttttcaaatgtcgattttttgttgaaatgatatttgaacagattggattaaataaaatgtattattaaaattaatttcacccattgctttttcctttatttaatgtgggctacttggaaatgtaaaattacacatgtagccctcattctatttatttctatcggacaatactgctccaggggtagaggaacaaaagaatcccaaagatgatgtccccttgagtgaacaagaaatcaaaatatcctgggagaagataatatcacagacatttatttatgtagctgacagtttctcaagactttgtaccaggaactttgttagtcattgaggttaacagtgattcagagatttgcgtttttttctagaaaagctgaaggcatcaagtaaaggaagaagtctggg

SEQ ID NO: 725366 - DNA, 1075 bp, Homo sapiens
tcggggtagggagaggggagtgggagagggatgctagtgatcgacatggaatttttttaaaaaacagttttccagagtttaaatcaaacttattgcaggaacaacaaaacacttggatagttggattcctggtaagaatgtsaatattcttgtgcaggataaaatgctttattttctaaaggtttataatctctgcagaagtttctaattcaacagttcctttgggaaggtgcatagcaaagatgccttattcatcagcacagcaatagatctaacgttcccgccaggggtactggtcagcgttggttctttagaaagcctgtgtagaatcgattaaaaattgctcagcacttactacagccattttcaaccaagaaaaaaataattttcgggactcacttatattccacagtttaaatatggacaattaataggtcaaggtccaggctggaaggggaccacttcgaatcttgaatgcaggggcaaacagctcaagacaccatggctgatgaagacgctatgtacacgctttccagtatgaaaaccaatgagctacatggggctggcgaacacttgaaaggtggtgagttagagttgagatgtgctggacgtgtaaaataatacatcctggagtttgaagacttttgtataaaattacttaagatatctgaatttttcaaatgtcgattttttgttgaaatgatatttgaacagattggattaaataaaatgtattattaaaattaatttcacccattgctttttcctttatttaatgtgggctacttggaaatgtaaaattacacatgtagccctcattctatttatttctatcggacaatactgctccaggggtagaggaacaaaagaatcccaaagatgatgtccccttgagtgaacaagaaatcaaaatatcctgggagaagataatatcacagacatttatttatgtagctgacagtttctcaagactttgtaccaggaactttgttagtcattgaggttaacagtgattcagagatttgcgtttttttctagaaaagctgaaggcatcaagtaaaggaagaagtctggg

SEQ ID NO: 725367 - DNA, 915 bp, Homo sapiens
cctgagaacctgcccctttgctccacctctgctgacgtctcactggtataaaccaccaacctccccgcttggaggattccttccatctcctctggtttcactttcacatctcaacgcactatttctactacagcatcccaaagtgggctttctactacaagttgcacaaaatacaatcatttttccaggctccaaagaaaccccgcatgacccaggccttggtgccttccccagtgtgggcttccagtctgcgcagcccttgcagctgtcaccacactggtcccatttcagttcctggaacacrttggactctccctcagcagggtcttccagcctgtaaggagcttccttcctcctgctcttcacctaaccagctctgtcactcttcagctgtcagtttcaatgttccctccgttggggagattcccggaccacagagtctcagtaggccacatgcttactctccaccttgcaccttgttcactatctttgtagcacttaatataaatcgaagccatacatagctgtttattatctgtttctccaacttcgcaggaccacgtctgttttgtgttatgctgtcattggaagaatgcggtatcttccatgaatcagatacccagtgaggatttgtggaatgaaaaaggaaacggtgggagaaggaagtcaaaagatttcataatgagtgacagagtggagtaatagacattggagactacagatggcaggatgggagggagggaggattgaaaattacctattgggtgtaatattcactcttcggatggtgggttcactagaagcccagacttccccaccaggtaatataggcatagaagaaatctgtacttgtaggccaggtgtggtggctcatgcctataatcccagcactttggaaggccaagacaggtgaat

SEQ ID NO: 725368 - DNA, 645 bp, Homo sapiens
gattattttttcctgatatttactgtgaggacctggtgtagcttctggaggtaaaatttacaaaartataggggatccccacatccctgaccaccatggagtttttaactttttagatttgtccatattgagactccaccgagtcatcaattacaatttatgttttcctctccaagcattggttctgatagaggtttctgctagtgatccacccctgcgccccccaaccctgtggttacattgtagtctctgtattttcgtgaatgtctctccagttttgaaggtattagcttttcctgtgaccttacttatttgatagatctaagaagaactgttgacatgtaagtttgtttagcattttactttgattttagggcagagtggtaatttctaaatttcttacataccaaatcagagacctgtctttgaaaactttaaagaatgggaagtttatccaaatgaccaaaaatgaatcagaaatagtctgttgaataaaaacatttcagaaagcaacagaccaggacattatttttttggaacctgaaacaaactgacgaaagtaaatgagatcttatttatgtagaaattgcaatttaaggtgtttagaatatatttatgctaaagacatttacaggacattataat

SEQ ID NO: 725369 - DNA, 645 bp, Homo sapiens
gattattttttcctgatatttactgtgaggacctggtgtagcttctggaggtaaaatttacaaaagtataggggatccccacatccctgaccaccatggagtttttaactttttagatttgtccatattgagactccaccgagtcatcaattacaatttatgttttcctctccaagcattggttctgatagaggtttctgctagtgatccacccctgcgccccccaaccctgtggttacattgtagtctctgtattttcgtgaatgtctctccagttttgaaggtattagcttttcctgtgaccttacttatttgatagatctaagaagaactgttgayatgtaagtttgtttagcattttactttgattttagggcagagtggtaatttctaaatttcttacataccaaatcagagacctgtctttgaaaactttaaagaatgggaagtttatccaaatgaccaaaaatgaatcagaaatagtctgttgaataaaaacatttcagaaagcaacagaccaggacattatttttttggaacctgaaacaaactgacgaaagtaaatgagatcttatttatgtagaaattgcaatttaaggtgtttagaatatatttatgctaaagacatttacaggacattataat

SEQ ID NO: 725370 - DNA, 645 bp, Homo sapiens
gattattttttcctgatatttactgtgaggacctggtgtagcttctggaggtaaaatttacaaaagtataggggatccccacatccctgaccaccatggagtttttaactttttagatttgtccatattgagactccaccgagtcatcaattacaatttatgttttcctctccaagcattggttctgatagaggtttctgctagtgatccacccctgcgccccccaaccctgtggttacattgtagtctctgtattttcgtgaatgtctctccagttttgaaggtattagcttttcctgtgaccttacttatttgatagatctaagaagaactgttgacatgtaagtttgtttagcattttactttgrttttagggcagagtggtaatttctaaatttcttacataccaaatcagagacctgtctttgaaaactttaaagaatgggaagtttatccaaatgaccaaaaatgaatcagaaatagtctgttgaataaaaacatttcagaaagcaacagaccaggacattatttttttggaacctgaaacaaactgacgaaagtaaatgagatcttatttatgtagaaattgcaatttaaggtgtttagaatatatttatgctaaagacatttacaggacattataat

SEQ ID NO: 725371 - DNA, 1427 bp, Homo sapiens
ggtttcaatcaagatctgaaagaaaaggctgtcrtagtgtctcagacagaggcacagcatgtgccaaggccctgagacaggaaagagctgagtgagacaggatttgagtgaggccggagcagctggggctcccaagtcaggagaggattggaaggcaaggggtctaagtggctttgagggccagatgtggggacagaagccccgggggccatcaagcatggttcctcccattcgcagcaggctgggattagaaaaggaaagggtgttctgcgtgtggagccacctgctgttgggtgttgtattaggggcctaatctacagcgtggatttcatctcaaccacagctcagtgaggccagtcgtataagctctgtttcgcagatgagacacctgaggttgagaatgaagacatgacttgctcaggtccccagagacgagtaagagggctgagaagggagccagaaccctcggcctttggagcctgcatgggtccaccactctgtcctgccctccccagagcccagggctgcactaggaggaacccagatccgctgatgctggatgctggggtcttatgagggtggttacagggtagatgcaaagtgcagaggggctgggagcctgggccccttcagggcatagggaagctgcagcaccacctccaacctttgtcatggggtgtgagtgggcattgccctctggatgggaatccgggttttcgatgagctggggaggaacccggggtcccacagggcaggagctgcacaccagaggggaaaaggcctctttgtcttatgtgaaaggtgctccagggcagggcagggcagggcagggcagggcagggcagggcagctgagcctgacttgtgtctcctaggcttttgttctgccagaaccactcggggacagtttttcttttcaatcatttcattctgaatccattaacttttttctatatttctcaatgtacaaaatgattgataggagagagatgaaagagagacctatttcactgcaattgttgagcagctgaaggagatttctatctcatctggagaagaaggaggaggagggggaaaggaaaggcaaaatgagcctggaccttctcttcgtccacttaaataagaatttctgacttggttaatccacaaatgtttcctgagcacctacaatgcaccagttgatatgtaggtgccagagagtagacagtaaattttaaggcgctggtgtcacccacaaatgactaaggacctgcacactggtggccacagctcaaggctaaggaatctcctgggtacgctcacttctgcttatgatggacattctaggtaatcttcacaatgatgtgtgagctggaaagaatggtaggattatagcaggactacctgctctatgagacttatggctcgttgggaaccaggtcttattcg

SEQ ID NO: 725372 - DNA, 840 bp, Homo sapiens
tctcctgacctcgtgatccgcccgcctcccctttcttaaaacaggttttcaaaaccagtcactagggagatatttgaaggacacagggaatacacttcagggtggatattgactgagcacataagtccagagccacctgcttggtttggaatctcagtgctatctcctaacaggcaagtgactacactctctctccctggtttttcatctataaaatgggagaataataatagtacctaccttgtagagttgttttagggaattaaaaaactaaaaaaatagaatgcttagaatagtggctacaacatggcaatagtacaacatgatcaaaatgataatagtggccgggcgtggcggctcgcccctataatcccagcactttgggaggcccaggtgggtggatcacctgaggtcaggagttccagacaaacccggtcaacatggtgaaactccatctctactaaaaataaaaaaattagccaggcatggtgacaggcacctgtaatcccagctactcaggaggctgaggggaactgcttgaacccgggaggcagaggttgcagtgagccaagatcgtatcactgcactctagccttggcaacagagcgagactcagtctcaaaaaaaaaaaaaaattaaattaaataaataaataaataaaatgatgatggtactgccagtcatttcttgygattggtgtgtaaatcatggcatagttcttatagtagcttcatgtgctgtggcctggtgagggctgcaagggaggactgcatccctgggggagaagcagtcaggccaagtgtgaatttgggaagatgatgattgtcacaaaggcagtgg

SEQ ID NO: 725373 - DNA, 643 bp, Homo sapiens
gaggaccttgtgtctggggtgcagcaaaggatctggattccccacagtcctggggtgaaatgcaggggccctggggacccttgaatcaggggttgagctggcagcctgagcctcagctttagttgtttccctctagatcctggtgtggaaagctgataaaagagccggctgctgctcagggtggaaggtcccaggctgagcccacacatggcctggggacaaggcaaccaaccgaggcatcccctccagttccccacccactcatggccctggcccctctctcctgcagaggtcggatccgcagctgcttgcccggttctactatgccgacgaggagctgaaccaggtggccgcggagctggacagcctggatgggcggaaggacccccagcggtgcacgctgctggtcagccagttccgctcctgtcaggtgagccacggggcagcagaagctggctggccccgctgggcattggacagagtggcctgtcctcagtagaccaaggctttgtcacctgctggccccctgtggtggygttgtcagggtcgggtgctagagaagccaggcccaggaagagggaccgtcccgggcaggatgcgtggggtgggtagccgggctggaagtgagaaaccgcacgggaca

SEQ ID NO: 725374 - DNA, 569 bp, Homo sapiens
caaatgggcagcatttggagtacacttacaactatttctaatgacattttaaaagtacttatttgttgtttatctgaaattgaaatttaactgggtgtcctatattttatctggagattctacacaaatataacatcagcaaacaaatcctgccacaagagagtgtagactgagaattcccatttcctcagagaagcagagcaggtgcgtgcctcggcctatggagtcaggatggtgtcatgcgagagccagggtgccgggggcctggttggggtttcacttctaaatctgggtgctattcacatgggtggattcagcttatgaaagttctgcccagctctgcaaagcgcacttcctcacaatagccatggctgtgctggaattgtcccatgtgggactcagaccacagacacacccggagcttctcgcagcagagagcagcccacagtyggcctgtaggagcctgctccaggagcttcctgctcagcatcactgaattaactgcacctttgggtctcggcctcaatgcttcttcctccaggaagccttcccggcctcagccaggtgcc

SEQ ID NO: 725375 - DNA, 616 bp, Homo sapiens
tctatttggtaagacaatatgaaaaaatgaaaaatggagatttgtgttgagctaattctcttttattggtcttcatttcaactttctctgtaccttctgtccagaataaacagagaataggctaaaacaaggtttgatttattaagcagaatataagctccatcagggagattttgtttattcttgtatcagtaatctctaaaacagtacttggcacaatagcatttgttgaatatatgaatgcacagaacagcttacatatcgagtacacttcagcaagagtttcctttgaatcacttaaaattatctatcagaagttgttgcaattaatcttacttagaatttatattaaacctgttatggattttaaatcgaggtttatttattgctaaaattgcgggaagttattaagtcctttaaagtctttccatgtaaattatattttaattttataattggtattaggaataaagtgttttaatttttatttttattttccttttttaggagttaacagagcagtttcataaagttgaatctcarctgaataagctaaatcatctcctcactgatattcttgctgatgtgaagacaaaaagaaaaactttggcaaata

SEQ ID NO: 725376 - DNA, 605 bp, Homo sapiens
atttttttttagtattataaattttttccacaacatttttggggcgtctttttgtaatacattaggaaaagtgtttktttttttttttagaaaaaacaaacaaaaaactaaaatctgtaattccacacaattttcttttcttttctttcttttttttgagttggagtcttgctctgtcacccaagctggagtacagtggtgcgatctcggctcactgcaaccccccctcctgggttcaagggattctcctgccacagcctcctgagtagccagtattacaggcgcccaccaccatgcctggctaatttttgtatttttagtagagacggggtttcgccatgttggttaggttggtcttaaactcctgacctcaagtgatccacccacctcggcttcccaaagacatttttcttaaatttttttttacatatttatatacatgcatacatacatagttttaatataaaattgtgagaaggttcaaggttttttttgcttgtcgaaccctctcccttattgttaacccatgttaacaacttagtatgtgccttttatatttttgttaatttttttctatgattataatttatatggttggagagtca

SEQ ID NO: 725377 - DNA, 1495 bp, Homo sapiens
tgctgtgtttgttattgttgattactgttgttatttttactgccagaaataatagtagtagtagttggaggaggaggaggaagaggaggaggaggaggattataggtgtgtcacagactgaaaatgagtggggaggcaatgtcctatagtgcaaaattttagctttagaggctgaaaggcctgggtttgattactgcttttattatttatcagctgtgtgacttaaaacttaacctagttgttctttcatgagtaaagtgaataaaataatatacgaatgattacatttcagtattattgtgaagaccacattgaagtcacatatataaaaatacttgataagctgaaatastatacgttatatgtgtatattgctatttgccaactctcttaaaaagaaccaaaaagagttggcaaatagcaacatacacacatagcgtatttatatgttttattcttataaagaaccaaggagaattgaaaatgacttataaaaatgacaaaacatttatattgtcaaaattggtataatatgaagataaacccagagtagaaagctttgaattattattatatcatttattattttctttgtgctatgatatacactgtaaaaatcttgcctcatttactcctttcaacacctctttaggtctaaggcaggaacttgatttaattcaagttttgaaatattactatagcttcaatgtaaatacctcacagaaaacaaaacaaaacaaagcaaaactgaagttcagagaggttaacttgcctgtgttcacaaagccagtaagccagtaagctacatagccaggactggaatctagccctgatttcaaagcctcttaactgaacttgaaagatggcagtgggaggtgaaaagattttgagaaaatactataagggatgagtggaagctagacattattgaagatactctaaataaatgttgtttcttctcctattttcgaccttagtaaaaatgttcttaaggaaaatctaaacctagtcaataacctgagggagccaaggaatgtaatataagcccaatgagagcaaagactatttcttctttaccactgtattccctgtgactagaacagtgcctagcatatagcaggccctcaacaaataattattacttttatgtataaaatacatcaaaacatatatggtaaaaaaaaaagacctagtcatatttttagattctttttacttagagttctttttttttcttctcttcaacttttattttaaatttagggggacatgtgcaggatgtgcagatttgttacatgggtaaacatgtgccacggtggtttgctgcacagatcatcccatcacctaggtattaagcccagcatccattagctattcttcctgatgctctgacaactctagtaagagttgtttgtttgtttatttttttcttgtaaatttgtttaatttccttgtagactctggatattagacctttgtcagatggatagcttgc

SEQ ID NO: 725378 - DNA, 886 bp, Homo sapiens
tttagctgctcaggtgcaaattcagagcagtcaaatgactgaatttatccagggtcaaggacttgccaggctagggcaagcaagttgaggaagtgattacaatggcaaaccactgaaaatcctgcataaggagggaagaggttgacagatagtgacaaagtggcaagcttaatagattggagtcttgatgaagttcatttactcatttaacaaagaatttgaaagatagaaattataatactcggtattgactggggataagggaaaattagaaacggtaaagggatcattagggacatgtttttggcacagattaaaaaaagggattctaaatttctcaatatatttcatatctgactacacaatctttcatcttacacttttagtagatttctagcttaaatactcccaacagaaagtagctttactgttaaacaaattcaccattcttgtctttgacctttaacctgtggcctccgtggaagtggtccaggaaataatcttagaattaattgcttaaactttccaactatcttgttgagttactgccagtccataaatatcttaagaaataaaaaagatatagtgcttaaaatgtgtatgaaagkgttagagaatattatattgctataatcatagaagcagctttcatttcatatgatttattattaagaacaaagtccagtaccatgctgttttgcttactgtagccttgtagtatagtttgaagtcaggtagtgtgatgcctccagctttgttcttttggcttaggattgacttggcaatgtgggctcttttttggttccatatgaactttaaagtagttttttccaatctgtaaagaaagtcattggtaacttgatggggatggcattgaatctataaa

SEQ ID NO: 725379 - DNA, 670 bp, Homo sapiens
ggctagacttggaactcatatggtctggctccggcgaccatgctgtgacctccatgttatgctgcttttggggaagtggagtgggctcatgttttcttggaaaagtaatttggcagctcagtcaggacaccagcctctctcctgaccatgctctcctttccccatttatgtgaaagcagtgttagtgatggagagccctgtcttccacccctccagcagttgtcgccaagtgaccttccttctgtggtgggacgatgggtctggttaagaggtgtaggagagatgaggctggcagactagaactgaaggctgcaacaaaagcaakaactggcaatccccaggccatgtagagcctacagacttgtttagccctcatggaggtaggtttgttagtttttatacttgagccaacatttatgaattagggggcttcatgttagaatccccagtcctaacttcccttgaagaatgagaagattggcaacactggacctacattccccaagacaaccctgggcttcagctgcctcctttgcacatgtcctgcagttctcagcactcaaattggagtctgcacttttccccaacctggcctacttcactctgtacagtgatctgcctgatccctgcaggtggctggctttgtgagtccttgtcttgaatggtctac

SEQ ID NO: 725380 - DNA, 589 bp, Homo sapiens
tggcggatcacttgaggtcaggagttcaagaccagcctggtcaacatggtgaaaccccatctccactaaaaatacaaaaacattagccaggtgtggtggcatgctcctgtagtcccagctactctggaggctgaggcaggagaattgcttgaacccgggaggtggaggttgcagtgagccaagatcataccactccagcctgggcaacagagtgagactccatctcaaaaaaaaaaaaaaattgtctgtaactgtcttctactcagcaatacaagtaacatcccagagttgcactaagcctggacgcgggccccaccctcaatctcagacgggtcagaggcatctgaaagtattcagtcatccttccccattcagacttgttctgtctaaaccaaaggaagaccaggagcctaaataacttccagaggatgccagttgctcagctctcccggctccagaagctttggcagcacccwactgatgtcatggcctgctcaactctttacagtgtccagaaatatagactttgagttccatattttcccagactacagcaaagtgcacaaaagtggcccactcttgaggtaca

SEQ ID NO: 725381 - DNA, 1091 bp, Homo sapiens
  misc_feature 2, 3, 4, 5, 6, 7, 8, 9, 10, 11, 12, 13, 14, 15, 16, 17, 18,19, 20, 21, 22, 23, 24, 25, 26, 27, 28, 29, 30, 31, 32,33, 34, 35, 36, 37, 38, 39, 40, 41, 42, 43, 44, 45, 46,47, 48, 49, 50, 51, 52, 53, 54, 55, 56, 57, 58, 59, 60,61: n = A,T,C or G
  misc_feature 62, 63, 64, 65, 66, 67, 68, 69, 70, 71, 72, 73, 74, 75, 76,77, 78, 79, 80, 81, 82, 83, 84, 85, 86, 87, 88, 89, 90,91, 92, 93, 94, 95, 96, 97, 98, 99, 100, 101: n = A,T,C or G
annnnnnnnnnnnnnnnnnnnnnnnnnnnnnnnnnnnnnnnnnnnnnnnnnnnnnnnnnnnnnnnnnnnnnnnnnnnnnnnnnnnnnnnnnnnnnnnnnnnaccttcaaactgcatcactggctttcctgggcctccagcttgtcaagggcagatagtgcaacttctcagcctccataattgcatgagcyaataccttctaataactctctctctctctctctgtctgaacatatgtatatattctctctcaagaaccttgactagtacatatatttagttgtcttattagatgtaaattatggtttaataaaattggtaaagttttacagaaagcacgtggggtctttcaaagggactccctgcccgggaacctgtatcacatttattggcagtgggaattataactttagagagccagattattttcagaaatccattgaaaaaggtgttaagtgccagcagagggggcaagaatacttttctccagtggtgggtatcaacaagagagggataatggcataaaacccagttcagttaccctgcaaatggggagaagcagaatgagctagttaaggtcaccaaacagtgcatgttggcaccaggagcaacagcaaaatttaattagtttctgaggatgttgctggagatctcactgaattagttgtattttattaccataattaatgtgatataaacctttaatattctgtcccccatcctgaagctgttgtcttctgatgaaaatggaatgtatatccattttatggtgttgtaacaggacctggcatgaataagactgtagaggcttaactgctcttaacctgaattcttcattttaagaaataaaaatattagtctaggtgatttcccaggaccctttaattttatattttagggcgcagtcccttccttgaaaaactatgaaaaggaatgacatttacactatgaaagatcagtacttatatacatggagaactcaatataattgattataactattataatatcatataattatattatgcaaaataattatataataatatattttcataaagtggatggaaacaagataagtataaaaatata

SEQ ID NO: 725382 - DNA, 1091 bp, Homo sapiens
  misc_feature 2, 3, 4, 5, 6, 7, 8, 9, 10, 11, 12, 13, 14, 15, 16, 17, 18,19, 20, 21, 22, 23, 24, 25, 26, 27, 28, 29, 30, 31, 32,33, 34, 35, 36, 37, 38, 39, 40, 41, 42, 43, 44, 45, 46,47, 48, 49, 50, 51, 52, 53, 54, 55, 56, 57, 58, 59, 60,61: n = A,T,C or G
  misc_feature 62, 63, 64, 65, 66, 67, 68, 69, 70, 71, 72, 73, 74, 75, 76,77, 78, 79, 80, 81, 82, 83, 84, 85, 86, 87, 88, 89, 90,91, 92, 93, 94, 95, 96, 97, 98, 99, 100, 101: n = A,T,C or G
annnnnnnnnnnnnnnnnnnnnnnnnnnnnnnnnnnnnnnnnnnnnnnnnnnnnnnnnnnnnnnnnnnnnnnnnnnnnnnnnnnnnnnnnnnnnnnnnnnnaccttcaaactgcatcactggctttcctgggcctccagcttgtcaagggcagatagtgcaacttctcagcctccataattgcatgagccaataccttctaataactctctctctctctctctgtctgaacatatgtatatattctctctcaagaaccttgactagtacatatatttagttgtcttattagatgtaaattatggtttaataaaattggtaaagttttacagaaagcacgtggggtctttcaaagggactccctgcccgggaacctgtatcacatttattggcagtgggaattataactttasagagccagattattttcagaaatccattgaaaaaggtgttaagtgccagcagagggggcaagaatacttttctccagtggtgggtatcaacaagagagggataatggcataaaacccagttcagttaccctgcaaatggggagaagcagaatgagctagttaaggtcaccaaacagtgcatgttggcaccaggagcaacagcaaaatttaattagtttctgaggatgttgctggagatctcactgaattagttgtattttattaccataattaatgtgatataaacctttaatattctgtcccccatcctgaagctgttgtcttctgatgaaaatggaatgtatatccattttatggtgttgtaacaggacctggcatgaataagactgtagaggcttaactgctcttaacctgaattcttcattttaagaaataaaaatattagtctaggtgatttcccaggaccctttaattttatattttagggcgcagtcccttccttgaaaaactatgaaaaggaatgacatttacactatgaaagatcagtacttatatacatggagaactcaatataattgattataactattataatatcatataattatattatgcaaaataattatataataatatattttcataaagtggatggaaacaagataagtataaaaatata

SEQ ID NO: 725383 - DNA, 616 bp, Homo sapiens
ctttgatttttatcagggggccatctaggttatgtttccatcctttcagcaatgtccctggaccactccagatgcaaacgtgctatttaaaaggttcaattccttctgtgcttgcaactttcaacaacatccattgccagccaggagtctggataccagctggggctctcctcctgacaatgtcagtaactatctgagtgacctgagacaagttgcttaatgtatttgtggatgaactcctctgtgtataaaagaagacactgaccctttctctaccccacacacaaggctgctgggattaaaaataaaggagatcgcagataagaaaatgatgtaagaaattgaaagcaatgaacaaacatggagctctattcaattataggagtattccttgactactcactctcttcgtaggactatttttgattccccagttttgtcctrtgtgaaagagcatgtcaattcaagttcacaagattgtgtctgacaaaggtggacaaaactagagctttgtggtgatctatagatgttgacacacctttcccacaagtatggaaatgcatttgtatggacagcaaaccaatggaaaattgaactcaatctctagtgttacaat

SEQ ID NO: 725384 - DNA, 622 bp, Homo sapiens
tttcctgtccttttagtggctccccagagacaggcttccttagggaggaatcagggtgtaggcgaatgctccattaattttcttgttggcattttacagccagtggtgtggatgacccaagagcagccaggatgggagacagctagacagagcctgcaagcccctctggaatactttcactatcagaacacaatgaatgacaaacctttaaaaactcctatgagttacagagaaagcttccagtgaagatggtrgtattggctgagtctaggaaatggaagaaaggaaaaacagaacagcaggagcaaaaaaataaaggcaacattctagcatgttaactatgtgtgtccttatttctttcatcttaaaattctaattttaaaatgttaaaatgataaatactatataacattatcggatgtttaagaaatgtaataaataaatatcacgcacctcactaccaaaacacatcattcattttaattttgcatatctcttcaagtattcattcttctactttttttttttttttttttttttttttttttagacagagtattgctctgtcgcccaggctggagtgcagtggcacagtctcggctcactgcaacctctgcctctg

SEQ ID NO: 725385 - DNA, 622 bp, Homo sapiens
tttcctgtccttttagtggctccccagagacaggcttccttagggaggaatcagggtgtaggcgaatgctccattaattttcttgttggcattttacagccagtggtgtggatgacccaagagcagccaggatgggagacagctagacagagcctgcaagcccctctggaatactttcactatcagaacacaatgaatgacaaacctttaaaaactcctatgagttacagagaaagcttccagtgaagatggtagtattggctgagtctaggaaatggaagaaaggaaaaacagaacagcaggagcaaaaaaataaaggcaacattctagcatgttaactatgtgtgtccttatttctttcatcttaaaattctaattttaaaatgttaaaatgataaatactatataacattatmggatgtttaagaaatgtaataaataaatatcacgcacctcactaccaaaacacatcattcattttaattttgcatatctcttcaagtattcattcttctactttttttttttttttttttttttttttttttagacagagtattgctctgtcgcccaggctggagtgcagtggcacagtctcggctcactgcaacctctgcctctg

SEQ ID NO: 725386 - DNA, 2416 bp, Homo sapiens
catgggtccttgtaagagggtggaaggagaaacaaaagaggaaaaggcaatatgacaatggaagaagagactaaagttctacagccacaagccaagctatcctagcagcctctagaagatggaagaggcaaggaatggtctcttctctaaaggcttcatgagaaaccagctctgctgacatcttgattgcttgattatagcctcataagactcttttggcattctgacctccaggtctgtaagacaatacatttgtgtgtgttcatccaaggatgtgatttttttacagcagcaataggaaactaatatgatagcttttgaaaagtctggtcaataactacatggtactgtcccatcatgtactacaaaattcaaacctaaatgtggtgcttactctgaaatactcttaatggatctctgtaagtatcacttgttctctgcagtcgtaaatgtaacacattttaaattgtgtagcattgtacaagtataaggtttttattgttagggaagaaataattatgaaaaattaagaacacagacttaaaaatcaattttccaaatttcaaatctcagctattacatatatagtcctgtgacctgagtatgttactaaacctctcaataccccagttttactcatgttatatactgattagaagtgcttcctagaaatacaaatttattagcgatatcctgggctgaaaaattaaacttttcacgacaaaggtcatggaagctgtatatttcataagtactcaagtaattcctattatcaaagaagttggggaaaacaccagtgctgattttaacctttgctacacatattacatcgttagcttcaaaaaagttacacagaagagagaggccagtgattctctcttacttcaatgattgaacagagcactctgttgacaattgttatattccacagctcatttattttatttagatatttattcactcattaattaacatatccttttcttcattcatttcgttttcaagtgatttattaaccatctactatacactagactctgtactaaatgtatgggatgtaaagatgaataaagtagtcctgtcctcagagaaggtgctaagggaagtaggcaaacaagttaatataagattacaattcactgctggatataaaatgccagaggaggataaagagtgacagataagagacaaaaagaagagatagtagaagtgaagaacacaaaaacaacttgccaggtgtaactgcggataatgctaaattgtttcccaagtattccatattcacattctcccaacacaactataatataaatatcaactctcattttgcaaatgaggaaaccaacatcagggggcatagagatgccaaaattcayatcgagaatcaaataaatgtgagtgttggcattggaaacacattctaacttcagaaatctttccattataccatgttgcttgtcatagaattatttctttagaaaatatgcttagccatgtagggttatgagaaggcagaggtatgtcacatattctagaaaccatggtggtttctagactttattgagacttaattccttttacaaaggtgcctcaagtgtctatacactattcatctttggatctttaaaaccagcacgggattttgcataaagtgtcagcacaacatatgccacaatatgaatgggattgctgtttattcattctttcaaaaatttttatcgtacatcttcattgtatcaggggtaagaatatcatgtccttggggatttagaaatataaaaaagaaagaaacttaagaaaaaatctaatatattattctcttctagactaaatattcttttggaagctctccagtgattatgaaattgtttcactctgatatttaggagaagctatccacccatctgtgggttactcttactcacaaatccaagaaacaagtgaattagaaaacattaaccaagttaaaatattggattgcacagcagtaagtttgtatgaatatatacctttgttatttattgtgctaactctattatcatcattttcttaacaacataaagtttttacagtattgccatttgatctatattttatttcttcatttaacaaatgtcataaaacaactaccacatgccaaaacctagaccctattgaattctatatctctaatgtccatcacaacacctaacattaaaattcaattcagtttcttgttttcttcaaagtgtagaaagtagacatacattgaatgcccactcctcaaaatgattgacagaaaaacttatcaaggaaagcaaagtctctctgactagctacagtaagaaagaatactatcctgatagggtcttaataatgtgcgagaggaaggaagtcagtggagaatattgatagggctttaggacctgagttggat

SEQ ID NO: 725387 - DNA, 1316 bp, Homo sapiens
tttggctcacgattctgcaggctgtccaaaatgcatggcgttggcatctgttcagcttctggtgaagcctcaggaagttttactcgtggtgcaaagcaaacggagctggtgtgtcacatggtgagagagagagcaagagaggaggaggcttgccacacccttttaaactacaaattcttgagtgaactaatagatggagaactcgctcattaccatggggatagcaccaagccattcatgagggatccactgtcatgacttaaacacctcccactagacccacctccaacattggggattatgttccaacatgagatttcgaggggacaaatatccaaactatgtcagtcatatttcacaaatatggtccttacggaaaattagaggtttgcataattatttgcatgtatgagaatgtgagattaatctcaccactatgagattattttatgaccattttcacagagtaaaaagtaggttcaaggagattgacttaactaagtccatggtccaagagacagctgccattagaaattagagcttcagagttttagcacctatggaatcttttctgtgcaggggaatttctgtttgtttttgtttgaaatgaatgagaagaaaaagtctttcttaaaatctcatggcaatccaggagtgtgtagctgacagctattgctcattaaactatattccaacaaatccttacaagccacgagtgaggatgagcagaaagcaaatatctgctaaagactgtgatgatgagacaaaggagcacgaagcccttgtggctacagtggacagatggatcgtatgtgtgtgcgccctgatgctgattgtgggatcttgcattaattcaaatgttcactcgtcaagtgctgtaatttgttcatcttgatgaaccataagggattcaagttactactgtaattttcctgtgacgaaaggatctgcagttacaactgcacacaaaggtcgtagagtgtttctgttatggtcgttcacactcacagatttataacgagacaggaaaaccctattccagctgaaacccagaaaagacagtcttagcctgggaatgaaatttaaaacaaatagctgaggacccatctctctccctcacccatgargactatacagtctcagagagacttgttctctgacttgaattacatgagatacataagggtgatttttagtgtacagaaaatatggaccattgtccaaaacgagtgtttttctcttttatttttattcaacatttttcacagtactgaagttggaatgagcctgaaaggcgacaggtgggcatagaaaga

SEQ ID NO: 725388 - DNA, 2197 bp, Homo sapiens
  misc_feature 843, 844, 845, 846, 847, 848, 849, 850, 851, 852, 853, 854,855, 856, 857, 858, 859, 860, 861, 862, 863, 864, 865, 866,867, 868, 869, 870, 871, 872, 873, 874, 875, 876, 877, 878,879, 880, 881, 882, 883, 884, 885, 886, 887, 888, 889: n = A,T,C or G
  misc_feature 890, 891, 892, 893, 894, 895, 896, 897, 898, 899, 900, 901,902, 903, 904, 905, 906, 907, 908, 909, 910, 911, 912, 913,914, 915, 916, 917, 918, 919, 920, 921, 922, 923, 924, 925,926, 927, 928, 929, 930, 931, 932, 933, 934, 935, 936: n = A,T,C or G
  misc_feature 937, 938, 939, 940, 941, 942: n = A,T,C or G
tgaaagttataactcaataaagctgtttacaaaacatcaaggtaggcgggcgcggtggctcacgcctgtaatccgagcattttgggaggccgaggtgggaggatcatgaggtcaggagatggagaccaccctggctaacatggtgaaaccccgtctctagtaaaaaaagtacagaaaaattagctggatgtcgtggcgggcgcctgtagtgccgctacttgggaggctgaggcaggagaatggcgtgaacccgggaggtggagcttgcaagtgagccgagatcgcaccactgcactccagccagggcgacagagcgagactccgtctcaaaacaaaaatcaaaaaccaaaaacaaacaaacggacaaaaaacacatcaaggtagagcttaaattctagacttcgaattatatacaatgggtgaagtggtgactgagtaattttctaaggtacttaggttgtttagctggagcgtaaacatcttaattaactttatagtatgttaagttaaatacacaggttaaaattgctttttctttttcttttttttttgagatggagtctcactctgtcgcccaggctgcagtgcagtggcacgatcttggctcactgcaatctctgaagcccgggttcaagcaattcttctgcctcagcctcctgagtagctgggattacaggcgcctgccactgcgcccagctaatttttgtatctttagtagagacggggtttcaccatcttggccaggctggttttgaactcctgaccttgtgatgcacctgcctcggcctcccaaagtgctgggattacaggtgtgagccacacgtgcccggccacacaggttannnnnnnnnnnnnnnnnnnnnnnnnnnnnnnnnnnnnnnnnnnnnnnnnnnnnnnnnnnnnnnnnnnnnnnnnnnnnnnnnnnnnnnnnnnnnnnnnnnnattgatggtaaaatcacaatgtctaatttatcaggcttaaaaaattaaggttatcgcccggccacacaggttaaaatttctaaggcaagcatcaagataatagaaatagagtgtaggctcacgcctgtaatcccagcactttgggagctgaggcaggtggatcacgaggtcaggagattgacaccacggtgaaaccccgtctcttctaaaaatacaaaaaattagccgggcgcggtggcaggcacctgtagtctcagctactcaggaggctgaggcaggagaatggcgtgaacccgggaggcggagcctgcagcgagccgagatcgcgccaccgctctccagcctgggcgacaaagcgagactccgtctcaaaaaaaaaaaaaaaaaaaaagagtgtatacattccaaactattaaagggaaaaagagagttagaaaaaaaattcaaaaaaaggcaagaaaaaattctaaaaagaaacagaaaggccaaaataaatagaaagtatacaataacatgatgaaaaagaatccaaatgttacagtaatcatagtaaatataaacaaagtaaactttccggttaaaagacaatgcttgtgaaactgaattaaataaactgcatgcatattctggttactagagacttacctaaaacaaaagaaggttgaaaataaaaggatggaaaaactaaacttgccaaaaccacactctggatgtacttgtgtccccagtagcaagagaatagcttaacrcacgatcccattctttgctaaagttaagatacaaattatctagttctaacaaaaaagaggggaaggggacaaaaggagggaagaggagaggaaaagaaggacaaagagaggaatagatgaagtaggggaaggtggaagggagagataatggtgactccagttctctaggattcacaaagtttaggtcatctgttgccaggggaaaccagaatagcaagggaaatggccaagggcaatttgaactgtgtgtatcaaaatccactgggcccttctgggtctctcaaaatgcctagttcactctctgaatcacaagcagtaactgacgggtttacttttaggataagtagagggaaacaaaataaggaaaatatcaccatgctgtatccctagataaacacactactttcacagtcagttaagaattttaatgcctaagtttttttcttttaagaaatacagagaattagtttccaaatctatcaagtaatacatctttttatttaata

SEQ ID NO: 725389 - DNA, 2197 bp, Homo sapiens
  misc_feature 843, 844, 845, 846, 847, 848, 849, 850, 851, 852, 853, 854,855, 856, 857, 858, 859, 860, 861, 862, 863, 864, 865, 866,867, 868, 869, 870, 871, 872, 873, 874, 875, 876, 877, 878,879, 880, 881, 882, 883, 884, 885, 886, 887, 888, 889: n = A,T,C or G
  misc_feature 890, 891, 892, 893, 894, 895, 896, 897, 898, 899, 900, 901,902, 903, 904, 905, 906, 907, 908, 909, 910, 911, 912, 913,914, 915, 916, 917, 918, 919, 920, 921, 922, 923, 924, 925,926, 927, 928, 929, 930, 931, 932, 933, 934, 935, 936: n = A,T,C or G
  misc_feature 937, 938, 939, 940, 941, 942: n = A,T,C or G
tgaaagttataactcaataaagctgtttacaaaacatcaaggtaggcgggcgcggtggctcacgcctgtaatccgagcattttgggaggccgaggtgggaggatcatgaggtcaggagatggagaccaccctggctaacatggtgaaaccccgtctctagtaaaaaaagtacagaaaaattagctggatgtcgtggcgggcgcctgtagtgccgctacttgggaggctgaggcaggagaatggcgtgaacccgggaggtggagcttgcaagtgagccgagatcgcaccactgcactccagccagggcgacagagcgagactccgtctcaaaacaaaaatcaaaaaccaaaaacaaacaaacggacaaaaaacacatcaaggtagagcttaaattctagacttcgaattatatacaatgggtgaagtggtgactgagtaattttctaaggtacttaggttgtttagctggagcgtaaacatcttaattaactttatagtatgttaagttaaatacacaggttaaaattgctttttctttttcttttttttttgagatggagtctcactctgtcgcccaggctgcagtgcagtggcacgatcttggctcactgcaatctctgaagcccgggttcaagcaattcttctgcctcagcctcctgagtagctgggattacaggcgcctgccactgcgcccagctaatttttgtatctttagtagagacggggtttcaccatcttggccaggctggttttgaactcctgaccttgtgatgcacctgcctcggcctcccaaagtgctgggattacaggtgtgagccacacgtgcccggccacacaggttannnnnnnnnnnnnnnnnnnnnnnnnnnnnnnnnnnnnnnnnnnnnnnnnnnnnnnnnnnnnnnnnnnnnnnnnnnnnnnnnnnnnnnnnnnnnnnnnnnnattgatggtaaaatcacaatgtctaatttatcaggcttaaaaaattaaggttatcgcccggccacacaggttaaaatttctaaggcaagcatcaagataatagaaatagagtgtaggctcacgcctgtaatcccagcactttgggagctgaggcaggtggatcacgaggtcaggagattgacaccacggtgaaaccccgtctcttctaaaaatacaaaaaattagccgggcgcggtggcaggcacctgtagtctcagctactcaggaggctgaggcaggagaatggcgtgaacccgggaggcggagcctgcagcgagccgagatcgcgccaccgctctccagcctgggcgacaaagcgagactccgtctcaaaaaaaaaaaaaaaaaaaaagagtgtatacattccaaactattaaagggaaaaagagagttagaaaaaaaattcaaaaaaaggcaagaaaaaattctaaaaagaaacagaaaggccaaaataaatagaaagtatacaataacatgatgaaaaagaatccaaatgttacagtaatcatagtaaatataaacaaagtaaactttccggttaaaagacaatgcttgtgaaactgaattaaataaactgcatgcatattctggttactagagacttacctaaaacaaaagaaggttgaaaataaaaggatggaaaaactaaacttgccaaaaccacactctggatgtacttgtgtccccagtagcaagagaatagcttaacayacgatcccattctttgctaaagttaagatacaaattatctagttctaacaaaaaagaggggaaggggacaaaaggagggaagaggagaggaaaagaaggacaaagagaggaatagatgaagtaggggaaggtggaagggagagataatggtgactccagttctctaggattcacaaagtttaggtcatctgttgccaggggaaaccagaatagcaagggaaatggccaagggcaatttgaactgtgtgtatcaaaatccactgggcccttctgggtctctcaaaatgcctagttcactctctgaatcacaagcagtaactgacgggtttacttttaggataagtagagggaaacaaaataaggaaaatatcaccatgctgtatccctagataaacacactactttcacagtcagttaagaattttaatgcctaagtttttttcttttaagaaatacagagaattagtttccaaatctatcaagtaatacatctttttatttaata

SEQ ID NO: 725390 - DNA, 2197 bp, Homo sapiens
  misc_feature 843, 844, 845, 846, 847, 848, 849, 850, 851, 852, 853, 854,855, 856, 857, 858, 859, 860, 861, 862, 863, 864, 865, 866,867, 868, 869, 870, 871, 872, 873, 874, 875, 876, 877, 878,879, 880, 881, 882, 883, 884, 885, 886, 887, 888, 889: n = A,T,C or G
  misc_feature 890, 891, 892, 893, 894, 895, 896, 897, 898, 899, 900, 901,902, 903, 904, 905, 906, 907, 908, 909, 910, 911, 912, 913,914, 915, 916, 917, 918, 919, 920, 921, 922, 923, 924, 925,926, 927, 928, 929, 930, 931, 932, 933, 934, 935, 936: n = A,T,C or G
  misc_feature 937, 938, 939, 940, 941, 942: n = A,T,C or G
tgaaagttataactcaataaagctgtttacaaaacatcaaggtaggcgggcgcggtggctcacgcctgtaatccgagcattttgggaggccgaggtgggaggatcatgaggtcaggagatggagaccaccctggctaacatggtgaaaccccgtctctagtaaaaaaagtacagaaaaattagctggatgtcgtggcgggcgcctgtagtgccgctacttgggaggctgaggcaggagaatggcgtgaacccgggaggtggagcttgcaagtgagccgagatcgcaccactgcactccagccagggcgacagagcgagactccgtctcaaaacaaaaatcaaaaaccaaaaacaaacaaacggacaaaaaacacatcaaggtagagcttaaattctagacttcgaattatatacaatgggtgaagtggtgactgagtaattttctaaggtacttaggttgtttagctggagcgtaaacatcttaattaactttatagtatgttaagttaaatacacaggttaaaattgctttttctttttcttttttttttgagatggagtctcactctgtcgcccaggctgcagtgcagtggcacgatcttggctcactgcaatctctgaagcccgggttcaagcaattcttctgcctcagcctcctgagtagctgggattacaggcgcctgccactgcgcccagctaatttttgtatctttagtagagacggggtttcaccatcttggccaggctggttttgaactcctgaccttgtgatgcacctgcctcggcctcccaaagtgctgggattacaggtgtgagccacacgtgcccggccacacaggttannnnnnnnnnnnnnnnnnnnnnnnnnnnnnnnnnnnnnnnnnnnnnnnnnnnnnnnnnnnnnnnnnnnnnnnnnnnnnnnnnnnnnnnnnnnnnnnnnnnattgatggtaaaatcacaatgtctaatttatcaggcttaaaaaattaaggttatcgcccggccacacaggttaaaatttctaaggcaagcatcaagataatagaaatagagtgtaggctcacgcctgtaatcccagcactttgggagctgaggcaggtggatcacgaggtcaggagattgacaccacggtgaaaccccgtctcttctaaaaatacaaaaaattagccgggcgcggtggcaggcacctgtagtctcagctactcaggaggctgaggcaggagaatggcgtgaacccgggaggcggagcctgcagcgagccgagatcgcgccaccgctctccagcctgggcgacaaagcgagactccgtctcaaaaaaaaaaaaaaaaaaaaagagtgtatacattccaaactattaaagggaaaaagagagttagaaaaaaaattcaaaaaaaggcaagaaaaaattctaaaaagaaacagaaaggccaaaataaatagaaagtatacaataacatgatgaaaaagaatccaaatgttacagtaatcatagtaaatataaacaaagtaaactttccggttaaaagacaatgcttgtgaaactgaattaaataaactgcatgcatattctggttactagagacttacctaaaacaaaagaaggttgaaaataaaaggatggaaaaactaaacttgccaaaaccacactctggatgtacttgtgtccccagtagcaagagaatagcttaacacacgatcccattctttgctaaagttaagatacaaattatctagttctaacaaaaaagaggggaaggggacaaaaggagggaagaggagaggaaaagaaggacaaagagaggaatagatgaagtaggggaaggtggaagggagagataatggtgactccagttctctaggattcacaaagtttaggtcatctgttgccaggggaaaccagaatagcaagggaaatggccaagggcaatttgaactgtgtgtatcaaaatccactgggcccttctgggtctctcaaaatgcctagttcactctctgaatcacaagcagtaactgacgggtttacttttaggataagtagagggaaacaaaataaggaaartatcaccatgctgtatccctagataaacacactactttcacagtcagttaagaattttaatgcctaagtttttttcttttaagaaatacagagaattagtttccaaatctatcaagtaatacatctttttatttaata

SEQ ID NO: 725391 - DNA, 1207 bp, Homo sapiens
aagaacaatgagaaagagagttaatccataatctaagaagcagaagttgcaactctgtgccatgcgactcacatcacagtcacagctctctcacaacttaaagtgttttggggattctaacagcttwtagattttatttattttcacaagtaggtccctcctttctttgcagattcagttttctcacctgcaaaataaagactccgtactagacaaactgagactccatctgctttgaattttgatgcctgtttctaaatagatggatttgaaaactcatttctgtaatcacaaaatcacatgtcaaaacagacactgaaagagaaaacatagggagaaatgctaattttacactacatcttatatctcatttgagattttcctttatgttaaaaaagaaatgaaaagtggacttcatttgaattctgtccttttttggaaacaatcctgctgatctgactcttgaacttcataacccaagtggagttatttataatgccagtactttaagttagtaaagtggtgcatctttatggtaacaaggaacaaaaggaaggtgatagatttgaaatttatgtaagaacttggcttttgccatttatctgaacacgacatcatcttctagccttttctgttagtacaggaagttgtttcctaatttggttattcaatgtgatattttattttgcttttctcacatcctttagggagaactgatatgttagaagaaaaagtacaacagtggattctattagaaagaacaaatgagaaagaaattaggtatatttaggagaaaggataaaatgaatggctcaagtaggcttgtagctgcaaccaaatcaaaatataaaagggttactatgactacaaaggcagtatatttgaataaaaatggatatgaaagtctctttcacatgctaatcgaaattggaggaagtctgtcatttcaaactgcagacagtctttctccacctcttcttctacattatggcttttggattgaatctgctttaaacgaaactattgccctgtgaaactgaaaagcacttggagttcccttgtgtaagggctagtttacaccagttctagcactgtgactctgattcttcatttgttcagggtcagagcctcagaacccaccccactcgttttttgtttgtttgtttgttttctgatgaagaaaaagcacaatgatccacctgaaaca

SEQ ID NO: 725392 - DNA, 1207 bp, Homo sapiens
aagaacaatgagaaagagagttaatccataatctaagaagcagaagttgcaactctgtgccatgcgactcacatcacagtcacagctctctcacaacttaaagtgttttggggattctaacagcttatagattttatttattttcacaagkaggtccctcctttctttgcagattcagttttctcacctgcaaaataaagactccgtactagacaaactgagactccatctgctttgaattttgatgcctgtttctaaatagatggatttgaaaactcatttctgtaatcacaaaatcacatgtcaaaacagacactgaaagagaaaacatagggagaaatgctaattttacactacatcttatatctcatttgagattttcctttatgttaaaaaagaaatgaaaagtggacttcatttgaattctgtccttttttggaaacaatcctgctgatctgactcttgaacttcataacccaagtggagttatttataatgccagtactttaagttagtaaagtggtgcatctttatggtaacaaggaacaaaaggaaggtgatagatttgaaatttatgtaagaacttggcttttgccatttatctgaacacgacatcatcttctagccttttctgttagtacaggaagttgtttcctaatttggttattcaatgtgatattttattttgcttttctcacatcctttagggagaactgatatgttagaagaaaaagtacaacagtggattctattagaaagaacaaatgagaaagaaattaggtatatttaggagaaaggataaaatgaatggctcaagtaggcttgtagctgcaaccaaatcaaaatataaaagggttactatgactacaaaggcagtatatttgaataaaaatggatatgaaagtctctttcacatgctaatcgaaattggaggaagtctgtcatttcaaactgcagacagtctttctccacctcttcttctacattatggcttttggattgaatctgctttaaacgaaactattgccctgtgaaactgaaaagcacttggagttcccttgtgtaagggctagtttacaccagttctagcactgtgactctgattcttcatttgttcagggtcagagcctcagaacccaccccactcgttttttgtttgtttgtttgttttctgatgaagaaaaagcacaatgatccacctgaaaca

SEQ ID NO: 725393 - DNA, 3352 bp, Homo sapiens
tttcttttctttttcttcttttttttaatttgagacagagtctctctctgtcacccgggctggagtgcagtggcgcaatctcagcttactgtgacctccacctcctgggttcaagcgattctgctccctcagcctctcgagtagctgggattacaggtgtgtgccaccacgcctggctaatttttgtatttttagtagggatggggtttcactatgttggccaggctggtctcgaactcctgacctctggtgatctgcctgcctcaacctcccaaagtgctgggattacaggcgtgagccactgtgccctgcctgcatatctgtttttagttatctaggttatgtggggtgggatcaagtggattgcagctgagcagccacagggaggtcacagtggatttctgttggaagcctctcctctcacccgagatttagaaggacaaatggaaagtgcttgttgctttaaaatgtggggattgccattggacggaggtgaggggaaatacgctggtggatggaagaagatcataggacatttctgctgggacttgagacctgggttaatgtagtgaacatctcttgagtgcagtgctggtggagggggaaattctgagcctgccgtggttcccaaaggagtcatgaaaagcccagcaacattgggtgtctcacgtctgatgggtgttgtgtcattattgacaagaaaaaatcttagccatttatattatagtccatcagaggaagagaaatgctagaagaagcttaactttagttatagagccagattatctgtggtggattatctatgaaaaatgttgaatcccaagccaggttctctctgtattttggtacacagcttatttttrgccatttttctttatcaaatggtgtgtaattaggaaatgcatgctaatttttaatattaatgttacacacacacgtacacacacacacatatatacttatattaggaaatcatagataggaagataaatctgatgtccccaaccctgcatttcagtttagtgcatcataaagccagatatttttgtgtccatttcctatttgcttttgccttgaattttctttcttttttcagtttttcgagacagagtctcactttgttgcccaggctggagtgcatggtgtgatcttggctcactgcaacctctgcctcctgggttcaagcgattctcctgccttagcctcctgagtagctgggactacaggcatgcgccaccacacctggctaatttttttttgtatttttagtagagatggggtttttccatgttggccaggccggtctcaaactcctgacctcaggtgatctgcccacctcggcctgccaaggtgcttggattataggcgtgaaccactgtgcccagcctggccttgaattttcttgtgacttttcaccatgattggtttggttgactaagaactgagtatctcattgttttggatttgagatctagtgatacagctgattctaaacgagatcactgcggtcagagaggctcagacatggactttcttctcatggaaaaccttcttattgagaattaaaaacaccgctatcaaaatcgttcaattaaaaagaaaggtggactgtgaacttctgggctgtgaacttgtgggctgtaaacttagaatctggttattccaggtgaattctgaagcaagcacatcttgtcattgttgtgaatttctcagaacaaaaatgtgttgcctcaggtaaagcccgtaccatttgtgcaaaaggaaaatggcttcaacttactttttaaaaaaaactttcagattcaggcgaacatccatttcttctaatgagtgtgtgtgcaaatgaccttgtcataatgcaggatatagtgatagcaattgtagtgagtctttagaatgagctaaatgttatcaagggatgtttccagttagttataaccatgatatgccttttccgatgatctaagacacttctgttttaataggtcagtttttttccagttttaaaaaattttaactgaatttttaaattcaaagactcttttctcataaatggcacaaaacatttagctctctaagaaatgcagaatcccagaatggttcatgtttgtgtattgctcatttagctttcgacgtcctttggaaagttgaggaataaacaggtggacaatttgaaaggatgaaaatactccaacaggttacactaatagaatcaggaaggaagaatgtccaacaggagtcattgttgtctgttgaggatttagtgggtgaaagattgaaaaattggaaatacatattcacctactattggtaaaacttttttcctcaaatattcctttatatgtatatattttttttcttcttgagacagggtctcactctgtcactcaggccggagtgcagtggcactatctcagctcactacgacttctacctcctgggttcaagtgatcctcccacctcagcctcctgagtagctggggctacttgtgtgcgccactgtgccctctatttttttggtattttttgtagagatggggtttcaccatgttgtccaggctggtcttgaactcctgagctcaagcaatcctcctgcctcggcctcccaaagtgctgggagttagcccaccgtgcccagcctatgtgtgtgttttcttaaatgttcctggttctctaaaggatgtaggcaaatgcattcttggtaaattaccttggttgccaatgtctttatgaagttggtgttaagtttttaaacctgagacacttaaactttaatgactatatcagttagggtcaagattgcctgcaaatcatagaactatgactgcacataactgcggttaaaccagggtaggggctgtttctctctagggtcgttgtggctcttcatggcgtctgggacccgggctgtttctgtcttgttgctctgtcttgtgtggcatgattgcatggtcctaaatgggggcctccacatgtcagacagcagaatggaggagagggcacagaagaaggggcccagagctgacgtcagtgaggagaggcttcatgggcagtaatgtccaagcaaaggtggaactatggcctccattctgagggaggtgggtctagtcccaaaccagagaccttatgccctagaagagggaatagctggtgaagaacagcttggagtctctgtgacaataccaaattttcgttagaagtaaaacagaaacaatccattgctaatagcatgtatttattcatttaaattgtatttttattttaagttctgaggtccatgtgcaggatgtgcaggtttgttacatagggaaacgtgtgccatggtggtttgctgcacctgtcaaacccatca

SEQ ID NO: 725394 - DNA, 627 bp, Homo sapiens
cttccactcccacagatgctcagtgagaacaaaataaattagatcaacattttaaaaatgcatccagtagctatttgcccagggaaagaagacaagtggctatttcaaaagctgatgtaccaggtcagaatactcaatatatgataaaaattaatgagccagtaagtgatccagctgcagatctgatcaatccagcaactgcattttgtgttgcctaagtagaacaaatgagtaayggcattttatggctagagcttacataactgcaaatgtcattaataattttaatccatctttaaaaatgacccaagtccattaaaaaaaatccttccagcatgcttattctgtaacttttgggaaaataaagcatatgtatgaccataaattgcaccagtaagtacattactgataccacaactaattatttctattaaattggtcagtatatttctaacctcttaaaaaaacttcctttttaaataaaatatgaaacagaataaataagacatcagagtcattttctatcacagctttcacatttgtgactctctcagtcaaaactccttgcctagattttctcatttatataccattgcagtaaatgtttttttaatcactcatcatatg

SEQ ID NO: 725395 - DNA, 1708 bp, Homo sapiens
atctttctctgtcgttcaggcaggagagagcaatggcgtgatcttggctcactgcaacctctgcctcccgtgttcaagtgattctcctgcttcagcttcttgagtagctgagattagaggcgcacaccgccacacctggctaatttttgtatttttagtagagacggggtttcaccttgttggccaggctggtttcgaactcctgacctcaaatgattcacccacctcagcctcccaaagtgttgggattacaggtgtgagccactgcacttggccagctctaagagttttaaaaaatttatgcataaatatatcataggttggtactaaccagtattttagttgttagtaaatttggtggtttgtttataatgcaacaacttatctttttaagtaaacatgaattcataatctgccagcacatctgtgtctctatcagccagttttctcacctctgagattaccactcttttgttttcactacgatgttctcggtgcttttttctcacctctcggtgagttgaaggggctgatgtgtatcgccccctgatatggttaggctttatttccccaccaggtctcatcttggattataattcctataaatccccataatccgcaggtgtcaagggagagaccaggtggaggtaaatgaatcatggggtaggttttccccatgctgttctcrtgatagtgagttctcactagatctgatggttgtataagtgtgtggtagtgtctcctgcgttccttctccttcctgccgccttgtgaagaagatgccttgcttccccttctgccttgcttccttcctcttccaccatgattgtaagtttcccgaggcctccccagccatgctgaactgtgactcagttaaacctctttcctttataaatcactcagactcaggcagttctttataacagtatgaaaacggactaatacacccctgcttatatggggtctgaaaacctggttaaagtatatctcaaaacaataaataaaagctcctggctgttggtcccctctatgtcccgtggtgttgagtgactaggtagaaattaaatgggacactctgcagatacctagcagaggcgtcggcaggtgggtcttccatcagctggtatttttcctctccttcagtagctcttttccgattgccacagagcactcccaggtgcagagagtagtcagtaaatgaactggccatctccagagcttttgcagactcaccttgagcaaggctgatgctctcagaaggtgtaccatttgatcgtgtggctttacctaccctcccccaccacgtgtactgtaatttgagagtttagtgttagtggctgatgtcagacaaggcagaaaagagtggtcaaggccgggcgccgtggctcatgcctgtaatcccagtactttgggaggccgaggcaggcggatcacgaggtcaggagattgagaccatcctgactaacacggtgaaaccccatctgtactaaaaatacaaaaaattagccgggtgtggtggtgggtacctgtagtcccagctactcaggaggctgaggcaggagaatggcatgaacccgggaggcggagcttgcattgagccgagatctcgccactgcactccagcctgggtgacagagcgagactccatcttaaaaaaaaaaaaaaaagagtgatcaaattcatcccaaatgtattttgttgtatttca

SEQ ID NO: 725396 - DNA, 1708 bp, Homo sapiens
atctttctctgtcgttcaggcaggagagagcaatggcgtgatcttggctcactgcaacctctgcctcccgtgttcaagtgattctcctgcttcagcttcttgagtagctgagattagaggcgcacaccgccacacctggctaatttttgtatttttagtagagacggggtttcaccttgttggccaggctggtttcgaactcctgacctcaaatgattcacccacctcagcctcccaaagtgttgggattacaggtgtgagccactgcacttggccagctctaagagttttaaaaaatttatgcataaatatatcataggttggtactaaccagtattttagttgttagtaaatttggtggtttgtttataatgcaacaacttatctttttaagtaaacatgaattcataatctgccagcacatctgtgtctctatcagccagttttctcacctctgagattaccactcttttgttttcactacgatgttctcggtgcttttttctcacctctcggtgagttgaaggggctgatgtgtatcgccccctgatatggttaggctttatttccccaccaggtctcatcttggattataattcctataaatccccataatccgcaggtgtcaagggagagaccaggtggaggtaaatgaatcatggggtaggttttccccatgctgttctcatgatagtgagttctcactagatctgatggttgtataagtgtgtggtagtgtctcctgcgttccttctccttcctgccgccttgtgaagaagatgccttgcttccccttctgccttgcttccttcctcttccaccatgattgtaagtttcccgaggcctccccagccatgctgaactgtgactcagttaaacctctttcctttataaatcactcagactcaggcagttctttataacagtatgaaaacggactaatacacccctgcttatatggggtctgaaaacctggttaaagtatatctcaaaacaataaataaaagctcctggctgttggtcccctctatgtcccgtggtgttgagtgactaggtagaaattaaatgggacactctgcagatacctagcagaggcgtcggcaggtgggtcttccatcagctggtatttttcctctccttcagtagctcttttccgattgccacagagcactcccaggtgcagrgagtagtcagtaaatgaactggccatctccagagcttttgcagactcaccttgagcaaggctgatgctctcagaaggtgtaccatttgatcgtgtggctttacctaccctcccccaccacgtgtactgtaatttgagagtttagtgttagtggctgatgtcagacaaggcagaaaagagtggtcaaggccgggcgccgtggctcatgcctgtaatcccagtactttgggaggccgaggcaggcggatcacgaggtcaggagattgagaccatcctgactaacacggtgaaaccccatctgtactaaaaatacaaaaaattagccgggtgtggtggtgggtacctgtagtcccagctactcaggaggctgaggcaggagaatggcatgaacccgggaggcggagcttgcattgagccgagatctcgccactgcactccagcctgggtgacagagcgagactccatcttaaaaaaaaaaaaaaaagagtgatcaaattcatcccaaatgtattttgttgtatttca

SEQ ID NO: 725397 - DNA, 960 bp, Homo sapiens
tgagatatttaaaaggtaatatgttttcttacacttttttcttttgattcatttactatttcttgtagttacagtcttgttttattaagcactttgagtctacatatcattttaatggaggtrtcaggtgggatgtccttctcatttaccctacaatgaatacccagacattcatccatcctactcagtcctaggcagatatgtgaattaattccttgtcacccacaatattccatcttcattgtttttcttcctcaacccccaaatcattcacatagtttcccccaatagcatccattttcacaggagaatcagtggcctcctgcatcacatcatcatctcttaggtgtctaatatattcatgaaagtgtaggtaaaaatgcctaatagagtaaatgtgcttgttttcaccagtgatatccacacaggaagaagaagaaagattttaaccaagaaaataaatacgcatttaaatttaatttttagaaatcagtgaaccaagtagcagatggatgtgttttagatatgcaataggatgaggggagaagacgtgaacatgtaagtccagtatgtatgatggtcctcaaaatattcatactattctgtccctaattaatatgcctacaggacaaacgccttctttgattttgtttgttatttgatttttctgtataaccaacagagtaagcaatgactcacattatcatccccatttcagagtattctatatactagtcaagctctgagccagttagcattgccttgttttaatgttgttcttcccttaaaaaacaaaatcaatctcatcaggactaatatatttcaataacacagatcgataaagatttatccccaatataatggccaatacaattgcacatctttaaaatgcttctctcactataaagttttaatttatgtggtatgatataaacatttgtatccggttatttacaacca

SEQ ID NO: 725398 - DNA, 960 bp, Homo sapiens
tgagatatttaaaaggtaatatgttttcttacacttttttcttttgattcatttactatttcttgtagttacagtcttgttttattaagcactttgagtctacatatcattttaatggaggtatcaggtgggatgtccktctcatttaccctacaatgaatacccagacattcatccatcctactcagtcctaggcagatatgtgaattaattccttgtcacccacaatattccatcttcattgtttttcttcctcaacccccaaatcattcacatagtttcccccaatagcatccattttcacaggagaatcagtggcctcctgcatcacatcatcatctcttaggtgtctaatatattcatgaaagtgtaggtaaaaatgcctaatagagtaaatgtgcttgttttcaccagtgatatccacacaggaagaagaagaaagattttaaccaagaaaataaatacgcatttaaatttaatttttagaaatcagtgaaccaagtagcagatggatgtgttttagatatgcaataggatgaggggagaagacgtgaacatgtaagtccagtatgtatgatggtcctcaaaatattcatactattctgtccctaattaatatgcctacaggacaaacgccttctttgattttgtttgttatttgatttttctgtataaccaacagagtaagcaatgactcacattatcatccccatttcagagtattctatatactagtcaagctctgagccagttagcattgccttgttttaatgttgttcttcccttaaaaaacaaaatcaatctcatcaggactaatatatttcaataacacagatcgataaagatttatccccaatataatggccaatacaattgcacatctttaaaatgcttctctcactataaagttttaatttatgtggtatgatataaacatttgtatccggttatttacaacca

SEQ ID NO: 725399 - DNA, 960 bp, Homo sapiens
tgagatatttaaaaggtaatatgttttcttacacttttttcttttgattcatttactatttcttgtagttacagtcttgttttattaagcactttgagtctacatatcattttaatggaggtatcaggtgggatgtccttctcatttaccctacaatgaatacccagacattcatccatcctactcagtcctaggcagatatgtgaattaattccttgtcacccacratattccatcttcattgtttttcttcctcaacccccaaatcattcacatagtttcccccaatagcatccattttcacaggagaatcagtggcctcctgcatcacatcatcatctcttaggtgtctaatatattcatgaaagtgtaggtaaaaatgcctaatagagtaaatgtgcttgttttcaccagtgatatccacacaggaagaagaagaaagattttaaccaagaaaataaatacgcatttaaatttaatttttagaaatcagtgaaccaagtagcagatggatgtgttttagatatgcaataggatgaggggagaagacgtgaacatgtaagtccagtatgtatgatggtcctcaaaatattcatactattctgtccctaattaatatgcctacaggacaaacgccttctttgattttgtttgttatttgatttttctgtataaccaacagagtaagcaatgactcacattatcatccccatttcagagtattctatatactagtcaagctctgagccagttagcattgccttgttttaatgttgttcttcccttaaaaaacaaaatcaatctcatcaggactaatatatttcaataacacagatcgataaagatttatccccaatataatggccaatacaattgcacatctttaaaatgcttctctcactataaagttttaatttatgtggtatgatataaacatttgtatccggttatttacaacca

SEQ ID NO: 725400 - DNA, 668 bp, Homo sapiens
agctccattccccagtgtgcccctttttgtgttttcctggttgcagtgagtgcctgctcctggagagggactaccctgggcagcttccaaaggtgatctttatttcttaagaacccatgggcacatatattatgtccccattttatagatgaggaaaccgaggctctgaaggggagaagtgactgcaggtcacacgacaatcaggcctggcctggcggggggctcaatgggagactgttctcccactccccacgcctggcaggacctgcgcaggtttccaccacggtgaactcgctctgtataaagccatcatggcctaagctgtaaaacagaaggaatgaagacatatttttctggtctccttccccggaaaccagctggggctggggcccggcgaggctgacatttatgtactgtytttaatcacagtagctgacgtattccaaataaggtctggagacaccttgttaacgagggcccagctgtctctcctgtggatacctgtgctggcatggggagcccgccccgagatatgctaactcaggcctggagcctgcagacagacccaccctgtggcacggctcacgtgctgccgccgcaagccctgcagaggcaggggcttgttggaatggctggaatccaggctggagggagaaggaaaaatttgt

SEQ ID NO: 725401 - DNA, 2745 bp, Homo sapiens
gaagtgtgtcatttattctggactaagtcaaggtacacataaatgtatacatataccatgagaaaggcagataactgtggtacagcagaaacaattggatataactcatgaatgagaagtcagagttatcagcctggaggggagctagaataactatgaatgcttagctgtaaataacacaaagaagacaatcatttgaaggagtttcaaatttgcgaagctgatgtgaagtggagaacaaattattttttcattaatccagtctgataccttgtgtgatattgacaagtgcttctgcattctatgttaatttaataaagtcatcttgaagaatctgcactatttacaacactcaagattccccttaatccttagatcctcataaatgtggcttttgcatcctctgcttatttacgattagatgtaacattacaaatttaaaatttatctttctccctcagaaagaaatagaagtcacagatatcagcattccctacacttgccagccacatgggagctctggagtaaagaagggacaacacaactcagaaagcaattgctttgctgaaagagctgactataggttaaggcacagctcagcaatgagaaaaagaataaaaattatgtttttgtattcactgttgtctagtcctgaaaattaaaacccatttccattcttattttctaaatagtatttcaaagttttgattctcataaaaaggaaatattataaatctttaattgtattaatgaataatgaatgattatattccaattaacactaaatcatcaagtttttcatgtcattattagtgccaacatacttgagataattacaagtttaccttcagacaatgtggtttttattgcatcacataaataatctggtctcatccccaccaactccctacaacaaaataaattcctaaaaagctgaaattcccacttatcaaagtctctctttatgaagcaaacattgatgtacctagaagtttcttgttcaaatatcaatagactgaaagccgagtatatcaagacttagaaatctttaacactttagtgtggatagctcatcagtgtcttttttttcttccaagaaactgggaagagaaaattctgaggttcataagtgtcctgagcagttagagtttcaccaaataactcacaatcaactgttaactagtagcagttcagagggagtgagacagactggaaagacattcttgatgaagtagaagagggagagataggtccatagcttctcacacacactaacctctaggtttttacaccttctcctctactgaaactctctactcctctgtcccaaccccacctctctacctggctaattccctcacctttgggtcttagtataattatcatttcctcaggcaagggttctctggctcctaagattaggatgctctcaaagggtacttaaaatctctggttttgcctatatcaaacaccaattaattctctatctaattatgttttaatatcatctttccaactgcactgtaagaaacaccatgacagagccacagctgttttactcatgattctttcccagcccctgaaacaaagtaataacctaaaaatatctatggactgactgttgggtgcaatgcaaatgcatgcagtaagcttggcagcaagttctgcatggcaagacagggatagaaatctgggtggttgtgtaagccttggaaggtcatgattaggaatggaagggaaagagaagagaaaaggagagaatattttcaacttcacaatttgcctaaactttgttcatgctatttcttattggcccccactttttctatttcttgcggcctcctctttgtgtgttttggtaggaacaatgctaaaattatataaaaacttatgtagtgctcgccaggtgccaagcactgttctaaatgctgcacatattaactcatttggtcataatagtagcccttatagaaaaataactttgttatctccatttgcagttgaggaaactgaagcgttgagagggtaagtaatttcccaaattcacacagatagaatattgtagacctagggttggaactcagcactctgactttagaatgcatgctcctttaagaccatcctggctaacaccgtgaaaccccgtctctactaaaaatgcaaaatattagccaggcatggtggagggcgcctgtagtcctagctacttgggaggctgaggcaggagaatggcttgaacccgggacgcggagcttgcagtgagccgagatcgcgccactgcactccagcctgggcgacagagcgagactccgtctcaaaaaaaaaaaaaaaagaatgcatgctcttaaatgctttgctaaggttatgtggaaagatagtgtcgatgacatccctgcttaattaacatctgtttccaaacttcttttcccttgcccatatcctttataggaaaagttaaatttgattctttcccagtctcttgcatctagtggtggctgttcatgcyagttctgatacatatggcacaagtagatgtcttttgaagagagaatacttctgggaaagcaattgcttttctgaaaacataataggataaatgtgggtggtgccatattttcctttgtttcctgtctggaatacagatatgaagcctggagttctagtagccattttgtatccatgaaggaaaaccaaagaatcatagcagtcatagccgaagccttgataatatagaggcaatgaacc

SEQ ID NO: 725402 - DNA, 1105 bp, Homo sapiens
tggctgtgtccccaccaaatttcaacttgaattgtatctcccagaattcccacatgttgtgggagggacccagtgggaggtaaatgaatcatgggggccggtctttcccatgctagtctcatgatagtgaataagcctcacaagataagatgggtttatcaggggtttctgcttttgcttcctcctcatcttctcttgctaccaccatgtaagaagtgcctttcagctcccaccataattctgacatctcctcagccatgtggaactgtaagtccaattaaacctctttttcttctcagtcttgattgggtatgtctttttcagcagtgtaaaaatggactaatacagtaggtgtgcaacaactttttctttctttctttttctgaaagtaaaggagaactccatatgtctggaaaaataattcgaattaactttcacatcggacaatgcacaaacccaggctttcccactactgtagatttgggttgcttagtttcaggttacattgctgagacattaatgctgttggggtctgaatttcttgaatcrttgttgagtactggtgactaaaataaacaatgtgatatggtttagaaactttgttacattctatacacttgtttatctacgtgtacatgttctaaaaatgtttacatatatgtgctatggtttgttctgttttgataggatgaatgggtgtttgtggctgggaattctaagaagcaaaatgtaaaaaaataaattatttgtagtaatcaaaacataattaagtgctagagagcacagtcatggatttcatcatggcttttagcatagtgagtgtgatgaaatggtagaggtttcctgtaatgccttagaaaaagcctgtatcacacttcactgcatagggacagtaactgctatcatataaaaccaatgctctgcaaaactagacatgagcctttgagatttatacgttgccactgatatgctttggctgtatccccacccaaatctctgcttgaattatacatggtagggacccagtgggaggtaattgaatcatgggggtggttacctccatgctggtcttgtgatagtgagtgaggtctcatgagatctgatg

SEQ ID NO: 725403 - DNA, 624 bp, Homo sapiens
cgattcaaggtgtgaatctgattatcaactcactattttggttcttctttttggaggaggcaggtgtcctgtgcctctagttagccatcttgaaactctctcagaatttctctattctggtgtgcatttctctgaacttctataaagtctgaatacccaggctctcagcatacctaggctcttagaatgcccaaaaaaggtacctagaagtaagacttcaaaagatgacttttctggtcctggagaacagagctacacagtagttttttttctatacctgctgtttcctagttcttggcaagcctgtgggaactgactttccactagtcttgtcagccttggatttattactgcagcttctgcttcctcagctactctcatacaggtcccatgatgctggcaggtgccatcctactgtagttcccagagccatcaggatgtgagtatggacracctcagtcctgactgtccctcacctctttcccacccctactatcatcctgtgggagtcagaattatgtctccttgtgggcttgagatccagaaggacttaatagagactgagtacctctattgctccctgtgtattactagccactgccaatcagaccttggcctctaacc

SEQ ID NO: 725404 - DNA, 667 bp, Homo sapiens
cccagtttcaggtattctgttagagcaacataaaacagactaagacactccctttgctccaccttcagcagcatagcacacccagtgaaaagctgcattccaaaataccaactcaaccctgggttttgggggctttgggtattagaaaagttttcagtaatgaaaatatgccatctttgcataggctaaggagtctcacaggcctccatggctatcttggctttttccatttattgactatgtgactttggacaagtaatactctttctggatctcaatctctatctataaagagtgtgcccagtgcctaaagcaagctgggaatcgggaaggtacagggccatctccagcctatatggagcctttatgttatttggaaaagacactccttgctcaagacactttatgggcatctgccagataattgtaataaatatatatcttcaatagaaatgtgagaggcactcctagatgtgaccatcacaagtgtattcattggaagatgctcagaagagcaaaggaggtgaaataatcataggactaactggggcattaatgagygtgcctcagatctatctaaggtctagaaggtcattctatagatcaaagcccatgtgactcaggaaggagttatggaggcttagtgggaaggaggggctttggattt

SEQ ID NO: 725405 - DNA, 1324 bp, Homo sapiens
atcatccagatattttagtaccatttattccaaaatttggttggctatggcaaagaaattttccaatacctcctcggtacttcagcatgtccttgtctctacatcagttcccttatccttactttcaatcacaaaaagaaaaggaaaacaaaaaagatattgccagtgaacagatccctcattcccttgagataactggatgtattaaactttggtgcttgaaaaccaaaacagttttccctttgtaagccaagaattaataacctctttcaagtgaggataattatttggcaaaatatgtaaaatgaccattataactatgtsctacttttaaaaaatttaacttaaaactgttagacatatagttgcctattcacgaaaaacattttttgtgtgtgtgaaaggattcatgccagcattcactcttaaaaacaaaatttcggccaggcgcagtggctcacacctgtaatcccagcactttgggagtccagcgtgggtggatcacaaggtcaggagatcaagatctcctggctaacatggtgaaaccctgtctctactaaaaatacaaaaaattagccaggcatggtggcatgtgcctatagtcccagctactcaggaggctgcggcaggagattcacttgaacctgggaggtggaggttgcagtgagccgagatcatgctactgcactccagcctgggcaacagagcaagactcccatctcaaaaaataaaataaaataaaataaaaaataaaaataaatccctagcataattgttagtttacagagactcagagacttaattcctgagtcctaatttagactaaggattctgtcctctttgctgagaactgtcctcttcacccagagtagccagcctctggcacctacgttctagtttgtgacaccctgcttcccacaaccccttgattggaccaagctgagccatcagagtctcactcctggggaatttggagttgggattcaaaaacagcaaatcagacttttctgttcacttgaaatgaggttacccatgctctaaagttaaggctgccactatgaggttaccatcttcattcttgcacagaaagctgatttgctataggagagaagaatgccacagaagagaagagagagagaatgtgcgcagtatgtgtccccatagcttttcagttccctctttcttataaggtccaccaaaacttcatgcattttctatcttgaaaatacttccttatgacaaatttctccttttgacttaagttagatctagtagtgtcagcgtactcacaactgaaataaccaggagtaagggagacatcata

SEQ ID NO: 725406 - DNA, 1324 bp, Homo sapiens
atcatccagatattttagtaccatttattccaaaatttggttggctatggcaaagaaattttccaatacctcctcggtacttcagcatgtccttgtctctacatcagttcccttatccttactttcaatcacaaaaagaaaaggaaaacaaaaaagatattgccagtgaacagatccctcattcccttgagataactggatgtattaaactttggtgcttgaaaaccaaaacagttttccctttgtaagccaagaattaataacctctttcaagtgaggataattatttggcaaaatatgtaaaatgaccattataactatgtgctacttttaaaaaatttaacttaaaactgttagacatatagttgcctattcacgaaaaacattttttgtgtgtgtgaaaggattcatgccagcattcactcttaaaaacaaaatttcggccaggcgcagtggctcacacctgtaatcccagcactttgggagkccagcgtgggtggatcacaaggtcaggagatcaagatctcctggctaacatggtgaaaccctgtctctactaaaaatacaaaaaattagccaggcatggtggcatgtgcctatagtcccagctactcaggaggctgcggcaggagattcacttgaacctgggaggtggaggttgcagtgagccgagatcatgctactgcactccagcctgggcaacagagcaagactcccatctcaaaaaataaaataaaataaaataaaaaataaaaataaatccctagcataattgttagtttacagagactcagagacttaattcctgagtcctaatttagactaaggattctgtcctctttgctgagaactgtcctcttcacccagagtagccagcctctggcacctacgttctagtttgtgacaccctgcttcccacaaccccttgattggaccaagctgagccatcagagtctcactcctggggaatttggagttgggattcaaaaacagcaaatcagacttttctgttcacttgaaatgaggttacccatgctctaaagttaaggctgccactatgaggttaccatcttcattcttgcacagaaagctgatttgctataggagagaagaatgccacagaagagaagagagagagaatgtgcgcagtatgtgtccccatagcttttcagttccctctttcttataaggtccaccaaaacttcatgcattttctatcttgaaaatacttccttatgacaaatttctccttttgacttaagttagatctagtagtgtcagcgtactcacaactgaaataaccaggagtaagggagacatcata

SEQ ID NO: 725407 - DNA, 950 bp, Homo sapiens
ataatgtataaataaattatcgtatcaaatgatataaacttaaaataacttttatagtattttatcctttattttccaggacacaaaatagatgacgaaatttgctagtaccttgattaaatatcacccaaatatcaagaaatttgaatttgcttagaataacaataatatttaaaattggcctaatgaaaaataaaggtattggtgaacatctgtttaacataaaaaagacatttctagacatatttgtatactatgtaatatttctacagagaaattcatgataccaaagacacttatgcatttgaatgaaaaaactgaatatgttgcctccctagataaaagaktatcattaacactaattttaatatcaaagttcaagcctcaatacacttcttagagagaggaactctctacactgggtatttcagtcaaaaccccaggcagtatctctaattttactttctcttttagccttcattcatatcaataataagcttgtgttcttttcttgatctttgatctaatttagacaactgtgggagattactttatttggaaaaaaatttttttaatgaggtttttcaaacttgctttcttttaaaactcaggaagggttttcctactttgttctttgctgcagtttaaacctcaagccttgccactcacagtgtaatctacagaccagcagtatcagaacaccttgggagcttattagcaacatagtgtttcaggctctacccgagatgctctgaattgggttctactttccaacaagatcctgggataatttttatgcacatggcagtttgagaagcgcttctttaaaacattaaaaggaagttaaaatatgtatcacttctcacagacttttgccagtgacaaaactatttcagaaaaattctaagtttaagattactcgtgaggttgaaataaaaatccgtaaaatc

SEQ ID NO: 725408 - DNA, 649 bp, Homo sapiens
tcctttccatttatttggatttcttttttttttgttgttgttgcctcactaagataagaatgactaacagctttacttcttcccgaggttatttacattttagactacaactttgaaaagtcttarcagtgaaattgtaattgctggctgagttaggatgttctgttatctgcctcaccatgactagattgattgagtcattctttttttttttttttttttaattttccggttaacatttaggcaaatggctctgatgtatgtgatcctctctcaagggctttggtttgggggccatgaatatactgcagttcctccctcagaagacgtcatcattcggtgaaggaaccaaatatgaaaacacacagttctgatataacatgcaaaatgatatgtgcagtggggtgggggcctggagtagacagtggtcaattttgtctggaggacctagggaggctggagtaatcataatgaatgatatctactattaagtatttactctgcatctacttcagtagtcactttacatgcttttaagcctcacattgacccttgagttcacttacatccttttttgcagatggggaaactgaagcttcaaaagcttaaggaatttcttaataatgtcacactgctaataatgacagag

SEQ ID NO: 725409 - DNA, 649 bp, Homo sapiens
tcctttccatttatttggatttcttttttttttgttgttgttgcctcactaagataagaatgactaacagctttacttcttcccgaggttatttacattttagactacaactttgaaaagtcttaacagtgaaattgtaattgctggctgagttaggatgttctgttatctgcctcaccatgactagattgattgagtcattctttttttttttttttttttaattttccggttaacatttaggcaaatggctctgatgtatgtgatcctctctcaagggctttggtttgggggccatgaatatactgcagttcctccctcagaagacrtcatcattcggtgaaggaaccaaatatgaaaacacacagttctgatataacatgcaaaatgatatgtgcagtggggtgggggcctggagtagacagtggtcaattttgtctggaggacctagggaggctggagtaatcataatgaatgatatctactattaagtatttactctgcatctacttcagtagtcactttacatgcttttaagcctcacattgacccttgagttcacttacatccttttttgcagatggggaaactgaagcttcaaaagcttaaggaatttcttaataatgtcacactgctaataatgacagag

SEQ ID NO: 725410 - DNA, 1196 bp, Homo sapiens
tggagtctaactctgttgcccagactggagtgcagtggcgkgatctgggctcactgcaacctccacctcccaggttcaaacaattctcttggctcagcctcctgaatagctaggatcacaggcacctgccaccatgcctggctaatttttgtatttttagtagagacaaggttttgccatgttggccaggctggacttgaactactgacctcaagagatctacctgcctcgaccttccaaagtgctgggattacaggcatgaggcaccacgaccggccaggtttttttaaactctgtttgatcatggcctgaggtccccaaaggaggaaactagatgtgtagagaaagactcaagggtgggttagcattttagggtacctctcgtgtgccaggcctaagtaaaggacagaggggtacccttccccttccatttccaaatcttagcctggctccagggctctgctcagcaccgctgcttccttaagaccttcccagatctacacacacatgcacacacaccccagccagagcaaggcttgctgtctcccaactcccaggggatagtctcggcacctccatttggccattcctactttctgccttgtgtgacagttctgtgcatctggtcctgtcccttactagcatgtgaggtccttggggacagaagctggcttctgctcacctaaccagtttggctggattgcctgatgtttagaccatatggttttgacgaatatagcctcataggtgttcacacaaagccatggcatcaaaaccaagtctccagaatgctctggagtatgactgggcacaacttcctgtttttgtaaaggaggacactgaggctgagggaagtcactgagagatgcaccttgactttctgcattcctgatacagctaatctcacttctctgagaagtcatctcagacgctctccgttgacataaacatctcccacctcccagcctagctctgtgagatgttattccatgtaatgatggccaagggaggcattccagataaagaattaagaagaagccccagttcttcactagtgaaactggtgggttcccctagtttgacagatctgctcactgaaatgattgatgggacataagcactgtttgtggctttttggacctttaatgtagggaatgcaagcatttgtccctatgcactttctcatgtcattaaac

SEQ ID NO: 725411 - DNA, 1196 bp, Homo sapiens
tggagtctaactctgttgcccagactggagtgcagtggcgggatctgggctcactgcaacctccacctcccaggttcaaacaattctcttggctcagcctccygaatagctaggatcacaggcacctgccaccatgcctggctaatttttgtatttttagtagagacaaggttttgccatgttggccaggctggacttgaactactgacctcaagagatctacctgcctcgaccttccaaagtgctgggattacaggcatgaggcaccacgaccggccaggtttttttaaactctgtttgatcatggcctgaggtccccaaaggaggaaactagatgtgtagagaaagactcaagggtgggttagcattttagggtacctctcgtgtgccaggcctaagtaaaggacagaggggtacccttccccttccatttccaaatcttagcctggctccagggctctgctcagcaccgctgcttccttaagaccttcccagatctacacacacatgcacacacaccccagccagagcaaggcttgctgtctcccaactcccaggggatagtctcggcacctccatttggccattcctactttctgccttgtgtgacagttctgtgcatctggtcctgtcccttactagcatgtgaggtccttggggacagaagctggcttctgctcacctaaccagtttggctggattgcctgatgtttagaccatatggttttgacgaatatagcctcataggtgttcacacaaagccatggcatcaaaaccaagtctccagaatgctctggagtatgactgggcacaacttcctgtttttgtaaaggaggacactgaggctgagggaagtcactgagagatgcaccttgactttctgcattcctgatacagctaatctcacttctctgagaagtcatctcagacgctctccgttgacataaacatctcccacctcccagcctagctctgtgagatgttattccatgtaatgatggccaagggaggcattccagataaagaattaagaagaagccccagttcttcactagtgaaactggtgggttcccctagtttgacagatctgctcactgaaatgattgatgggacataagcactgtttgtggctttttggacctttaatgtagggaatgcaagcatttgtccctatgcactttctcatgtcattaaac

SEQ ID NO: 725412 - DNA, 621 bp, Homo sapiens
agtgcagtggcatgatctcagctcactgcaacctccggctcccgggttcaagcaattctcctgtctcagcctcctgagtagctgggattacaggctcccaccaccatgcccagctaatttttggtatttttagtagagacagagtttcaccatgttggccaggctggtctcaaactcctgacctcaggtgatccgactgctttggcttcccaaactgctggcattacaggcgtgagccactgcgccctggcctattctactggattttctatgcaattgtgttataactcatcataaagataattttatttcttttccacaatctttacaggtttaatttttttctatgccttgctgcactctytatgatttccagtattggcactactctggcctttggtctttgctcttgcatcagcctttcataattgggtatgtttgttgtaagttttctgtagagagtctttatgaggttaagagatttgtttcatttctagtttattaagagattttattatagatcaatgttaaattttatcaaaatttctccattgcatttctattgagatgatcacatgattattaaaaattagtataaagatttattattttgatatttta

SEQ ID NO: 725413 - DNA, 621 bp, Homo sapiens
agtgcagtggcatgatctcagctcactgcaacctccggctcccgggttcaagcaattctcctgtctcagcctcctgagtagctgggattacaggctcccaccaccatgcccagctaatttttggtatttttagtagagacagagtttcaccatgttggccaggctggtctcaaactcctgacctcaggtgatccgactgctttggcttcccaaactgctggcattacaggcgtgagccactgcgccctggcctattctactggattttctatgcaattgtgttataactcatcataaagataattttatttcttttccacaatctttacaggtttaatttttttctatgccttgctgcactctctatgatttccagtattggcactactctggcctttggtctttgctcttgcatcagcctttcataattgggtatgtttgttgtaagttttctgtagagagtctttatgaggttaagagatttgtttcatttctagtttattaagagattttattatagatcaatgttaaattttatcaaaatttctccattgcatttctattgagatgatcacatgattattaaaawttagtataaagatttattattttgatatttta

SEQ ID NO: 725414 - DNA, 1369 bp, Homo sapiens
attctaaggaaatcataattatgttgtctaagttgtgtactgtgtgtccaagtatttattacactctgtatatgatgatagataacatttttagaatgctttctctgtaccaaggattgtacaatatgtttagtatatactgttatccttcagtatccatgggggattggttccaggaccacttcctcactcccccaccctccacacacccccaagataccaaaatctgctgaagctccagtccctgatataaartgaataaatttgggtataacctatgcatatcctcctgtatgttttaaataatttctaggttacttataatacctaatacaatgtaaatgcaatataattaatcgttatactatattggtattttatttatattatttcctcttgtactgttatttttttccaaatattttccatccccagatagtttaattcttggattcagaacccacagatatgttgggctgaccttatcatcccactaaagacttgtaacaatcccaagaggtaggcctagtcatgatctttattttatagagaagaaaattaaagcttaaagtaactacaggatcaggcagtgtgaacaaggtagagccaggattcgaacgagggaagtcatgctctaccaccgcaggctgcaactgggctggttgtgcacctgccacatatgaacctcagatatagctactgtctgccagaaatcccaccagtgtttccagccatattatttgaaggtaaggtagagcacctctgtagtagtgttgctgaaagaaaaaatactgaaattaatagaaagacaacaatttttcttatcacatatagctataagcatggtggaaaattatgtctattctctcagtaagtagatataaagctgaccaataatggcatatatgcctatatctccataaattaagtattgtttaacatctcctaaatttatcataatgcttcaacaatttaaaagagataccattttaaagacagtattaaaaaaacccaacaatttctcactccttatatatgtacatttacatatgtacacacacatagaaatacgtatatacatgtacacacataccacatacatatatatttatacacatatgtgtgtgtgtgtgtgtgtgtgtgtgtgtggtatttttcagttcacacctggaaagtgaaagtagtgctcccatttagctattccatgtctgtgcgcagtatgttcctgacagaagagagtttcagtttagaaggggactcctccatgaaccttccttccccaactcccagaacaaaatgaatcccctctctgtacagattgcttttacgtctaaaatagatctatgtcttttcatgctgtcttgtatga

SEQ ID NO: 725415 - DNA, 1369 bp, Homo sapiens
attctaaggaaatcataattatgttgtctaagttgtgtactgtgtgtccaagtatttattacactctgtatatgatgatagataacatttttagaatgctttctctgtaccaaggattgtacaatatgtttagtatatactgttatccttcagtatccatgggggattggttccaggaccacttcctcactcccccaccctccacacacccccaagataccaaaatctgctgaagctccagtccctgatataaagtgaataaatttgggtataacctatgcatatcctcctgtatgttttaaataatttctaggttacttataatacctaatacaatgtaaatgcaatataattaatcgttatactatattggtattttatttatattatttcctcttgtactgttatttttttccaaatattttccatccccagatagtttaattcttggattcagaacccacagatatgttgggctgaccttatcatcccactaaagacttgtaacaatcccaagaggtaggcctagtcatgatctttattttatagagaagaaaattaaagcttaaagtaactacaggatcasgcagtgtgaacaaggtagagccaggattcgaacgagggaagtcatgctctaccaccgcaggctgcaactgggctggttgtgcacctgccacatatgaacctcagatatagctactgtctgccagaaatcccaccagtgtttccagccatattatttgaaggtaaggtagagcacctctgtagtagtgttgctgaaagaaaaaatactgaaattaatagaaagacaacaatttttcttatcacatatagctataagcatggtggaaaattatgtctattctctcagtaagtagatataaagctgaccaataatggcatatatgcctatatctccataaattaagtattgtttaacatctcctaaatttatcataatgcttcaacaatttaaaagagataccattttaaagacagtattaaaaaaacccaacaatttctcactccttatatatgtacatttacatatgtacacacacatagaaatacgtatatacatgtacacacataccacatacatatatatttatacacatatgtgtgtgtgtgtgtgtgtgtgtgtgtgtggtatttttcagttcacacctggaaagtgaaagtagtgctcccatttagctattccatgtctgtgcgcagtatgttcctgacagaagagagtttcagtttagaaggggactcctccatgaaccttccttccccaactcccagaacaaaatgaatcccctctctgtacagattgcttttacgtctaaaatagatctatgtcttttcatgctgtcttgtatga

SEQ ID NO: 725416 - DNA, 1369 bp, Homo sapiens
attctaaggaaatcataattatgttgtctaagttgtgtactgtgtgtccaagtatttattacactctgtatatgatgatagataacatttttagaatgctttctctgtaccaaggattgtacaatatgtttagtatatactgttatccttcagtatccatgggggattggttccaggaccacttcctcactcccccaccctccacacacccccaagataccaaaatctgctgaagctccagtccctgatataaagtgaataaatttgggtataacctatgcatatcctcctgtatgttttaaataatttctaggttacttataatacctaatacaatgtaaatgcaatataattaatcgttatactatattggtattttatttatattatttcctcttgtactgttatttttttccaaatattttccatccccagatagtttaattcttggattcagaacccacagatatgttgggctgaccttatcatcccactaaagacttgtaacaatcccaagaggtaggcctagtcatgatctttattttatagagaagaaaattaaagcttaaagtaactacaggatcaggcagtgtgaacaaggtagagccaggattcgaacgagggaagtcatgctctaccaccgcaggctgcaactgggctggttgtgcacctgccacatatgaacctcagatatagctactgtctgccagaaatcccaccagtgtttccagccatattatttgaaggtaaggtagagcacctctgtagtagtgttgctgaaagaaaaaatactgaaattaatagaaagacaacaatttttcttatcacatatagctataagcatggtggaaaattatgtctattctctcagtaagtagatataaasctgaccaataatggcatatatgcctatatctccataaattaagtattgtttaacatctcctaaatttatcataatgcttcaacaatttaaaagagataccattttaaagacagtattaaaaaaacccaacaatttctcactccttatatatgtacatttacatatgtacacacacatagaaatacgtatatacatgtacacacataccacatacatatatatttatacacatatgtgtgtgtgtgtgtgtgtgtgtgtgtgtggtatttttcagttcacacctggaaagtgaaagtagtgctcccatttagctattccatgtctgtgcgcagtatgttcctgacagaagagagtttcagtttagaaggggactcctccatgaaccttccttccccaactcccagaacaaaatgaatcccctctctgtacagattgcttttacgtctaaaatagatctatgtcttttcatgctgtcttgtatga

SEQ ID NO: 725417 - DNA, 598 bp, Homo sapiens
tgaaagtgaaggatagatgtgtgctttccacacttgtcatttagaacccatagtgactttcttagttttcctctatctagatgtgtattatttagtcacaagtatataaactgaacatttaagcttctgtgttgacatcatggaaggcagctttgatctcccacagaacgtccctgaaagcccctgatagccacactgctggtgaagtacgaggatgggcttaatgctacatataacttttgactccattaggcatattcatagatggggaagtttaatttctttctcacatgctccttaagaacttctgttattatccattaatttttcccctcctccctctgtataaataatttcacatctctactctgaggcttctctaaggactctcacttcatcatcacttcccagtttatcacatctctcacttaattcgygaacatttttattcattcatttattcattccctgagtgtttactgagtacagggaatagcattagagagtgaaaaatgagccaattttccatatcctcagggatcccacaggttaaatctaacatgttaggaagatgttgcagctggagaatcttatggaa

SEQ ID NO: 725418 - DNA, 1528 bp, Homo sapiens
gcaccaagccatgaaggacccacccctatgatccaaacacctcyaactaggcaccccctccagcactggagattacaattcaacatgaggtttgggtggggagaaatatccaaaatgtattgcactataggattcaagcacacaaagaggcaccagggaatcacaggcccagggaacaagccgcgtgaggacacaggtagatggtggccatcttcaagccaaggagagaggcctcaggagaaatcaaacctgcccacaccttgatctcggactactagcccccatcactgtgagaaaatcaatttcggttgtttaagccaccgtgtttgtggtattttgttatggtagccctagcaaactaatacagagtaatgtgaatgagctatttctgaggaaaatgtcaatgtattttaaaaccaatgtgggccgggagtggtggctcacgcttgtaatcccagcagtttgggtggctcaggcgggtgcatcacttgaggtcaggagttcaagaccagcctggctaacatggtaaaacactgttgctgctaaaaacacaaaaaattagtccggtgtggtggtgcacacctgtaatcccatttatttgggaggctggtgcaggagaatggctttaacctgggagatggaggttgcagtgagcaggtattacacaactgaactccagcctgggcaacagagcgagatgctgtctcaaagaaaaaagaaagaaaaaaaaagaatgtgaaaggaggacttaagaggaagctacttaatattaactaaacagcaataataagtcacctctagtgagtggctgctatctgctgacactcttcaaagtggctgacatacattatttagttttacaataatcccgtcaggtagttattatcatctctatgttataaatgaggaggaaagtgaggtttgggtgggttgagtaaaatctcatagatcacacaggcgctgagtagtggactggggcctgaacgcaggtctgatttcaaagctcatgtgcatattccgccatattgccaagttacatccatcacagggagaggtccagaacagcatcagaatttgactagcctctgaggcatgttttctcaaaagcattaagcttcaaaggaacatgtcttcagaaatacatggaaatatagctgagaagattctgagtttgctgagagatgaaattacatatttgggaacttgcaaagaattttttatggagacaaaattgattttgcagtaggcagtaactgagtaaagcaaacaggtacaaatgtgagacttgcaaaaaaaaattgtaaaagattcagcctgaaacattcccaattaatttgtatgtgatgagctcaaactctgtatgaatcttcagcaaataaaccagtgtccatttgcagagatgctaagttgccagcattctcctataagtgaattgcagaaaatgggcttgattctagatcatttcatttaaggcttagttcttttatcccacaaggttaaacttagtaaacaaataaaaaggtttaaa

SEQ ID NO: 725419 - DNA, 1528 bp, Homo sapiens
gcaccaagccatgaaggacccacccctatgatccaaacacctctaactaggcaccccctccagcactggagattacaattcaacatgaggtttgggtggggagaaatatccaaaatgtattscactataggattcaagcacacaaagaggcaccagggaatcacaggcccagggaacaagccgcgtgaggacacaggtagatggtggccatcttcaagccaaggagagaggcctcaggagaaatcaaacctgcccacaccttgatctcggactactagcccccatcactgtgagaaaatcaatttcggttgtttaagccaccgtgtttgtggtattttgttatggtagccctagcaaactaatacagagtaatgtgaatgagctatttctgaggaaaatgtcaatgtattttaaaaccaatgtgggccgggagtggtggctcacgcttgtaatcccagcagtttgggtggctcaggcgggtgcatcacttgaggtcaggagttcaagaccagcctggctaacatggtaaaacactgttgctgctaaaaacacaaaaaattagtccggtgtggtggtgcacacctgtaatcccatttatttgggaggctggtgcaggagaatggctttaacctgggagatggaggttgcagtgagcaggtattacacaactgaactccagcctgggcaacagagcgagatgctgtctcaaagaaaaaagaaagaaaaaaaaagaatgtgaaaggaggacttaagaggaagctacttaatattaactaaacagcaataataagtcacctctagtgagtggctgctatctgctgacactcttcaaagtggctgacatacattatttagttttacaataatcccgtcaggtagttattatcatctctatgttataaatgaggaggaaagtgaggtttgggtgggttgagtaaaatctcatagatcacacaggcgctgagtagtggactggggcctgaacgcaggtctgatttcaaagctcatgtgcatattccgccatattgccaagttacatccatcacagggagaggtccagaacagcatcagaatttgactagcctctgaggcatgttttctcaaaagcattaagcttcaaaggaacatgtcttcagaaatacatggaaatatagctgagaagattctgagtttgctgagagatgaaattacatatttgggaacttgcaaagaattttttatggagacaaaattgattttgcagtaggcagtaactgagtaaagcaaacaggtacaaatgtgagacttgcaaaaaaaaattgtaaaagattcagcctgaaacattcccaattaatttgtatgtgatgagctcaaactctgtatgaatcttcagcaaataaaccagtgtccatttgcagagatgctaagttgccagcattctcctataagtgaattgcagaaaatgggcttgattctagatcatttcatttaaggcttagttcttttatcccacaaggttaaacttagtaaacaaataaaaaggtttaaa

SEQ ID NO: 725420 - DNA, 1528 bp, Homo sapiens
gcaccaagccatgaaggacccacccctatgatccaaacacctctaactaggcaccccctccagcactggagattacaattcaacatgaggtttgggtggggagaaatatccaaaatgtattgcactataggattcaagcacacaaagaggcaccagggaatcacaggcccagggaacaagccgcgtgaggacacaggtagatggtggccatcttcaagccaaggagagaggcctcaggagaaatcaaacctgcccacaccttgatctcggactactagcccccatcactgtgagaaaatcaatttcggttgtttaagccaccgtgtttgtggtattttgttatggtagccctagcaaactaatacagagtaatgtgaatgagctatttctgaggaaaatgtcaatgtattttaaaaccaatgtgggccgggagtggtggctcacgcttgtaatcccagcagtttgggtggctcaggcgggtgcatcacttgaggtcaggagttcaagaccagcctggctaacatggtaaaacactgttgctgctaaaaacacaaaaaattagtccggtgtggtggtgcacacctgtaatcccatttatttgggaggctggtgcaggagaatggctttaacctgggagatggaggttgcagtgagcaggtattacacaactgaactccagcctgggcaacagagcgagatgctgtctcaaagaaaaaagaaagaaaaaaaaagaatgtgaaaggaggacttaagaggaagctacttaatattaactaaacagcaataataagtcacctctagtgagtggctgctatctgctgacactcttcaaagtggctgacatacattatttagttttacaataatcccgtcaggtagttattatcatctctatgttataaatgaggaggaaagtgaggtttgggtgggttgagtaaaatctcatagatcacacaggcgctgagtagtggactggggcctgaacgcaggtctgatttcaaagctcatgtgcatattccgccatattgccaagttacatccatcacagggagaggtccagaacagcatcagaatttgactagcctctgaggcatgttttctcaaaagcattaagcttcaaaggaacatgtcttcagaaatacatggaaatatagctgagaagattctgagtttgctgagagatgaaattacatatttgggaacttgcaaagaattttttatggagacaaaattgattttgcagtaggcagtaactgagtaaagcaaacaggtacaaatgtgagacttgcaaaaaaaaattgtaaaagattcagcctgaaacattcccaattaatttgtatgtgatgagctcaaactctgtatgaatcttcagcaaataaaccagtgtccatttgcagagatgctaagttgccagcattctcctataagtgaattgcagaaaatgggcttgattctagatcatttcatttaaggcttagttcttttatcccacarggttaaacttagtaaacaaataaaaaggtttaaa

SEQ ID NO: 725421 - DNA, 1503 bp, Homo sapiens
atgcttgggcaagtaagacagagaaagggggaaagtgccactcaattccactcaccagaaaaaattaaacttagctttggctcagctaggaccccaaatacatcaagacaggtatttgaggtgagaggttttttgtgtctgggctaggtaaccaaagaaatgaattacagaaatgtaacctatgatgacctcattttttggaggtctgtgtggcaagcaaaaacactgggagccagtctctctaaatcgttgctgaaaaattattctgaaaatagtagaatgatttatccaagccccatgtgattcctttcatagactgttttattcctaggttgaatataaacttattgtcatacaaacactatttcagagttcatacttaagggtgtttttatatttatcatccacattgttcatgcatattctttattcattaacatcataaacatctatagaatgcttactatgtgcaaagctccaagctacacactcattacaacattaatcttggtctatctatcttggattgagatcttctattaatacgttactcccctagtaacttggggctttcctaggcaggggttgtgtcttattcatctgtatatgaaactttaattcaaattatgggtctatcatttgctgtgttagctgcggtgcattcacatatwacagacctcagttatgtgaaattaatatagtgatatttaatgtaaaaaattagagtgaggattgaatttattataatctatgtggaaaaacaaaatcagtacctagtgagtatcagtttcttttctgggtctgtagcactttaagcaaggctttgaaggagagtaaagagataataaatgttttctgaatgaaatcatacaatacaattcaagaaaccccggtaacaaccacatggaaaaacacacaaagcttagaaaatgctttttagagcttcatgtcagccccagttaatttcctcactaatgaaactccgcctgcttgtttctgaaagacagaggatgcactgagaccctcaacctttgtatttgctaatctgtacatcgtaagtacttagcacggaattgactcagtgtctacatcagggcagcacaaaccagcatggggctgtggctgactttgatttggaatcctaagtgagccccctcagcaggatgcctgagctcacatcacctgcccttgtcaatcattttgcctttccctccaattctatttcagatgagactcccaaggaaacacgggaaatcatgccatcctcagaggctgggaaagttcagtcccatccgaaacccaaatgggcctaagagcttctagttttaaaaataattttaaagctcttgatacttttgtctctaaagatgtattttacagtgggatggccacatatacgcaaattagcttactataaaatggtctttatttttaacagtagatttaatttactgtgtaacccaggggagtccagaacaggaaaaggcccaaagcaacagagaa

SEQ ID NO: 725422 - DNA, 662 bp, Homo sapiens
tccttggttttatctgtgtgtactagcgtacttctcgacttctagcaaatatttgtagaatgaatgaaataattattatgatgtataaaaatcatattttattataaaagtgtaagttttagaaggatataatactagggtgcctcattacctctttctattttgcaacatttcaagcacagaacctaagagttctatgtgcttttaaaactcaaaccataacattaaaagaaaattacacagctgctaaaagaaattttaaagccaaggaaaaataaagtagtatgcatattaattgctggacaaatcagatttctatacacatttccctgcagtttcactaagaaataaccattcaaatatttccttacctctgcaaataggaggtgatgtccatgttccattttctaaacaaacactcctcaggaaaccctccaacatgtatccactgtaacatgagtaggtgatcatgtctccatattgataatgtacgcctcgagcaattgcattttctacgtgagctggtggaccacatgagatttctacaggataacaaaacracaattaagcttgtgctattaacacagactgagaacacagtctcatctctcagaatgaattaaagagcaaaaataaaatacataagggaaacattttcacct

SEQ ID NO: 725423 - DNA, 653 bp, Homo sapiens
gactgactttaccttctgtgctgcagtgccattacctgttcaatgagggtgctaataaaaaatactcgtatagttatygtgaggattaaatgacatagtgcatgcaaagggcttatcatggcatctggcacctattattgctttcaaataaaaatcaaggccgggcgtggtggataatcccagcactttgggaggccgaggtgggtggatcacctgaagtcaggagttcgagaccagcctgaccaacatggtgaaaccccgtctctactggggttttaattttgtaaaaatacaaaattagccaggcatggtggtgcatgcctgtaatcccagctacccaggaggctgagacagaggattgcttaaacccgggaggcagaggttgcagtgagccgagatcatgccactgcactccaccccaggtgacagagtgaactccatctcaaaaaaaaaaaaaaaaaaaaaaaaaaaaaaaaaatcaagttgctatctgataggatcagtggcagttagaatttctctattccaggtgcaattttcccctagctaaattgaccttaataagactaagtttgattaaaacaagggataaggatttttcacaaaaatgcaattacactctttttaaaaaaaaaaaaacaactctgggacac

SEQ ID NO: 725424 - DNA, 653 bp, Homo sapiens
gactgactttaccttctgtgctgcagtgccattacctgttcaatgagggtgctaataaaaaatactcgtatagttatcgtgaggattaaatgacatagtgcatgcaaagggcttatcatggcatctggcacctattattgctttcaaataaaaatcaaggccgggcgtggtggataatcccagcactttgggaggccgaggtgggtggatcacctgaagtcaggagttcgagaccagcctgaccaacatggtgaaaccccgtctctactggggttttaattttgtaaaaatacaaaattagccaggcatggtggtgcatgcctgtaatcccagctacccaggaggctgagacagaggattgcttaaacccgggaggcagaggttgcagtgagccgagatcatgccactgcactccaccccaggtgacagagygaactccatctcaaaaaaaaaaaaaaaaaaaaaaaaaaaaaaaaaatcaagttgctatctgataggatcagtggcagttagaatttctctattccaggtgcaattttcccctagctaaattgaccttaataagactaagtttgattaaaacaagggataaggatttttcacaaaaatgcaattacactctttttaaaaaaaaaaaaacaactctgggacac

SEQ ID NO: 725425 - DNA, 1281 bp, Homo sapiens
gccctgcaatgggatgttttactcctggggcttctgtcgactctggaagggacagttgatggttaagcagctctttttccaacatcacagggccagagtgacaaggattgaggtctaagactctgcaagagcaaaaggccctcatacaccctttggctctgtgttaggattccatagggcagccttgaggggtttgcaactcagcttggaatcatgacaatctcagatatcaagtacctccagacacctggcagaagaaaaggaaactcccttttggagtttgggagataacatcttcctcatcctcaaattatgttttcaaatatgtgtccagggcaccacccaaaataatcaagcataagaagatgggacaactgcaaagacagatgacaaataaaaagatggcaaaagatctgccatgcaaacactaacccwgaggaaactggagtctctctactaagacaaaagcagacttcaaggtgaaaagcatagctagagctagaagagagggatatttcaaatgacataaagatttggaaaaatatagcagctctaaagttttatgtagctattaacataggatcaaaatctatggagcaaaatttcacagatggaagtggagaaatggacaaatcttcaccatatagagatttgaacatacctctctcactgatagtgtaaacaaaaaactcaggaaaaatatagacaattcaaacattatgatcagcaaatttgaatttacagatacattttgatgcattcaaaataactgtagaatatatactttttaaaagcacacctagaatatttataaaaatacttttaaaagcatatctagaatatttaattactaagacttcacgtaaaaaaatggatttccagcttcttttgatcaattttcatcttctctagaaactctaagctcagcagggactcacttccccacctcctgcacctgcaagctcactgcacccactctgcagacatttcaatattaaacactgggctaaagccacctagacttcaatctcccacacactcagaatagaaggaagctttttaaacccaattcaagattcaacagaaatctttatttctactacaatcttcgtccttctctttcccttcctcttttctccaacaacaaaaataaataacagaatttactggccacaataagtgttggcatgaggggccaagttcgttactttatcttttcttaccagtcaaaacttcagtcggggctgggcactgtaattaatcccagcaatttgggaggcc

SEQ ID NO: 725426 - DNA, 641 bp, Homo sapiens
aaagaaaccagacacaagagtacataatgctttattaatccatttatgtgaaattctagaaaacagaaatctcatctagagagacagaaagtagatcagcagatcagtgtttgcctggggctggggatgggtacaagggagcttcgggaagtataaaaatgttctacaacttgattatggtggtggttacatagatataaattttaaaaactcaactcaacattttttaaaagggtatatttcattttatgtattatatattttcatatatatatatatatatwtatatatatatatatcttaaggtaatttttaaaaagaacaaaatcttagaatatatttaaaacaagaaggccaggcgcgggtggctcacgcctgtaatcccagcactctgggaggccgaggcggggggaccacaaggtcaggagatcgagaccatcccggctaacatggtgaaaccccgtctgtgctaaaaatacaaaaaattagccgggcgtggtggcaggtgcctgtagtcccagctactcgggaggcttaggcaggagaatgacggtgaacccgggaggtggagcttgcagtgagctgagatcgcgccactacactccagcctggtcggcagagggagactccttctcaaaaaa

SEQ ID NO: 725427 - DNA, 641 bp, Homo sapiens
aaagaaaccagacacaagagtacataatgctttattaatccatttatgtgaaattctagaaaacagaaatctcatctagagagacagaaagtagatcagcagatcagtgtttgcctggggctggggatgggtacaagggagcttcgggaagtataaaaatgttctacaacttgattatggtggtggttacatagatataaattttaaaaactcaactcaacattttttaaaagggtatatttcattttatgtattatatattttcatatatatatatatatatatwtatatatatatatcttaaggtaatttttaaaaagaacaaaatcttagaatatatttaaaacaagaaggccaggcgcgggtggctcacgcctgtaatcccagcactctgggaggccgaggcggggggaccacaaggtcaggagatcgagaccatcccggctaacatggtgaaaccccgtctgtgctaaaaatacaaaaaattagccgggcgtggtggcaggtgcctgtagtcccagctactcgggaggcttaggcaggagaatgacggtgaacccgggaggtggagcttgcagtgagctgagatcgcgccactacactccagcctggtcggcagagggagactccttctcaaaaaa

SEQ ID NO: 725428 - DNA, 641 bp, Homo sapiens
aaagaaaccagacacaagagtacataatgctttattaatccatttatgtgaaattctagaaaacagaaatctcatctagagagacagaaagtagatcagcagatcagtgtttgcctggggctggggatgggtacaagggagcttcgggaagtataaaaatgttctacaacttgattatggtggtggttacatagatataaattttaaaaactcaactcaacattttttaaaagggtatatttcattttatgtattatatattttcatatatatatatatatatatayatatatatatatcttaaggtaatttttaaaaagaacaaaatcttagaatatatttaaaacaagaaggccaggcgcgggtggctcacgcctgtaatcccagcactctgggaggccgaggcggggggaccacaaggtcaggagatcgagaccatcccggctaacatggtgaaaccccgtctgtgctaaaaatacaaaaaattagccgggcgtggtggcaggtgcctgtagtcccagctactcgggaggcttaggcaggagaatgacggtgaacccgggaggtggagcttgcagtgagctgagatcgcgccactacactccagcctggtcggcagagggagactccttctcaaaaaa

SEQ ID NO: 725429 - DNA, 932 bp, Homo sapiens
tgtatgtcctcatgttttccagtcctaagtttttgataccttagtttgcctcccaggatcaaaagtgttgttgtgatagcatccaaatgcttttattttataaataattttcatgagcaattgtattaaggtttttattccttatttttatttttatttttgtttttgtttttgagacagggtcttgcactatcacccaggcttgagtgcactgstgtgatcacggctcactgcagcctcaacctcctgggctcaagcgatcctcccacctcagcctcccaagtagctgggaccagtcatgcaccaccacacctggctaatttttaaaatttttattttgtggagatggggtctctctattgcccaggctggcctcaactcctggcctcaagcgatcctcctgcctcagtctctgaaagtgcagggattataggtgtgagctactgcacctggcctttcctcaatttttaaagcattattgaagaaatctttttgtttccactgtgaagctatcttaactgaaactattttcattcttttataagttttttctagcctttagatacataaatagcaagtacattattgtaaacataatatctggacagctttgtgttctaatttttaaatcaagtatttcatgaacatttttctgggattctatatagtcagcatatccatcattttaatggctgtatttcattgtaataacactccataatccatttaccaattccctttgtatagtttaattcgtcttaatttaaaaaacaagtacaaagcacacagcattcttaggctggagaagaaatgaatggagatgtcttgtgaaccaaacaaaaaggatacctcaactcatacatgataagtaatcaccgtcatatgcgggtagccctttgcacatttcacatttctcaatatagaaactacta

SEQ ID NO: 725430 - DNA, 932 bp, Homo sapiens
tgtatgtcctcatgttttccagtcctaagtttttgataccttagtttgcctcccaggatcaaaagtgttgttgtgatagcatccaaatgcttttattttataaataattttcatgagcaattgtattaaggtttttattccttatttttatttttatttttgtttttgtttttgagacagggtcttgcactatcacccaggcttgagtgcactggtgtgatcacggctcactgcagcctcaacctcctgggctcaagcgatcctcccacctcagcctcccaagtagctgggaccagtcatgcaccaccacacctggctaatttttaaaatttttattttgtggagatggggtctctctattgcccaggctggcctcaactcctggcctcaagcgatcctcctgcctcagtctctgaaagtgcagggattataggtgtgagctactgcacctggcctttcctcaatttttaaagcattattgaagaaatctttttgtttccactgtgaagctatcttaactgaaactattttcattcttttataagttttttctagcctttagatacataaatagcaagtacattattgtaaacataatatctggacagctttgtgttctaatttttaaatcaagtatttcatgaacatttttctgggattctatatagtcagcatatccatcattttaatggctgtatttcattgtaataacactccataatccatttaccaattccctttgtayagtttaattcgtcttaatttaaaaaacaagtacaaagcacacagcattcttaggctggagaagaaatgaatggagatgtcttgtgaaccaaacaaaaaggatacctcaactcatacatgataagtaatcaccgtcatatgcgggtagccctttgcacatttcacatttctcaatatagaaactacta

SEQ ID NO: 725431 - DNA, 668 bp, Homo sapiens
tcttttataaattcttaattctgaaattccattgcattaaatactatgcgagagacccacagagttgcaagctttctccagttgaaggaactttggtcatattggatcactgatacgaactacagtgttattttcataaatctattgttaaagacaaacaaaaaggaaaggaaaacatgggaatgggtgactccactcaagagacccttcctaatccagcttaacaggaaaaaagacttgactcatttttttggatgtcaatttttttttaatttttgagacagagtcttgctctttcacccaggctggagtgcagtggtgtgatcttggctcrctgcaacctccgcctccaaggtttaagcaattctcatgcctcagcctctcaagtagctgggattacaggcacccgccaccacactcagctaatttttttatttttagtagatacaagctttcaccatgttggccaggctggtcttgaactcctggccccaggtgatcctcccacctcggcctcccaaagtgctgggattacaggtgtgagccaccgcacccggcctagatgtcaaatattaatatagtttttttaagtgaaaaattggaatactgctagtaaagggaactccttttgatacccactatagtaccagcatatatgttacaatcca

SEQ ID NO: 725432 - DNA, 1103 bp, Homo sapiens
tgtgtttaaacggctatacatgatggttggccaccaacaatagccatactaatgcagatgttttgaagacatttttgaatgtyactgagtggggatcctgccagcatctaatgggcagaggtcagggatgctgctacacattttacaagacacagacttaccagcaccctgtgagaaagaactatccagcaccaggttgagacacctgcctagaaatgccatgtcataagttagccggcggaaggatgctaaacccctctagggtctagtacaaggttgaagggaccctagctgttgaaagcagagggcatgtactccatgtcacacatttttggcaagtctcacaaagtttttggcttcaagaaagtctgaaattaaaatattctcatttattcccacagcccctgggtttcaccttcaaggcatcaagatttgctgatagctgattattcctctacagagtttctttgtgatgcatctacttataacttccttgggagacttaagagttgcataggaattctaggggctgactgcctcttccactgtgactgtaagctagaaccaccagtctggtttatataacagcctagaaagaatgctgttctgggactcaagagaaagtcacttggtgtttctggccttggtttgctcacctgtaagatgggctggtacagtggatgatccctaagctcccgccgtcgtgccctgattctgagatagcattatcagggaatctgtatggactcatgcaactgttctcctgggatcacaagggttgtgtgtctccccttctcatcttaaaatgaaatcttggaaatcttcagtataaaattcatattggtgttttcctgaccataaatataatgctccttactcaggagaagggaggactggggaaaacttgagggcaccgtttggttctgggaatgaagagagcacccagccccacaaggcagctcttgcttcctttagctgaagtttgaggcaggtgacttgaatgcttgtattgttttgtgtttcacagagaccggtcggggtgagcagtaacccacgctaacagagcttagtcaagcaaccagtaccggccaacggacagtgaa

SEQ ID NO: 725433 - DNA, 1103 bp, Homo sapiens
tgtgtttaaacggctatacatgatggttggccaccaacaatagccatactaatgcagatgttttgaagacatttttgaatgttactgagtggggatcctgccagcatctaatgggcagaggtcagggatgctgctacacattttacaagacacagacttaccagcaccctgtgagaaagaactatccagcaccaggttgagacacctgcctagaaatgccatgtcataagttagccggcggaaggatgctaaacccctctagggtctagtacaaggttgaagggaccctagctgttgaaagcagagggcatgtactccatgtcacacatttttggcaagtctcacaaagtttttggcttcaagaaagtctgaaattaaaatattctcatttattcccacagcccctgggtttcaccttcaaggcatcaagatttgctgatagctgattattcctctacagagtttctttgtgatgcatctacttataacttccttgggagacttaagagttgcataggaattctaggggctgactgcctcttccactgtgactgtaagctagaaccaccagtctggtttatataacagcctagaaagaatgctgttctgggactcaagagaaagtcacttggtgtttctggccttggtttgctcacctgtaagatgggctggtacagtggatgatccctaagctcccgccgtcgtgccctgattctgagatagcattatcagggaatctgtatggactcatgcaactgttctcctgggatcacaagggttgtgtgtctccccttctcatcttaaaatgaaatcttggaaatcttcagtataaaattcatattggtgttttcctgaccataaatataatgctccttactcaggagaagggaggactggggaaaacttgagggcaccrtttggttctgggaatgaagagagcacccagccccacaaggcagctcttgcttcctttagctgaagtttgaggcaggtgacttgaatgcttgtattgttttgtgtttcacagagaccggtcggggtgagcagtaacccacgctaacagagcttagtcaagcaaccagtaccggccaacggacagtgaa

SEQ ID NO: 725434 - DNA, 653 bp, Homo sapiens
caaggattcatctatacagtggccaccaggaggcagccgagtctcctcctcatggcccagagacgccctggttcatctttggaatctcccttgctacggacaggaagggcactagagcggaatgcaggtgggcttcatctgcgtcgaacttcccttgattccttctccaagctgtgtcttcctccccagttctgtactgactcggggagaactgggcagagagcagagagcccctctgatgatgtagggcacctctggtaactgcatggatgtgtgaccgcttcgtggggcacggggcgccaggagtaaaagctgggattctggagtggggggacctgggttcaaatccagctctgccacccagtagctgctgggactccagacacgttcytgcctctggaagccctggtgggcagaatacttcctatgtcatgggatttggggaagcttgagagacaggaggttgcatagcaaggaacacacaataagttctcaaaaagtgtgcgttcctttcccggcacaggcaatgaattacagagtcaggactccgtatgggaccagacagaaaccacgggccctgagtcaccgtgccaggctgctctgaaatacctttaatctgcaacagcatcagcctcttgtagggcacggcgctg

SEQ ID NO: 725435 - DNA, 663 bp, Homo sapiens
aagtttcccctacagggtttagaggccatactgtcccctggattgcagacttttggttccagaactataaaagaataaatttctgttattttaacccactaagcttgtgataatttgttacagtagtcacaggaagtgaacatacaggtatatcccaccttcatatttttgtgtccccccttcactttgcttaccttctttctttagctgttgctatgaatttcctgtctccactcagttatacaatacatttctcactctgccctggggcttctctgctgccacttggacatctctgagaaaccactcagctcagtcattctgatggccttgagtggctaacacacacagaggccacaggtattgcagatctaaggactgcctcagatagaaaaaacaaaaaatctcctgaattcctcaagacattcaaatgctttaggagacattcacatgagcaaaaactctatttgtaattatttgattctataaataacattttttgtacaaatgaaaagtatttgggcaggcttataatagacactgagttttccatgaatatattcatcatgtaaattgrgggaagatagattatattctgtttgggctggaacttaactaagaccagttcactattttaaaaaccgtctatgaacaaatttagtg

SEQ ID NO: 725436 - DNA, 657 bp, Homo sapiens
ttcttcctagtaaggcaggaaatttaattatatatttttaaaaattgtcaacaatcacaaaaattgaaaattcagccagccagaatgctgattcttcaaccagtcttttcttgtaacattaactgtcttagatcatttccaggtctgtttaaaaaataaaaattaaaaaaaaaggaragacattatacctacttcaaagtgataatgtaagatttaaatgaagtaatatctcagagggaagaccttgaacttggaagtcagacagacctgaatttaaaatttattatgccaccactgggctactacattctcacctgaaagaggggaatgataatatctgtctttgaaagtttgaacttttaaagatagggtttgttaaattatctggcacaaagaaaacacacaattcacaataactattattaggagatgaaagtgactgcccataacaaatgtttaataaatatttccactactttttaaattacaaagattcctgatctgtaagtcacagtttcccattgtgtaacttgtagcgtcaattcggtctttttgtgtcaatttcccatatatacaatggggataataatactagtcctttttacctcgcagagttgctgaaataactaaatgaggcagtacaaatgaaagctcttt

SEQ ID NO: 725437 - DNA, 1008 bp, Homo sapiens
tattgaaagaattgttcatataataaaggcccatgtaacttgctatcacctagatccttgctactcataatatggtctgcagaccactagcagcagcattccagagcttattagaaatgcagacttgggcccctccccatatctaaacacagaatctaaattctaataaggtctcaggtgatttatgcacttattaaaatttaataagcactgttgtaaacaaactcctcaacaaaatacagaaaccctgtcccaagatagctaaggatctatccaatcaatcaatcaacaaaatattgcctgatagcctgctctgtgcatgatgtcaacagagtggccaaagtgtcatccaaacacaaaaccatgagtgcaaaataacatcaatagaatgatggtttggcaatacttcctctagaaggctctgggagcaatacagagggacaaatgagagaggaaactttggccgtgataggatttttcttgaaagaagtcctgggagtccgaaagtgtattggtacaatgattattcctccagcttctgtagactttgccaaggtgcttctcctgataagtgagcagggagatctgaatgaagatgttaaattagaaataacaggaaataagcaagctgtgcactagagtggagcaaaaacaggtgaaaacaagaggcacaggcctgtccctagcaataactttaataactaatctctgtgctgctagaggcaatcttcgtcagcagtcatgagtgagtggatggatggcttgtggccactgtgactctgtgckccagcttgggagctgcaactataattgcctgttggggcttagtctcaaagtaaaagaaaggagcatcctgaagggaacacaaacttgtcctctagcttctgtttgggttcagcaatgccaagcagacagttgggaggacagactaagagagacacagggttatttccttcctcctcctcctcaccatccccacccattgctctaggtctgaaatcagtttca

SEQ ID NO: 725438 - DNA, 1554 bp, Homo sapiens
aacagcataagaaaagtttcacaacattctagcagccttcctgaggagggtggaagtgccactcacgtctgcaagcttctcagcatcaccaggcaccctgtgggagccagtgtaaagaaaggaagaaagaaaatcctacaaacctaggattaacaaaatttgccttataaacattaaatcattgtaactctgaataaattacatagtattttactagtaaccagactttaattgtatacgaggaaaatatcctgtggaatgacatgtcattgctcctaaagaaccaaagaaagaatttagcaccactgcaagagttcacagcctatcgctgggccaagggacaatttttcaaacatctgcttcagtactgagctcttaaaaaattagatgtatgttggtagcctaaaagtttgtcaataatcataccgcaggttatctggataacaackcatggaccaaatactatatataactcacttctggctcacaatacacatctaggttcaggttatcactggatcaagctgtacccctttattgtctaaggctaatgagaagtgtatttcttagataaatgcagtgtacctgctaagtaaagggtaaccaatatcatttgaaatcctgatgaagatttctctatagtttgactgtagaaaattctgagagaattgtcacagcaagtgagaaaacagctctggtgtaaaaactgaaaacagcctgattgtcatttatgtggtgaacagtaatttgatttcaacaaaacaacttcatctgtccatcaaattaatgatcctaatttaaattttattagttttgtagtttttgttgacttgaacttgtaaaatggtttttcttatacataattatataaagccaataagcacacagtttatacctattatgtttaaacgtgtttaagtaatactataataagaataattaagtcaaagcttagggtcattaagaaactttgctcttaaacggaacctatataatgagtgccctagtttgtggcattgagaagcacctctttggcctattaatccccaagagaccaaaccataaatgaacgggacaggatgaatctgaggagaaaatgggtacacagtgatcgggaaagagattaggagacatttctgcagtcagctgaaaagattataataagaaactgcttaccaaaaagcttcctcctgccttttgaagatttctagaataatacctcctgggaaacccaggcaacaggaactttctggttcctctaaagaattctgtaatggccacaaaatatctccctcaaacttccagaaattttgctaatttgttttgtgtgtgtgtgtgtgtgtgtgtgtgtgtgtgtgtgtgtgtgtgtgtgtttgacctctatactcttcttgactcagaactcttcttaccctttccatcattgccactgttgccagaaacaatatgattcctccattaggaaatttgaggtaattcttcccgtggttcttcaatgtgaactctttccatttcagtgcattttacacattgttcaatattcctacaggaaag

SEQ ID NO: 725439 - DNA, 681 bp, Homo sapiens
gggacccaaacctctgaaaatcaaaagaggaaaaagtcggggttgagcaggtaagcctcagaccacagtgaaaatctgacagtcttgaccaacccaaagggaactaggaataaaagctgcccatgagaggaatcctgcactgggcggaaagagacaggcctaaagaaacccactaagcttggtcattctctaagaactacctgataaggtgaattctgaaggtggagtctgttagctaacttcattccttgccgcagaaccacaaggtttttattgaagggaaactcaaatagcatacctccctggctactatggaacattaaatagtttttaaatctttgggaaaagagtggaatgttgaatgaaaccactctttcaacctccattgtagccagtgggggtgrggagggagggctacaatcgaaagataatttaaaataatcctaatatagtcagtcattctgttaatcagcataattttttaatcatttgtggtttaggtgccctttctggaggttttacttgtcattgtgtttatgggaaattgacagttattaattgtttttaagcttgaaccagtccttattagaattcaaatgtatttcccactactgggtccaatatctatgtaatcatttatcttatagtgaattttactgtaagcgtaatatttacaagaag

SEQ ID NO: 725440 - DNA, 1379 bp, Homo sapiens
  misc_feature 801, 802, 803, 804, 805, 806, 807, 808, 809, 810, 811, 812,813, 814, 815, 816, 817, 818, 819, 820, 821, 822, 823, 824,825, 826, 827, 828, 829, 830, 831, 832, 833, 834, 835, 836,837, 838, 839, 840, 841, 842, 843, 844, 845, 846, 847: n = A,T,C or G
  misc_feature 848, 849, 850, 851, 852, 853, 854, 855, 856, 857, 858, 859,860, 861, 862, 863, 864, 865, 866, 867, 868, 869, 870, 871,872, 873, 874, 875, 876, 877, 878, 879, 880, 881, 882, 883,884, 885, 886, 887, 888, 889, 890, 891, 892, 893, 894: n = A,T,C or G
  misc_feature 895, 896, 897, 898, 899, 900: n = A,T,C or G
actccttaactaagacttcttgttaagattattttaaactgtcttgaatttaagcttttatgtttcctgtattttcatttaatctcatctatattttatatttacaattttttcattgtgaatatataaccatactgtagatagcaagttcagggaaaattatctgttaattgcaattacagtgtgtatatttaacgttcaatgtgtgatcataaaaaaataagaatcattctgattttactgctactaatgtataaatatattacaattgttgtatacgattagtctaaattgttgaagtaaaacacattcatctaggctgagcgcagtggctcatgcctgtaatctcagcactttgggaggctaaggtgagcggatcacgaggtcaggagatggagaccatcctggccaacaaggtgaaaccccgtctctgctaaaaatacaaaaattagctgggtgtggtggcgcgcgcctgtaagcccagctacttgggaggctgaggcaggtgaattgcttgaacctgggatgcagaggttgcagtgagctgagatcacgccactgaactccagcctggtgacagagctagtctccatctaaaatatatatattcatctaatctgctcacctgtatttttgttttttattatttgtttgtgttagcctatgaagacactgtatgctgtttatttttttaggtttctgtaaattttactcaatacttatctcaacggttctctttaattaaactggcaaagcttttccttttggtttctgatgcagaagtttttccaccatgaattnnnnnnnnnnnnnnnnnnnnnnnnnnnnnnnnnnnnnnnnnnnnnnnnnnnnnnnnnnnnnnnnnnnnnnnnnnnnnnnnnnnnnnnnnnnnnnnnnnnnccattgaattcacaaatttagggaaaatatatttttcatattttattcaaagtgtctaaaactgaaaaagtacatgtcatttatattattcccagctctttttggtttgagccatagactgcaaattagtttttcatagtaaaactgtaacatagacatctcttcatgcttacctgctaactattccctgacttacatcttcagcgtgccattgaggtaaacacgatgatttattcttaaatacttatgtggatggtaacaaaaatgaaataggacattgctcaaaaaagaggggagggaagagaaagaaaaggaaacttccctacaatgctgctagccaggctttatctttatgacactaacgataatccccygtgtaattaactgtagagtggttatgcatgcagcatgcagcccatgacaagcctcatagaaaaatacatcagtattagccacaggtgaattcgtttagaaagatt

SEQ ID NO: 725441 - DNA, 1311 bp, Homo sapiens
catttagaagtatttgttacttcctgtaaaagcttctttcatggttttgtgtgcatgtgtgaagaaaaaaaaaattagcctcttaaaatgttgtagttgtaactgttcccagtacttagaacactagcgagggggggaaggaaactctccagttctcacagatgtatcagatgtttttaataatgaattgaaaaaccgtgtgttccatgtactgttattgtcactgagctatattattgagtgagtcgattagtgccgatttccattagttataattacctgtgctacagtgctagacaaagttattggcacatgaagtgtaaacatttttcaaagattggatttagttttaaagtaaacattgatatcttagcattaagccaatactgaaatgtaaagaaatggtaaagctttggcagctctcatctcctgaattcagttaatccattagaagtcaatctgtaggatactgtttgaaggggcttaagaattgktattgttaataccagttaaaataatttacaaaggtgtccattaaactagtcagccaggtgttgacagacaaaaatagggctggctctggatccgcccagagctattcacattaaatgtcagttaataatgtctgttataattttagtaaataaatgtctgaaagttcaatattaaagctttctcccagttatgtacctaaatcttttaccacacctatttaaatcctcatcgctaagttaagcatattctcaatgggttcataagctttgctggaagagtacttgtaattttctgaaactttagggggtcatgttcactcttcatccattaaatcagaaagaataagaaaagttcaagctaaaaaaaaaattaaaggattaaaaccaggaaatgtttaaaagtgcctcttaaatattgtattgccattactttaaaacaatcattcagagtgattgtaaagggtaaattattttttaaaaaaatttatgccattcactgaaagactgtatttggatcatattgtaaaataggactaaagcttatattcacgagtaggactttgtaatacacacacacacacacacacacacatatatatgtacacacacacatacatatataatctcctaaattcagcaggtcctgataactccaaaaggtagagtacaacctccatggtacatagtaaattctcgcatctttgacatcttaccttgttcataaacctgtcatatccagtgccttgatagatagaatttgaatcactttccttgctgaatgaaaggataatatgtttgcatgtgaatttccctccct

SEQ ID NO: 725442 - DNA, 910 bp, Homo sapiens
acctcccccacaagcccccgtcatccatttcactcacccccaagcctctggcaaccactgttctactctgttcctattagtttgacttctttagactcacattgttatgttcctcttatttcttttaattccctttagcctttcttataacagttatctatcatttctattaggtaaattgatcccatttccaaactttaattaacattttgttattgattagacttagaggtcatgtgctgctcatggaattaatgtgaatattatttttaatggttattttaaaatgcaacttcattgatttcagatataaaaccattactccttcaagagagcaatatgttggggggaaaatgatgctttcactgttactagttcaagatttgtctgctagtttcaaggattttcttttttaaaatgtcaaaactaaaacgggaaacaaaaatagcattaacagacccacataggaaattatattatttgaggatgtcaaattggaagatggaacatgtttttttgcagacttccctgcttcctgaaagtagcaatgaataacagagaaaatctttaatgccatctttgagcttttgcttgataaaaggaactactgtatagcttcgacggtttttaaaaaaacactctttgcagaaatattttatcctttccagagcatcttctcatctctgtgcataagtgcggtcccagtggcatgcttaatccttcttcacagccctacatatcttcaagtgtgtgcataaattctgtcaggaaagaaytacaacctcgtcgtgaataactgcaaacaacagctatgtgtgggactctattgcttgatgtaaacatggccctgggtgatcactctgcactttgtcttttagggttataaggatgggagtgagctcttcagctt

SEQ ID NO: 725443 - DNA, 1838 bp, Homo sapiens
  misc_feature 811, 812, 813, 814, 815, 816, 817, 818, 819, 820, 821, 822,823, 824, 825, 826, 827, 828, 829, 830, 831, 832, 833, 834,835, 836, 837, 838, 839, 840, 841, 842, 843, 844, 845, 846,847, 848, 849, 850, 851, 852, 853, 854, 855, 856, 857: n = A,T,C or G
  misc_feature 858, 859, 860, 861, 862, 863, 864, 865, 866, 867, 868, 869,870, 871, 872, 873, 874, 875, 876, 877, 878, 879, 880, 881,882, 883, 884, 885, 886, 887, 888, 889, 890, 891, 892, 893,894, 895, 896, 897, 898, 899, 900, 901, 902, 903, 904: n = A,T,C or G
  misc_feature 905, 906, 907, 908, 909, 910: n = A,T,C or G
tctctgtaaactaggtgtgattatcatcattttacagaagaagaaactgagtctcccagagattaagtgacttgttcatgatagcaccattagcaaagatccttcctaggattcaagttgccctaacaaggaattggtgctactcaaaagtcttgaactaattcraggataaaattattaacatatttttctaagtgtgtgaattgatatgtcattgtgtctgagcatctgagaatttctaccattaactcccatctataaagagcttgagagctacagaaagatcagtctcatttacgtacttaccaaggagataaaacctattataagagaggtggaatcatcgaatactcaagcaaacattgcctagtgtaatcaagtgaaatcatttctttgaggacaaacaagacttacctgctatagcagacttctttgaataggcagagtcacaggttgtaaaaaaaaaaaaaaaaaaaaaaaatggagtccagaggatagtaatatttacttagttcaagaaagagagatcattttcattttaattggtgcctagtaaataagaaaaaaaatcaattgaggattgcattccaaattaagcaccttaatttctctttgtgtgtgtgtgtgtgtgtggatagtaatgtatttgtattattatggttagttacatggcaaagagagcaagagagtgatggacagaaggaggctgagttagctccaaagggcatgtgtaatctgtaggtaaaccatacttgtcacactgtgttttgggcatcaaagtaaattatcacctgttaatactacttttgannnnnnnnnnnnnnnnnnnnnnnnnnnnnnnnnnnnnnnnnnnnnnnnnnnnnnnnnnnnnnnnnnnnnnnnnnnnnnnnnnnnnnnnnnnnnnnnnnnntgggcgcaagcaattctcccacttcagtctcccaagtaacctggcatttcaggtacatgccaccatgcctggtatagtagatataataattttggatcttggttggggttcctaactttaaatgtatacctatatacaactttctctctccccatttttagttcaattgctcatattatcaggatttatatatttaaattcttttctaaactatgtttaaatgcttaaaaactgaaaaccaataaggaacatttacaatattatgatcaaataaatattatttactgtagaatccactgtatgattggaccttcagagaatatagtcttacagaatggatctcttacttcttagttatagtcaaaagatatttctctctctcttgaaaaagatgtgtattcctcagaaccaaatttaggccatggcttttgggtacaactttctgtttttcctggtgtttctaatagtgttgctttaggtttgtagacacaatgaagataagcattctttaccataccattaaatcttccagtttaaaaaattatggcttttattaagtgaaatgtattcttggatttattatttttgggtttgcatgcctgtcattctagaattttttcatgactgcttaattagtcttaccgtttcttggatcccctatactccctttttttgaaatcctttatgtaattttctcataagatacatgccaatgttcttacgtttgtgtaaatgtctttattttgccctctcatttaatatttgatttgaaatgaaagttcgggtgagtggaaatgcagaggcttgaactgattttcccgggagcgtgtgcactttcccatcgtctgatgttgttcgtgagcagtctgatacctagctcctttccttttgtaacagttttttttttcttttgaagattttaaaatat

SEQ ID NO: 725444 - DNA, 627 bp, Homo sapiens
ttgcagctggtcaccacgactccgactccgactcctggccgccgcccgcgcggctgtgcgctggccgtcatagcgcgcgggaggacgcgcctggcagcggcaggaagtgacgcgctcactaccccgtcccgcggccgcagccaatctctccccgcgagggcggaggcgccgaaatcaaagcgagagcgcctcggcctctccagctgtccgcggtgcgtaatgcgtcgcggagggctatcaggttggggaatgccgtgtttccttccgaagggcagcgtgccttagagtttcgctgtaactaaagtcgcttacagttgtgctttgaatattcatcacccgtcagcctatccactcccagattcctgcaaaccatgcatttacatgtacaagccgcctgctcttaccaacctyggcaccactgcacattcttttttccgtgaatgacctcgcccaccatggtgcacccatttgccctgtagctcaaatcagcgtggtaccaggataaggataggtcgtttagaaacatcccattataaacaactatgcttaaggtatattcataagtcatgggaggaaataaaggctaattgataaatcatgctgggaagagttagttacaaacagtgg

SEQ ID NO: 725445 - DNA, 816 bp, Homo sapiens
tttctttttttaacttcattttatgttattatcatgattgatgtttcgagacggagtctcggaggcccgccctccctggttgcccagacaaccccgggagacagaccctggctgggcccgattgttcttctccttggtcaggggtttccttgtctttcttcgtgtctttaacccgcgtggactcttccgctcgggtttgacagatggcagctccactttaggccttgttgttgttggggactttcctgattctccccagatgtagtgaaagcaggtagatttgccttgcctggacttgcctggccttgccttttctttctttctttctttattactttctctttttcttcttcttcttcttcttcttcttcttcttcttcttcttcttcttcttcttcttcttttttttttgagacagagtttcactcttgttgcccaggctagagggcaatggygcgatctcggctcaccgcaccctccgcctcccaggttcaagcgattctcctgcctcagcctcctgattagctgggattacaggcatgggccaccgtgcctggctgatgtttgtacttttagtagagacggtgtttttccatgttggtcaggctggtctcccactcccaacctcaggtggtccgcctgccttagcctcccaaagtgctgggatgacaggcgtgagccaccgcgcccagcctctctctctctctctctctctctctctctctctctctctctctctcgctcgcttgcttgcttgctttcgtgctttcttgctttcccgttttcttgctttctttctttctttcgtttctttca

SEQ ID NO: 725446 - DNA, 926 bp, Homo sapiens
gagatagaccacaattgaatgctatcaagtgaatcggaatcatttgtctattaatggggagaaaaatgaaaatgtagttatggtgtttttgaggtgtatcatatgcttaagtccagtacaattgttaaatattaggtcacaggttgacagcaactgcattcttttcctggtgtgatcctatgaaaaatactctagatggtaaaaattacaataaaaattaaaatagaaacataacatttatacrtaggatttttgttttgttttgacctctttttgccaagttcactgcctaatgttttatgagcagtgtttctcaactgcagcactattgcactattgacatttttttatataaaagatggggcttcactgtattgcccaggttggacttaaactcctgggctcaagcgagtttaagcgaacctcccacttcagcctccagagtggtgggactagagatgcatgccaccgtacccagcttagcactattgacatttcgaatttcatatttctttgttgtggagactactcccacaacattgtacatttttgtgcaattgtaggatgtttagcagcacaacctggcctctactctctagattctagtaacacctgctccagtcttgaaagacaaaatgttccagacattgccaagtatccccaagaaggtaaagttgctccaaattgagaaccattgttctatcagtattatgtagggatgtatcatcattaacacactcagtatatttggcaagatgtagtgataacattgtagacgttttaatgtgtcacatccttttgaacattttcagaggcaagctgtagaattttggttcattatcaaatgcatttgatattttgccctatttagaaacagtttctactaccaagggatatactagcctagatttccatggcacattcat

SEQ ID NO: 725447 - DNA, 1835 bp, Homo sapiens
cctatgatcacatctcctgtgggcagttttaatgctataccatataggtataatttgaatttacttttggaagtcacttgctttgatatatttttggttttcaatgtttgtctaattccttctttatcacacaaatgctgaataagagcctctgaatagatgcctgattacttatgttatttgtttatagaaaaatagcatcaaaacaaaaaccaaaatgtttcatccattttatctcaaaccatgtttcctgtgagtcctagatgatgctatgtcctgtgatggtttctgtttttagatattacttcggctggaaagatccacatgagttcaaccaagttttccacactgccccctagattatccttgatcttatactggcaatttctgctggtcaaagctgctgctgtctacgaatattctttctcgtcttcttaaggcctttcctaaaaataaagaaaaacaaaaactttctctgttatgttcactagtcacatacaacactttctaatgccttggattgctaatttttctgaattctactctaagtatcttggtgtgatggttaatattgagtgtcaatttgattggattgaaggatgcaaagcactgttcctgggtgtgtctgtgagggtgttgccaaaggagattaacatttgagtcagtggactgggagaggcaaacacacccctaatctgggtgggcaccatctaatcagctgccagtgtgtctaggataaaagcaggcagaggaacatggaaggattagactggctgagtcttctggcctccatctttttcctgtgctggatgcttcctgccctcgaacatcagactccaagttcttcagcttttggactcttggaccttcaccagtggtttgccaggggctttcaggcctttggctaccgactgaaggctgcaatattggcttccctacttttgaggtcttgggactcgtactgacttcctggctcctcagcttgcagacgccctgttgcgggacttcactgtgtgattgtgtgagtcaatttgcctaataaactccccttcatatattcatctatccagttagttcggtccctttaaagaaccctgagtaatacacttgggagtcaggattgggtcatattttgtcatgcatccctctcaggccctactgctgagagtagatattagatgaaaatgtgatttatttgttaactgattagttaaaacagctaacatttattgtgtacttacaatcttcaaggcacaattctaacccaattaaccctcagaaaactctatgagttatgtacctttatttactccattttcatgatgaggaaactgaggcttagcgaatttaagagatttacccaaggtcagggatctagtattgtctggataccaggctgctctgccagctgctgcagtctctgttgtgctacagctgtgttacagcttctgaaattattctttcttacacatttttttttctgctgctctgtttatacgtgtatttcagttacagcattctactatcttctatgttttgtaactattaattgagcaaaacgtctaatctgagagcagtgttgcattaagtatgacttcctaactaaattgtggcattttgttttggggatgtggcagcaccatttcatctatgactggcaggtgatgaggaaagtggtcagacttcgcatatcmaataaccttggatttgtgtaatgtgtgatgtcatattgcttgaaattctaattttgtaggaaggagttaaaaactgaattcagtggaggaccatgtcatggggacacaaaagttctgtgccacttatattgtgtgccttga

SEQ ID NO: 725448 - DNA, 872 bp, Homo sapiens
cactagaataaatcctttctgcttaatcttggtagagtgaattctgttttctgccagtgactctaactgatgcaactgtgtctgactgatacactctctatgtttaagtgttaagtattaagccagcttttatagatgtgtgccttagcacagggaggaagaaacaaatctttgctttagaataaaatgttttaggcattggttatttattcctgttagcaatcttttcattatgctaataaaaaacactttaaaacaatgtgaatacttcagcattgaggtttattattctactccatatgtatttattgagtgcctacgctgtgtcagcaacaagtcctggggagagagacactgcaaagagcacaacagatggagtctctacacacgtgtaattcacggtcttccccatcaacttacagattgaatcaacttctcatgctcattcatggttaggttgccaaatcagctaaaagtatttcaaaagcttaagagatattgataatacctcagaatagagatagctcattttggcatttaaattgctaatttcaagggtggcctgcttactaatctataaaatggggatttatatttatctcttatgatataaggatggtaaaaaatagctcatcatggagatgattatgaatcacttatatgtggataaatcaatttaaaaatatctatttggctgtaatgaggggaattgtagtcattgttaactctcagtactagtaataatacagagaacctgaggagaaacaataaaatctttcctcaacagtgtgcattcaaatgaagctcaggttgttattatgcaatgtatataccacttaaatcaycccagtgcaggaaagctctataaaaag

SEQ ID NO: 725449 - DNA, 1111 bp, Homo sapiens
gcggccttcctcctgaagcagcagcgcaaggccgaggaggcccgcgtgcgcaagcagcagctggaagcggaggtggagctcaagcgtgacgaagcccggtaagcgtcccgccgggggggaaagcagactgagcaggagcctggtgggtccctggcggccccggtcccgttgctggcactgagcatggaccatggcaatgagtgcctgtgacggtcttactcctcccatggaccacctccccgaactttcacggcccctgctgatcttcagtgaggacgtgcgttgccggtggccagggaggctgtgtggcctcggtgggtcatctgcaggactgcctttgcagcctctgtgtcccgcttgtggaggctggccactcttggtcccagcggccggggagaacccgagaaacgcgcctggacagagcgccgcggcgcaggcgtcgtggaagaagccccgtgaccgagcagtgtctgggcgtgtgtttctctcaggcgcaaagctgaggaagaccgggtgcggaaggaggaggagaaggcgcggcgcgagctcatcaagcaggagtacctgcggaggaagcagcagcagatcctagaggagcaggggctcggcaagcccaagtcaaagccgaagaagccgcggccgaagtcggtgcaccgggaagagtcgtgcagcgactccggcaccaagtgctcctccacccgtaagcagccccggccctcacgcggscagcgcttccttccgcgggcggcggcctcacgttcttcagctcatttcaattttgtcatcaagagtggtgtgaggcgggaagggtggagatgattatccccgtttcatggatgacaatgttgagaccagatgctctgagatgtgcggcacatccaggcgcagcccggctccccgggatggggtggggacgcggcctgtgtggccgagctctgcagggcgaggtgaggggaacaggtacaggggacaggtacttgtctgtcggaatccgttcatgaaccgtcgtctgtttctgtctctggcagctgataacttgagccggactcagtcaggctccagcctgtccttggcctctgcggcgacgacagaacccgagagcgttcattcc

SEQ ID NO: 725450 - DNA, 556 bp, Homo sapiens
acaggggtcactggggaccgtcttggaaactgactctcacagtccgaaacccttcagatatgctttaatctatgagttcacaataatatttaaaacaaacagctgggcacggtggccagcgcctatagtcccagctattcaggaggttgaggaaggaggattctttgagcccaggggtttggggctgtmgtgtgctatgatggtgcctgtaaatagccattgcactcccgcctgggcaatatagctgactccatctctaaaaacaagcaaacaagcaaacaaagttgttcttctaaggatgacagagaaccatatgttatcttaaaaactggggaaatagtgcggtggctcacgcctgtaatcccagcactttgggaggccgaggcgggcggatcacgaggtcaggagaatgagaccatcctagctaacacggtgaaaccccgtctctacttaaaatacaaaaatattagccaggcgtggtggtgggcccctgtaatcccagctacttgggaggctgaggcaggagaatggcgtgaacccgggaggcagagcttgc

SEQ ID NO: 725451 - DNA, 699 bp, Homo sapiens
ataaaagaagctgtgggtaagtttagcttcaggcatagctagatggacacagggaaggacttgttcatatagtgtcatctgggttctctcaccaattcttagtaaggtgtctcaatgtagtaagcaggacagtttttgcaatcgtaggcttactacaagttaagtaaccccagtagactgagaaaatcgcaatacctctagcagaaaattcctctggagaaatatcactgatctagtttggatcatttgcccattgtccatgcaactagtttaaatctctacacagccaaccctctgtatatggaggctccgtatctgtagattcatccatcatggatgaaaaatatttggaagaaaacaattaaaaataagaacacaacaataaaaaatacaaattaaaaaatacagtttaacaactatttacacagtattaggtattataagtcatctagagatgaattaagagtataagaagactgagaatgagtggcctaacaggtagaaagaaaactatgctaggtcaagtgaagaaagcaagtaaagaaagccttttaagaatgaaaaaggggccaggcatggtggctcacgcctgtaatcccagcasgctgggaggttgaggcgggcggatcacctgaggtcaggagttcaagaccagcctggccatggtgaaaccccgtctctactaaaaatacaaaatta

SEQ ID NO: 725452 - DNA, 627 bp, Homo sapiens
ttttattttattactcgtcccctaatcaccagcttatcatcagagcatccggacacattcaaccataatcacactcaattatcttgacattttgccttttttttttttttgagacaaggtctcgctgtgttgcccaggctggtctcaaactcttgagccaagcaatccttctgcctcagcctcttgggtagctgagtttataggtgcacaccattgcactagctccatttttttaccttaggagaaatagagctttaaaccaattttaaaagtttaatgttctgtaatccccgcactttgggaagctgaggtgggcagatcacctgaggttgcgagtctgacaccagcctggtcaaaatggtgaaactctgtctctactaaaaaattacaaaaattagctaggtgtggtggcccatgcctgtaatcctgctacttgggaggcggaggcaggagaattgcttgaattgsgggggtggaggttgcagcgagccaagaacatgccactgcactccagcttgggcatcatcagagcaaggctccgtcccctccaaccccccgccaaaaaaaaaagcttaatgttttagaagggcgcatttgtcaagctaggaagatagagcatgttttctc

SEQ ID NO: 725453 - DNA, 627 bp, Homo sapiens
ttttattttattactcgtcccctaatcaccagcttatcatcagagcatccggacacattcaaccataatcacactcaattatcttgacattttgccttttttttttttttgagacaaggtctcgctgtgttgcccaggctggtctcaaactcttgagccaagcaatccttctgcctcagcctcttgggtagctgagtttataggtgcacaccattgcactagctccatttttttaccttaggagaaatagagctttaaaccaattttaaaagtttaatgttctgtaatccccgcactttgggaagctgaggtgggcagatcacctgaggttgcgagtctgacaccagcctggtcaaaatggtgaaactctgtctctactaaaaaattacaaaaattagctaggtgtggtggcccatgcctgtaatcctgctacttgggaggcggaggcaggagaattgcttgaattgcgggggtggaggttgcagcgagccaagawcatgccactgcactccagcttgggcatcatcagagcaaggctccgtcccctccaaccccccgccaaaaaaaaaagcttaatgttttagaagggcgcatttgtcaagctaggaagatagagcatgttttctc

SEQ ID NO: 725454 - DNA, 1691 bp, Homo sapiens
aaactgaacagaaagtacaaagagtgtccatataccctcaagtttctcctattattaatatcttgcattagtatgatacatgtgctacagttgatgagctaatattaatatcttatagtttactagacctattctttgtgttgtacattctatgggctttgaaaaatgtaatatgtaaaaatatccaccattacagtatcatacagagtagtttcactgccctaaaaatcccctgtgctctgcctattcatcccttcctccttccaggttcctggcaaccattgatctttttactgtctttctagttttgccttttccagaatatcacatagttggagtcatacaccatgtcgtttcttcagatctgcttgctaatgagatttttgaaatagactttgatttgcttggaaactcatttgattttcaacaaggtaataataacagcttttgttgtacttgatttgcctttattcttaaataaccttattttaaaggagactttatatcactagcatatatagaaaaatagtattccctgacataatacaggacagctatgaaatatatcatttaaatagatagatagatttatatttaaattataaaatgatcatgcatgtgctatctaaaaataacctttcttaccacctgttgatgcccacactttaggagacactgacttagatatttcccagcccccaytttcagttccattcctttgatctgcagcatgaaggctgggaaaagagaaaaccaaaggaaaatagacttgctgcctccaagtgtttgaagagctcccaagaagaaggaagaagggagcattcaataaatgcctgccatgtgccaagtaccatgatagatggttaaaatatattatttggcccaaactccacaatggcccaggtgatggggatcctgatcttcgtctaagagaccagaaagccaagattctgagagattctaacatgctctgctacttaagtgatggagcagagtcaaacccaatatctccatccattcatctggactgtgtggcccatcagggtgaaagagatttattctttgtgctttagaaagcaggactaggaccaaatgttgcataagcatatttcacttcagctcagctcagaagtacttttcttgtgttatcatggtctaacagtggaaatagactgccttggggaagtagtgagctttctctgccctgaatgtgcagaaactatggctggagaccacctaaatggggagccacagagggctcccaaatgtgagatgggtatgggatctctaagctcttctgggccaaacattctgtaactccaagcctctgtgcctccttctactaacacctaaacttccaaagaaaaagccattggcttgtttgaacatcagcagggcattaatacatctttgggtcaccttaatctttctgcaaaccatattccttctgcagcctttattagggcaccacatgaaagacagaaggcatcaaaacaactgtttccagatgaatctgatgagttgaattattggaaaaaacacgtcattggaaagctgacacacttctggagaccgggaaaacgtattccataagtctattagtatcaccttggatagagataaaagagcctccttgcaaaagaaatatgttgaaacgtgacttgagcatcagcttgctgtttagcaaaaag

SEQ ID NO: 725455 - DNA, 1691 bp, Homo sapiens
aaactgaacagaaagtacaaagagtgtccatataccctcaagtttctcctattattaatatcttgcattagtatgatacatgtgctacagttgatgagctaatattaatatcttatagtttactagacctattctttgtgttgtacattctatgggctttgaaaaatgtaatatgtaaaaatatccaccattacagtatcatacagagtagtttcactgccctaaaaatcccctgtgctctgcctattcatcccttcctccttccaggttcctggcaaccattgatctttttactgtctttctagttttgccttttccagaatatcacatagttggagtcatacaccatgtcgtttcttcagatctgcttgctaatgagatttttgaaatagactttgatttgcttggaaactcatttgattttcaacaaggtaataataacagcttttgttgtacttgatttgcctttattcttaaataaccttattttaaaggagactttatatcactagcatatatagaaaaatagtattccctgacataatacaggacagctatgaaatatatcatttaaatagatagatagatttatatttaaattataaaatgatcatgcatgtgctatctaaaaataacctttcttaccacctgttgatgcccacactttaggagacactgacttagatatttcccagcccccactttcagytccattcctttgatctgcagcatgaaggctgggaaaagagaaaaccaaaggaaaatagacttgctgcctccaagtgtttgaagagctcccaagaagaaggaagaagggagcattcaataaatgcctgccatgtgccaagtaccatgatagatggttaaaatatattatttggcccaaactccacaatggcccaggtgatggggatcctgatcttcgtctaagagaccagaaagccaagattctgagagattctaacatgctctgctacttaagtgatggagcagagtcaaacccaatatctccatccattcatctggactgtgtggcccatcagggtgaaagagatttattctttgtgctttagaaagcaggactaggaccaaatgttgcataagcatatttcacttcagctcagctcagaagtacttttcttgtgttatcatggtctaacagtggaaatagactgccttggggaagtagtgagctttctctgccctgaatgtgcagaaactatggctggagaccacctaaatggggagccacagagggctcccaaatgtgagatgggtatgggatctctaagctcttctgggccaaacattctgtaactccaagcctctgtgcctccttctactaacacctaaacttccaaagaaaaagccattggcttgtttgaacatcagcagggcattaatacatctttgggtcaccttaatctttctgcaaaccatattccttctgcagcctttattagggcaccacatgaaagacagaaggcatcaaaacaactgtttccagatgaatctgatgagttgaattattggaaaaaacacgtcattggaaagctgacacacttctggagaccgggaaaacgtattccataagtctattagtatcaccttggatagagataaaagagcctccttgcaaaagaaatatgttgaaacgtgacttgagcatcagcttgctgtttagcaaaaag

SEQ ID NO: 725456 - DNA, 1484 bp, Homo sapiens
tgctctatagaaaataatttctaaacaataaagaatattataataaacattaactttccttctgtgtttttctcaattcctgttctccctcccttttcctctttgttccttccttttgaccactgcctaactactggcatgattttggtgagcaagtctgcttaacctaaattccacaaagcaatgagtaaattatttcccgtgtttaattttaaagtactgcggtttagagtaaaaatagacacaaaatgctacaggatgcatgattcttttcatacaacattctggaataggcaaaactataggggcaaaaatcgaatcagtgatcaataggggctgagggtgaagagggtggcttgacaacagaagtaccaagagaacactgtggtgacggaaatgttctgtatcttcaytttggaggtaattatatgcatgtatacatttgtcaaaacacgttgaactgtacatttgaaaagagtgaattttgccatatataaattacaccacaataaccttacttcaaaaaagaatactttgccttgggacctttgagcctttcattaggaaaaatctatgatcagtataggaaattggcagtgctcctggaaatactcatgtacataactaactataataaaagacagagattgataatttccctaagagaggtacaaagttctctgggaattcagaggcaagagaaacaacatccgtccagagaaaccaagaaatatttcatggaggaggacgcatttaaaatgggcctaaaagattacaattaatcactggttggtttttgttgttgttgctgttgttgttgttgtttgtttgcttctctactgtcaccaatatcttacattctagcacctgtttataaattgcttgcaaaatttgttacaggtttgattatttttctaattctaaaaggtcttatattatgatggatgcatttgctggagactaaatgattcacactatcttgcaccttaaagaatcaccgttttgatgccatgttttctgagtttgtggtgattctggaattgattaatttttacatgtacacttacaaaacattctaccattctatgaaatgaagaaatgtgcaatgaagaaatgaggatacatcacatctaagtgtaagaggctgggaatagggttccaaaaatctgggttctataatgcataaatgactccatacatcaagaacaaaaagattcacaccccaaaagaagagaagggaaaactataccaacagacaggtcaggagagaaaatacactggctctcaaactatgaaaagatgttctatttcaatataactagtgaaaaagttacttctctttctattaattagtaagcaaaaagaccaatagctcagttttttaagaaaatgagcaaaggaacgaaatagctcacagaatagaaaatacaaatagcttgaaacacaagaaaagatgcttaaacatactcataataagagaaagg

SEQ ID NO: 725457 - DNA, 1036 bp, Homo sapiens
tcaagatttgagaggactataaccagctctttctctgtattccattttgttctcaacaagctcctgtagatcctggaggaaagatcaaatgacccccatacacaacaaataactctaaaattagagtgatttccattatatcacttasacagttagctgttgaggcatgataaaccactgtaaagcttagttccttaaaacagaaatcattctgttagctcagggttctatggcctagtaatttgggctggactcagtggttctgctgtctttgactgggtttactcatgtatctgaggtcagtgctagtcagataggcagctctgactccaacatttgactggttgttagttgggttgacagtggcacctggtctccatgcctttaattctctggcaggttgacctgggtttatttatatgttgatagcaggttacaagagcaaaaagattggaagttttaagacttcttaaagcctaggcttctaattggtacactctctcttcctccacattctattggccaaagtcagtcacaagagcatcccagattcaaaaggtggagaaatcaactacttattaattaaagttgatccaaagtattgtggctacttttgcaatctatcacaatcaaatcgcctgagtatagtatgagagatgttagtaacatagtaatatctggaggcattagctcctaccattcctctagcaatgtcagatcaaacagttcacagccaatccaccccatctcctttgtagaagtcctttcatacaacgttggagtaaatgcctactctcatctgctttttgcttcactggcttatgttctacactcttttagccagtggctcatgtcctcatcatccatatcagagatattaaacctttcatgttctcttatctcacataatatcatctgtcatctgttctattccttcaggactcaattagaaaggcactgcttagctaataatcaattcattcaattatattactaactaatgatgattttatatctcagaacaaattggcaattt

SEQ ID NO: 725458 - DNA, 712 bp, Homo sapiens
acttaagcatacttttaaatcaggtttttaattcaggctctgggttgtttgtyggtagcacaactgtgcaagcttgtaatgtgtctaaaaacacgtttccattcagctcatatgccagtgttctttaccagatgtatgtcttataaacgctgctaccggtaacctgttgggctctgtgtgtgtgtatttatgtgtctttttcttttcctcagagcattttattcaactgagagcattaattgggtgtcacaattttaattggatctctgctctgagactcttctctttaacccgttcagatgttttaacagtgaatatgatgctcatactcttgatttgatttgatactcttcctttgttgctcaaagcctttggtggtttttaaacttatggcttggggttgagaaatcttttcttccaactgtgcaagcctccccattttggggccctcttccttttattcctgcttacaaactctggtcaattttaaaatttgtttctttcttgcaataccaaacacagtcaaaacaaccaacataccattttaatgttagggtttttaaaattggcacgtagtgatcatacatacatttatgttctgcatagtgacgtttcagtcaacagatcacagacatgactctggtgtcccccaaagttataataccatattcttactgtaccttttccatgtttagatatgcttagatccaca

SEQ ID NO: 725459 - DNA, 712 bp, Homo sapiens
acttaagcatacttttaaatcaggtttttaattcaggctctgggttgtttgttggtagcacaactgtgcaagcttgtaatgtgtctaaaaacacgtttccattcagctcatatgccagtgttctttaccagatgtatgtcttataaacgctgctaccggtaacctgttgggctctgtgtgtgtgtatttatgtgtctttttcttttcctcagagcattttattcaactgagagcattaattgggtgtcacaattttaattggatctctgctctgagactcttctctttaacccgttcagatgttttaacagtgaatatgatgcycatactcttgatttgatttgatactcttcctttgttgctcaaagcctttggtggtttttaaacttatggcttggggttgagaaatcttttcttccaactgtgcaagcctccccattttggggccctcttccttttattcctgcttacaaactctggtcaattttaaaatttgtttctttcttgcaataccaaacacagtcaaaacaaccaacataccattttaatgttagggtttttaaaattggcacgtagtgatcatacatacatttatgttctgcatagtgacgtttcagtcaacagatcacagacatgactctggtgtcccccaaagttataataccatattcttactgtaccttttccatgtttagatatgcttagatccaca

SEQ ID NO: 725460 - DNA, 712 bp, Homo sapiens
acttaagcatacttttaaatcaggtttttaattcaggctctgggttgtttgttggtagcacaactgtgcaagcttgtaatgtgtctaaaaacacgtttccattcagctcatatgccagtgttctttaccagatgtatgtcttataaacgctgctaccggtaacctgttgggctctgtgtgtgtgtatttatgtgtctttttcttttcctcagagcattttattcaactgagagcattaattgggtgtcacaattttaattggatctctgctctgagactcttctctttaacccgttcagatgttttaacagtgaatatgatgctcatactcttgatttgatttgatactcttcctttgttgctcaaagcctttggtggtttttaaacttatggcttggggttgagaaatcttttcttccaactgtgcaagcctccccattttggggccctcttccttttattcctgcttacaaactctggtcaattttaaaatttgtttctttcttgcaataccaaacacagtcaaaacaaccaacataccattttaatgttagggtttttaaaattggcacgtagtgatcatacatacatttatgttctgcatagtgacgtttcagtcaacagatcacagacatgactctggtgtcccccaragttataataccatattcttactgtaccttttccatgtttagatatgcttagatccaca

SEQ ID NO: 725461 - DNA, 662 bp, Homo sapiens
taattgctcctcattggagaaaaagagaacaggaggacctcrgtaactttcacctctgaggaccctaagaactctcggcactttctcagatacccacagttttggtcactaagaacccccacaatctgccaaaaccgtcctcagctgagggagctacatggaaactataccattgcacacttccttgagatgaaatcactgcaccaacccagctggcaccctcacatacacctgtaggtaaagctcttttcccaccaaaactagtttataaagtctggaagaggtgactgcttcctcaaatatgtagacatcaatacaaggctataagaaattcaataaatcaaggaaatatgacaccactaaaggaacacaataattttgtagtatctgaacccagtgaaatggagttctatgaattgtctgatgattaattaaaaataataatcttaaagaagcccagtcacaaaacaagccttaacaaatttaagaaaacagaaatcattccaagtgtcttttcagaccacagtggaataaactagaaatgaataacagccaaaaagctggaaaattcacaaatatgtgggaatgaaacaacacactcttgagcaaccattgggtcaaagaagaaatcaaaagggaatttaaaaagtatcttgagacaa

SEQ ID NO: 725462 - DNA, 662 bp, Homo sapiens
taattgctcctcattggagaaaaagagaacaggaggacctcggtaactttcacctctgaggaccctaagaactctcggcactttctcagatacccacagttttggtcactaagaacccccacaatctgccaaaaccgkcctcagctgagggagctacatggaaactataccattgcacacttccttgagatgaaatcactgcaccaacccagctggcaccctcacatacacctgtaggtaaagctcttttcccaccaaaactagtttataaagtctggaagaggtgactgcttcctcaaatatgtagacatcaatacaaggctataagaaattcaataaatcaaggaaatatgacaccactaaaggaacacaataattttgtagtatctgaacccagtgaaatggagttctatgaattgtctgatgattaattaaaaataataatcttaaagaagcccagtcacaaaacaagccttaacaaatttaagaaaacagaaatcattccaagtgtcttttcagaccacagtggaataaactagaaatgaataacagccaaaaagctggaaaattcacaaatatgtgggaatgaaacaacacactcttgagcaaccattgggtcaaagaagaaatcaaaagggaatttaaaaagtatcttgagacaa

SEQ ID NO: 725463 - DNA, 602 bp, Homo sapiens
ggcatgcagccacctgcacaaacctcacgtccacagtgccaggcgtcaaaaggacaacgtatccacagttcccttatgcagtcctaatattgaaaatcagagccacaacctcccctccccacccaactcctgcagtctgagatgatacacccccctccaccggaacacaggaccctctagagtgcaaagtgccccatgtcaccaagcaaagagggaaaggaggcactggctgggcccagtgggcaggttaggcaaactccaaatgtctggctcttgtactgcactgtaagaacttgggccctagggtataaggggcccattccggttcagtccagcctcccccgggacccgagaagctcagaaagtgcttgctggtgagcaatgagcctaggatgagggtctgtatgtcagagttgataagtcggggaggagtcctcaggaaaagaaacatgtttcccataaaatgtgaccagagccaggagaaagaactctcaatggcagggttccccgaccagtaccagttggtggcctgttaggaaccaggccacacagcaggagcccagatgagcaagtgaagcttcattygtattgacagcccctcc

SEQ ID NO: 725464 - DNA, 1879 bp, Homo sapiens
  misc_feature 1192, 1193, 1194, 1195, 1196, 1197, 1198, 1199, 1200, 1201,1202, 1203, 1204, 1205, 1206, 1207, 1208, 1209, 1210, 1211,1212, 1213, 1214, 1215, 1216, 1217, 1218, 1219, 1220, 1221,1222, 1223, 1224, 1225, 1226, 1227, 1228, 1229, 1230: n = A,T,C or G
  misc_feature 1231, 1232, 1233, 1234, 1235, 1236, 1237, 1238, 1239, 1240,1241, 1242, 1243, 1244, 1245, 1246, 1247, 1248, 1249, 1250,1251, 1252, 1253, 1254, 1255, 1256, 1257, 1258, 1259, 1260,1261, 1262, 1263, 1264, 1265, 1266, 1267, 1268, 1269: n = A,T,C or G
  misc_feature 1270, 1271, 1272, 1273, 1274, 1275, 1276, 1277, 1278, 1279,1280, 1281, 1282, 1283, 1284, 1285, 1286, 1287, 1288, 1289,1290, 1291: n = A,T,C or G
acttgacgatgggttggctgaaaatgggagagaaggggatggaagaaatcaaggatgccatctatgttttttgctagatatgactgatggaaatgtgtaatcttgttttaattcagaaggtaggaaaattcctactctcactgctgcagaaatacctaaggaagataaaaacacttttgttgctcccttaaaacctgttttccattgagccaaaggaaaagttgggttaaattcatgttaaataatgcagaagacagttggaaattcctaacatctattctggacactgcagctggaacatatagcagcctctccatgccttgtcatctcccaagcctcttttccatcaaagtccaggtgtacaaaactaaactattatgttctggtttttactgcttgcaggaatagactattagaatactaatacttctaaagaatatattaacttcttgagtcagtaaataatgctccacagctggatcaaataagcatttcaaatcagagctattttttaaaaaagaatatcttattttttcaatgaaaaattttttttagagatgaggtctcgcttgtagcccaggctggagtgcagtggtgcaatcacagctcatggcagcctcgacttcctgggctgcagcaatcctcctgcctcagcctcccgaatagttgggactacagctgtggctcaccacgcttggtattttactttatttttgtagagatggtggtcggggtgggggtctcactgtgtttcccaggatgatctagaactcctggcatcaagccatcctccctccttggtctccccgagtgctcgaattataagcatgagccactgcatctagcccatatccatctatctatgtatctatctatctatcatctatctatctatatctatatattctataatatattctataatcctagcactttgatatttaaaaatatcaagtaaaaaagctacatgactgtatatattttgtatctattcttacattgctagggctttacttttgttgaagagaataaactaggaatgtcaaatacattgcctgctataaccacagttgcttctaaagaagatgcatcaccccccgtacctcctgaaagggaacacatattgcatggcctcgtcatcccctgtcccagccccaggtggaaggacaatacattcataggttggcatgannnnnnnnnnnnnnnnnnnnnnnnnnnnnnnnnnnnnnnnnnnnnnnnnnnnnnnnnnnnnnnnnnnnnnnnnnnnnnnnnnnnnnnnnnnnnnnnnnnncccctcacttcagggccaggtgagcaaggggaaaggagtgcggcctgggcrtcccgcagggcccccactaggaaagctatgaacgctcccgccttgagcacagccacaggcctgctctggtcacaatgtggggtcgccccgcagacactggtgaccagtgggagcatgaccaggaggtgattaccttctgatcacccttggctttatttttaggtaacaccaagaaggacgccatgagagcgaaggccattgggtaaccaccctttgctctcgcgctgcgcgtctccctgccatcaaccgccactgggagcggttgagggcggccggcctcgcgctggaaccttgcccgcctcaaggctcctgcggcggcgcacggggcaggccaggagcccgccctaggagggccccgctggagatgtggaaatggagggacgcggcacctgggcgcttcctggggccagacaacgccccctcattggaacctccatgaccgtgcctctgagaaaccagcgcgtctgcgacgatcactcctaattttcggtaatacaaacctgcagtccatgcacttaggtaacacccttgctgaaa

SEQ ID NO: 725465 - DNA, 1879 bp, Homo sapiens
  misc_feature 1192, 1193, 1194, 1195, 1196, 1197, 1198, 1199, 1200, 1201,1202, 1203, 1204, 1205, 1206, 1207, 1208, 1209, 1210, 1211,1212, 1213, 1214, 1215, 1216, 1217, 1218, 1219, 1220, 1221,1222, 1223, 1224, 1225, 1226, 1227, 1228, 1229, 1230: n = A,T,C or G
  misc_feature 1231, 1232, 1233, 1234, 1235, 1236, 1237, 1238, 1239, 1240,1241, 1242, 1243, 1244, 1245, 1246, 1247, 1248, 1249, 1250,1251, 1252, 1253, 1254, 1255, 1256, 1257, 1258, 1259, 1260,1261, 1262, 1263, 1264, 1265, 1266, 1267, 1268, 1269: n = A,T,C or G
  misc_feature 1270, 1271, 1272, 1273, 1274, 1275, 1276, 1277, 1278, 1279,1280, 1281, 1282, 1283, 1284, 1285, 1286, 1287, 1288, 1289,1290, 1291: n = A,T,C or G
acttgacgatgggttggctgaaaatgggagagaaggggatggaagaaatcaaggatgccatctatgttttttgctagatatgactgatggaaatgtgtaatcttgttttaattcagaaggtaggaaaattcctactctcactgctgcagaaatacctaaggaagataaaaacacttttgttgctcccttaaaacctgttttccattgagccaaaggaaaagttgggttaaattcatgttaaataatgcagaagacagttggaaattcctaacatctattctggacactgcagctggaacatatagcagcctctccatgccttgtcatctcccaagcctcttttccatcaaagtccaggtgtacaaaactaaactattatgttctggtttttactgcttgcaggaatagactattagaatactaatacttctaaagaatatattaacttcttgagtcagtaaataatgctccacagctggatcaaataagcatttcaaatcagagctattttttaaaaaagaatatcttattttttcaatgaaaaattttttttagagatgaggtctcgcttgtagcccaggctggagtgcagtggtgcaatcacagctcatggcagcctcgacttcctgggctgcagcaatcctcctgcctcagcctcccgaatagttgggactacagctgtggctcaccacgcttggtattttactttatttttgtagagatggtggtcggggtgggggtctcactgtgtttcccaggatgatctagaactcctggcatcaagccatcctccctccttggtctccccgagtgctcgaattataagcatgagccactgcatctagcccatatccatctatctatgtatctatctatctatcatctatctatctatatctatatattctataatatattctataatcctagcactttgatatttaaaaatatcaagtaaaaaagctacatgactgtatatattttgtatctattcttacattgctagggctttacttttgttgaagagaataaactaggaatgtcaaatacattgcctgctataaccacagttgcttctaaagaagatgcatcaccccccgtacctcctgaaagggaacacatattgcatggcctcgtcatcccctgtcccagccccaggtggaaggacaatacattcataggttggcatgannnnnnnnnnnnnnnnnnnnnnnnnnnnnnnnnnnnnnnnnnnnnnnnnnnnnnnnnnnnnnnnnnnnnnnnnnnnnnnnnnnnnnnnnnnnnnnnnnnncccctcacttcagggccaggtgagcaaggggaaaggagtgcggcctgggcgtcccgcagggcccccactaggaaagctatgaacgctcccgccttgagcacagccacaggcctgctctggtcacaatgtggggtcgcyccgcagacactggtgaccagtgggagcatgaccaggaggtgattaccttctgatcacccttggctttatttttaggtaacaccaagaaggacgccatgagagcgaaggccattgggtaaccaccctttgctctcgcgctgcgcgtctccctgccatcaaccgccactgggagcggttgagggcggccggcctcgcgctggaaccttgcccgcctcaaggctcctgcggcggcgcacggggcaggccaggagcccgccctaggagggccccgctggagatgtggaaatggagggacgcggcacctgggcgcttcctggggccagacaacgccccctcattggaacctccatgaccgtgcctctgagaaaccagcgcgtctgcgacgatcactcctaattttcggtaatacaaacctgcagtccatgcacttaggtaacacccttgctgaaa

SEQ ID NO: 725466 - DNA, 1879 bp, Homo sapiens
  misc_feature 1192, 1193, 1194, 1195, 1196, 1197, 1198, 1199, 1200, 1201,1202, 1203, 1204, 1205, 1206, 1207, 1208, 1209, 1210, 1211,1212, 1213, 1214, 1215, 1216, 1217, 1218, 1219, 1220, 1221,1222, 1223, 1224, 1225, 1226, 1227, 1228, 1229, 1230: n = A,T,C or G
  misc_feature 1231, 1232, 1233, 1234, 1235, 1236, 1237, 1238, 1239, 1240,1241, 1242, 1243, 1244, 1245, 1246, 1247, 1248, 1249, 1250,1251, 1252, 1253, 1254, 1255, 1256, 1257, 1258, 1259, 1260,1261, 1262, 1263, 1264, 1265, 1266, 1267, 1268, 1269: n = A,T,C or G
  misc_feature 1270, 1271, 1272, 1273, 1274, 1275, 1276, 1277, 1278, 1279,1280, 1281, 1282, 1283, 1284, 1285, 1286, 1287, 1288, 1289,1290, 1291: n = A,T,C or G
acttgacgatgggttggctgaaaatgggagagaaggggatggaagaaatcaaggatgccatctatgttttttgctagatatgactgatggaaatgtgtaatcttgttttaattcagaaggtaggaaaattcctactctcactgctgcagaaatacctaaggaagataaaaacacttttgttgctcccttaaaacctgttttccattgagccaaaggaaaagttgggttaaattcatgttaaataatgcagaagacagttggaaattcctaacatctattctggacactgcagctggaacatatagcagcctctccatgccttgtcatctcccaagcctcttttccatcaaagtccaggtgtacaaaactaaactattatgttctggtttttactgcttgcaggaatagactattagaatactaatacttctaaagaatatattaacttcttgagtcagtaaataatgctccacagctggatcaaataagcatttcaaatcagagctattttttaaaaaagaatatcttattttttcaatgaaaaattttttttagagatgaggtctcgcttgtagcccaggctggagtgcagtggtgcaatcacagctcatggcagcctcgacttcctgggctgcagcaatcctcctgcctcagcctcccgaatagttgggactacagctgtggctcaccacgcttggtattttactttatttttgtagagatggtggtcggggtgggggtctcactgtgtttcccaggatgatctagaactcctggcatcaagccatcctccctccttggtctccccgagtgctcgaattataagcatgagccactgcatctagcccatatccatctatctatgtatctatctatctatcatctatctatctatatctatatattctataatatattctataatcctagcactttgatatttaaaaatatcaagtaaaaaagctacatgactgtatatattttgtatctattcttacattgctagggctttacttttgttgaagagaataaactaggaatgtcaaatacattgcctgctataaccacagttgcttctaaagaagatgcatcaccccccgtacctcctgaaagggaacacatattgcatggcctcgtcatcccctgtcccagccccaggtggaaggacaatacattcataggttggcatgannnnnnnnnnnnnnnnnnnnnnnnnnnnnnnnnnnnnnnnnnnnnnnnnnnnnnnnnnnnnnnnnnnnnnnnnnnnnnnnnnnnnnnnnnnnnnnnnnnncccctcacttcagggccaggtgagcaaggggaaaggagtgcggcctgggcgtcccgcagggcccccactaggaaagctatgaacgctcccgccttgagcacagccacaggcctgctctggtcacaatgtggggtcgccccgcagacactggtgaccagtgggagcatgaccaggaggtgattaccttctgatcacccttggctttatttttaggtaacaccaagaaggacgccatgagagcgaaggccattgggtaaccaccctttgctctcgcgctgcgcgtctccctgccatcaaccgccactgggagcggttgagggcggccggmctcgcgctggaaccttgcccgcctcaaggctcctgcggcggcgcacggggcaggccaggagcccgccctaggagggccccgctggagatgtggaaatggagggacgcggcacctgggcgcttcctggggccagacaacgccccctcattggaacctccatgaccgtgcctctgagaaaccagcgcgtctgcgacgatcactcctaattttcggtaatacaaacctgcagtccatgcacttaggtaacacccttgctgaaa

SEQ ID NO: 725467 - DNA, 1879 bp, Homo sapiens
  misc_feature 1192, 1193, 1194, 1195, 1196, 1197, 1198, 1199, 1200, 1201,1202, 1203, 1204, 1205, 1206, 1207, 1208, 1209, 1210, 1211,1212, 1213, 1214, 1215, 1216, 1217, 1218, 1219, 1220, 1221,1222, 1223, 1224, 1225, 1226, 1227, 1228, 1229, 1230: n = A,T,C or G
  misc_feature 1231, 1232, 1233, 1234, 1235, 1236, 1237, 1238, 1239, 1240,1241, 1242, 1243, 1244, 1245, 1246, 1247, 1248, 1249, 1250,1251, 1252, 1253, 1254, 1255, 1256, 1257, 1258, 1259, 1260,1261, 1262, 1263, 1264, 1265, 1266, 1267, 1268, 1269: n = A,T,C or G
  misc_feature 1270, 1271, 1272, 1273, 1274, 1275, 1276, 1277, 1278, 1279,1280, 1281, 1282, 1283, 1284, 1285, 1286, 1287, 1288, 1289,1290, 1291: n = A,T,C or G
acttgacgatgggttggctgaaaatgggagagaaggggatggaagaaatcaaggatgccatctatgttttttgctagatatgactgatggaaatgtgtaatcttgttttaattcagaaggtaggaaaattcctactctcactgctgcagaaatacctaaggaagataaaaacacttttgttgctcccttaaaacctgttttccattgagccaaaggaaaagttgggttaaattcatgttaaataatgcagaagacagttggaaattcctaacatctattctggacactgcagctggaacatatagcagcctctccatgccttgtcatctcccaagcctcttttccatcaaagtccaggtgtacaaaactaaactattatgttctggtttttactgcttgcaggaatagactattagaatactaatacttctaaagaatatattaacttcttgagtcagtaaataatgctccacagctggatcaaataagcatttcaaatcagagctattttttaaaaaagaatatcttattttttcaatgaaaaattttttttagagatgaggtctcgcttgtagcccaggctggagtgcagtggtgcaatcacagctcatggcagcctcgacttcctgggctgcagcaatcctcctgcctcagcctcccgaatagttgggactacagctgtggctcaccacgcttggtattttactttatttttgtagagatggtggtcggggtgggggtctcactgtgtttcccaggatgatctagaactcctggcatcaagccatcctccctccttggtctccccgagtgctcgaattataagcatgagccactgcatctagcccatatccatctatctatgtatctatctatctatcatctatctatctatatctatatattctataatatattctataatcctagcactttgatatttaaaaatatcaagtaaaaaagctacatgactgtatatattttgtatctattcttacattgctagggctttacttttgttgaagagaataaactaggaatgtcaaatacattgcctgctataaccacagttgcttctaaagaagatgcatcaccccccgtacctcctgaaagggaacacatattgcatggcctcgtcatcccctgtcccagccccaggtggaaggacaatacattcataggttggcatgannnnnnnnnnnnnnnnnnnnnnnnnnnnnnnnnnnnnnnnnnnnnnnnnnnnnnnnnnnnnnnnnnnnnnnnnnnnnnnnnnnnnnnnnnnnnnnnnnnncccctcacttcagggccaggtgagcaaggggaaaggagtgcggcctgggcgtcccgcagggcccccactaggaaagctatgaacgctcccgccttgagcacagccacaggcctgctctggtcacaatgtggggtcgccccgcagacactggtgaccagtgggagcatgaccaggaggtgattaccttctgatcacccttggctttatttttaggtaacaccaagaaggacgccatgagagcgaaggccattgggtaaccaccctttgctctcgcgctgcgcgtctccctgccatcaaccgccactgggagcggttgagggcggccggcctcgcgctggaacctygcccgcctcaaggctcctgcggcggcgcacggggcaggccaggagcccgccctaggagggccccgctggagatgtggaaatggagggacgcggcacctgggcgcttcctggggccagacaacgccccctcattggaacctccatgaccgtgcctctgagaaaccagcgcgtctgcgacgatcactcctaattttcggtaatacaaacctgcagtccatgcacttaggtaacacccttgctgaaa

SEQ ID NO: 725468 - DNA, 1879 bp, Homo sapiens
  misc_feature 1192, 1193, 1194, 1195, 1196, 1197, 1198, 1199, 1200, 1201,1202, 1203, 1204, 1205, 1206, 1207, 1208, 1209, 1210, 1211,1212, 1213, 1214, 1215, 1216, 1217, 1218, 1219, 1220, 1221,1222, 1223, 1224, 1225, 1226, 1227, 1228, 1229, 1230: n = A,T,C or G
  misc_feature 1231, 1232, 1233, 1234, 1235, 1236, 1237, 1238, 1239, 1240,1241, 1242, 1243, 1244, 1245, 1246, 1247, 1248, 1249, 1250,1251, 1252, 1253, 1254, 1255, 1256, 1257, 1258, 1259, 1260,1261, 1262, 1263, 1264, 1265, 1266, 1267, 1268, 1269: n = A,T,C or G
  misc_feature 1270, 1271, 1272, 1273, 1274, 1275, 1276, 1277, 1278, 1279,1280, 1281, 1282, 1283, 1284, 1285, 1286, 1287, 1288, 1289,1290, 1291: n = A,T,C or G
acttgacgatgggttggctgaaaatgggagagaaggggatggaagaaatcaaggatgccatctatgttttttgctagatatgactgatggaaatgtgtaatcttgttttaattcagaaggtaggaaaattcctactctcactgctgcagaaatacctaaggaagataaaaacacttttgttgctcccttaaaacctgttttccattgagccaaaggaaaagttgggttaaattcatgttaaataatgcagaagacagttggaaattcctaacatctattctggacactgcagctggaacatatagcagcctctccatgccttgtcatctcccaagcctcttttccatcaaagtccaggtgtacaaaactaaactattatgttctggtttttactgcttgcaggaatagactattagaatactaatacttctaaagaatatattaacttcttgagtcagtaaataatgctccacagctggatcaaataagcatttcaaatcagagctattttttaaaaaagaatatcttattttttcaatgaaaaattttttttagagatgaggtctcgcttgtagcccaggctggagtgcagtggtgcaatcacagctcatggcagcctcgacttcctgggctgcagcaatcctcctgcctcagcctcccgaatagttgggactacagctgtggctcaccacgcttggtattttactttatttttgtagagatggtggtcggggtgggggtctcactgtgtttcccaggatgatctagaactcctggcatcaagccatcctccctccttggtctccccgagtgctcgaattataagcatgagccactgcatctagcccatatccatctatctatgtatctatctatctatcatctatctatctatatctatatattctataatatattctataatcctagcactttgatatttaaaaatatcaagtaaaaaagctacatgactgtatatattttgtatctattcttacattgctagggctttacttttgttgaagagaataaactaggaatgtcaaatacattgcctgctataaccacagttgcttctaaagaagatgcatcaccccccgtacctcctgaaagggaacacatattgcatggcctcgtcatcccctgtcccagccccaggtggaaggacaatacattcataggttggcatgannnnnnnnnnnnnnnnnnnnnnnnnnnnnnnnnnnnnnnnnnnnnnnnnnnnnnnnnnnnnnnnnnnnnnnnnnnnnnnnnnnnnnnnnnnnnnnnnnnncccctcacttcagggccaggtgagcaaggggaaaggagtgcggcctgggcgtcccgcagggcccccactaggaaagctatgaacgctcccgccttgagcacagccacaggcctgctctggtcacaatgtggggtcgccccgcagacactggtgaccagtgggagcatgaccaggaggtgattaccttctgatcacccttggctttatttttaggtaacaccaagaaggacgccatgagagcgaaggccattgggtaaccaccctttgctctcgcgctgcgcgtctccctgccatcaaccgccactgggagcggttgagggcggccggcctcgcgctggaaccttgcccgcctcaaggctcctgcggcggcgcacsgggcaggccaggagcccgccctaggagggccccgctggagatgtggaaatggagggacgcggcacctgggcgcttcctggggccagacaacgccccctcattggaacctccatgaccgtgcctctgagaaaccagcgcgtctgcgacgatcactcctaattttcggtaatacaaacctgcagtccatgcacttaggtaacacccttgctgaaa

SEQ ID NO: 725469 - DNA, 1417 bp, Homo sapiens
cgtcaattgacaaaggacaactttggttgataaaggaaaacaggtataacctaaatgcaaagcatggattagctcaggctccttccatgagttagaccttattctacatctaacacccttcaagaatgggttaataagtaatgtgttctcttgtgttctttcattcacgttttggttgctattattagaagaaacaggctcagtgaaacaccatatgtatagaatggtgatcaattgtgcttatatttattattaaattgtgaaggctgggttatttttcttgacgttattaggtatacttagcatttttaataagaacaactaaataaaaagccatttgcttgaatttaaacattaacataggtcaggtgcggtggctcacgcctgtaatgccagcactttcggaggccaaggtgggtagatcacctgaggtcaggagttcaagaccagcctggccaacatggtgaaaccccatctctattwaaaaaaaaaaaaaaaaaaaaaaaaccaggcatggtggcgggcatctgtaatcctagctagtcaggaggctgaggcagaagaattgcttgaacccaggaggcagaggttgcagtgagcaaagatcatgccactgcactccagcctgggtgacaagagcaaaactccatctcaaaaacaaaaacaaaacaaaaacaaaaaaacattaacatacatactgccagctacaatgtttgggttgtttgtacatattatacttcacaaatacgagaatacttattttgaacaaaaacagctttctttcctgtttgtcactattttcatgagaagacccatactttttaaaattaaatggaactgttgttaaacctctttgaattaaaaatttatcccttgttaccagctcaccactaatcattagtaacaagttggttggtggatcataacacgtttctcattagctttttattcttcgcttttttccttaacctgtggagtaggcaattatctcttcctgcccagcacggcatggcccccactagcagaatttcatgccttcagtgtgcttcttgcacaatccttcttctactttgtcatcagttggtcctactgatgacagtcctactgccttcactatatcatttacttgctcaaaagccttctattggtctgcagtgcctgtgggataatgtccttggctttcaaagttctttaccatctaatctttatttcccatgattcccatataaccctcctttatttaagagagtggattctatgaaatatgtcttctgagtcccaaatttgtattcaggccatttttaacttcccaacttctctttaaaatacaaaatttctgaggtcctctgtgaccagatcagatcaaattgatccttcttgactatgaacatgcagaacaattttttttaaaccagaa

SEQ ID NO: 725470 - DNA, 1417 bp, Homo sapiens
cgtcaattgacaaaggacaactttggttgataaaggaaaacaggtataacctaaatgcaaagcatggattagctcaggctccttccatgagttagaccttattctacatctaacacccttcaagaatgggttaataagtaatgtgttctcttgtgttctttcattcacgttttggttgctattattagaagaaacaggctcagtgaaacaccatatgtatagaatggtgatcaattgtgcttatatttattattaaattgtgaaggctgggttatttttcttgacgttattaggtatacttagcatttttaataagaacaactaaataaaaagccatttgcttgaatttaaacattaacataggtcaggtgcggtggctcacgcctgtaatgccagcactttcggaggccaaggtgggtagatcacctgaggtcaggagttcaagaccagcctggccaacatggtgaaaccccatctctattaaaaaaaaaaaaaaaaaaaaaaaarccaggcatggtggcgggcatctgtaatcctagctagtcaggaggctgaggcagaagaattgcttgaacccaggaggcagaggttgcagtgagcaaagatcatgccactgcactccagcctgggtgacaagagcaaaactccatctcaaaaacaaaaacaaaacaaaaacaaaaaaacattaacatacatactgccagctacaatgtttgggttgtttgtacatattatacttcacaaatacgagaatacttattttgaacaaaaacagctttctttcctgtttgtcactattttcatgagaagacccatactttttaaaattaaatggaactgttgttaaacctctttgaattaaaaatttatcccttgttaccagctcaccactaatcattagtaacaagttggttggtggatcataacacgtttctcattagctttttattcttcgcttttttccttaacctgtggagtaggcaattatctcttcctgcccagcacggcatggcccccactagcagaatttcatgccttcagtgtgcttcttgcacaatccttcttctactttgtcatcagttggtcctactgatgacagtcctactgccttcactatatcatttacttgctcaaaagccttctattggtctgcagtgcctgtgggataatgtccttggctttcaaagttctttaccatctaatctttatttcccatgattcccatataaccctcctttatttaagagagtggattctatgaaatatgtcttctgagtcccaaatttgtattcaggccatttttaacttcccaacttctctttaaaatacaaaatttctgaggtcctctgtgaccagatcagatcaaattgatccttcttgactatgaacatgcagaacaattttttttaaaccagaa

SEQ ID NO: 725471 - DNA, 633 bp, Homo sapiens
gggaatgggcagcaaacttctcagaaccagagtactgccttccttttgcccatttatggtttcctccagtccttatcatggtgattatcaattgtgatgatattaaaggaagtgtcatttagcatgaaatttaggacataatgaaatctgaggtcaatttgaygccattcggtcaaccatcttggttctaaccagtttttacctggttctcctgaggaggaagttctgtctgcatgccttcctgttttttaaagataagcaaagttagagcccagtagaaattcaactatgtcacataggcattaaactgggcttgcatttccacatggtcttattccaggaccaaaaaggctggagaatactgaaagatcaatgttgtacccagtgctttgtttctttattttatcccaagaataatatttaaaacactctttgatgtactcaaaaccataatagaagacaatttgtctaggggacaaaggatcaacagaaggatgatatatttcttcctcaagctcagtaagctgccattttggtagattagttgacccatgcaatacattaaataatcaaaacactaaagtattaaaacacactattgtcatataagagatatttgatgatttcagcaga

SEQ ID NO: 725472 - DNA, 633 bp, Homo sapiens
gggaatgggcagcaaacttctcagaaccagagtactgccttccttttgcccatttatggtttcctccagtccttatcatggtgattatcaattgtgatgatattaaaggaagtgtcatttagcatgaaatttaggacataatgaaatctgaggtcaatttgacgccattcrgtcaaccatcttggttctaaccagtttttacctggttctcctgaggaggaagttctgtctgcatgccttcctgttttttaaagataagcaaagttagagcccagtagaaattcaactatgtcacataggcattaaactgggcttgcatttccacatggtcttattccaggaccaaaaaggctggagaatactgaaagatcaatgttgtacccagtgctttgtttctttattttatcccaagaataatatttaaaacactctttgatgtactcaaaaccataatagaagacaatttgtctaggggacaaaggatcaacagaaggatgatatatttcttcctcaagctcagtaagctgccattttggtagattagttgacccatgcaatacattaaataatcaaaacactaaagtattaaaacacactattgtcatataagagatatttgatgatttcagcaga

SEQ ID NO: 725473 - DNA, 600 bp, Homo sapiens
aaaagaaatagattttttataattatatataagaaatgtataactgtgtatcatcatcgattcatgattcacctgcaataacataaatagaatagccacggtccagatcaagccctatggaagtttataattgttcaagaaaagcttcttttagttcttgcctttattctgtgtctatacagcgctccctgagcacaaaacttaaggttttatattttacttcagccagtcattttaagtgacgcttatcccatttcattagtttccttatatctctttttatatctctttttttatttctctttttatatctctttttcctgtgtattctatatagttcacaattgtcattattttcccctctctgttctttacaatataatttaagggttgcattttactctaatgaagatctacttatattaatctaaactcacttgtacttaaagtttcctattatctccctagttgtgtgctattatcaatatgtattactgtaaaatgtaagtccctaccaggcacaggcacasaggtgctactacgacatttgcaataatctgattactctccaacttcttcagtatcaaaataatcctaaga

SEQ ID NO: 725474 - DNA, 1886 bp, Homo sapiens
ttacagatgaggaaaccaaggcacagtaacatccccaaggaacacagctgaaagggacagtaagtttcagagcatgctctcctgagccctatactattaggatacaaagtttatgtctgctacaaaatggcatgcaacttaaaaaaagagcaggccttatacatttttgtgtccccttactacacctagcacagtgactttccacaaaattggtgttcaatagatgtagtaagaatgaatgagaataaataagtctttcctaaatcctccattaggaaagaatattgtagggatgtcccatcttcaatctttatagcactatagattcttggtgaatttcccaggtataaggggcagaacacagactccccaatgtatttgtttgggagatatacaagcccttgactcctttttcagttgttaaatacagtagaccctataggatagggatagactctcttatcctaagygacaacctattcccaaatagggatttttctcatatacacaggccagtgttactcctccagtcaattgagtaacaattcttagctcaaagaccctgaaaactcaaaagtctttagggagttctgtgaaacctctgaaaatgcatgcaagatttggagtgtgcttgcatatcataggaagatgaatacagtcctcagattccccaaggtatcaataactctcaagagttaagaaccactgctctggggtcctctccgtggtagcaactaagttaaaatcacagaagccataaactcctcatagtcctcagaggtgccacatttggataaatatttaatgttctttaagcatgttttaagtgttcaaacgtacacatttctcattaacagtttttttagaggtaatctcttccacacaaaacagtcaattgtgcattttaggaagtcatcagcttataaatgggctgtgatccagggatctatttacaaaccggaatcaattttctcatcaagcaatgtaaataattaagcaaaagtctcatttgctataaagacactgggaacaagaaaccaagaaatgtggtaggaagaagaaagagattgccacccccttcctcgggacaggattgattccagaaaataaaaaataataggcaatgtttcttttcagaacctgttccctcttctgcagcattgctcccagggtacccccaaaatccctagagacacactaacaggacttccccatcatccttccccagcattacccgtctcccacgtcctgcagctccatttcctcaccacaaacgaactcacctaggaatctggaggctagtggcattattaagttcacactcatgtatgtgggactgatggctctttgacctcataatgtgcttgtactttcagcagaggacacatattgatccaaaggaatgactgattgggggtcaaggcagtatgacaaagtcaaggggaaatacaggtcagaggggttaggaaggggtgggaatgccacataaaatgccgaatcttcttagcaatctccttctatgcaactcatattccaatcattcccaaactctgcttccttcagcatctccagtgtgggtaagggtaaggagaataatggagactgaacataaaggaccctgggccactcttcttctgttttaaatttattttagttctctaacccttcccagtaaaactaatttgactaaaggacacaaaactaaagtttggaaatcactgctccaaaataaacagatattttccagcttattccctttctccacttctgattccacaatatttgttcaaacctataagttttgttgcatttttcacccgttgtattttagtagagggttgagaagaaaatagacaggaaggagctagggaaactatctatatgca

SEQ ID NO: 725475 - DNA, 1886 bp, Homo sapiens
ttacagatgaggaaaccaaggcacagtaacatccccaaggaacacagctgaaagggacagtaagtttcagagcatgctctcctgagccctatactattaggatacaaagtttatgtctgctacaaaatggcatgcaacttaaaaaaagagcaggccttatacatttttgtgtccccttactacacctagcacagtgactttccacaaaattggtgttcaatagatgtagtaagaatgaatgagaataaataagtctttcctaaatcctccattaggaaagaatattgtagggatgtcccatcttcaatctttatagcactatagattcttggtgaatttcccaggtataaggggcagaacacagactccccaatgtatttgtttgggagatatacaagcccttgactcctttttcagttgttaaatacagtagaccctataggatagggatagactctcttatcctaagtgacaacctattcccaaatagggatttttctcatatacacaggccagtgttactcctccagtcaattgagtaacaattcttagctcaaagaccmtgaaaactcaaaagtctttagggagttctgtgaaacctctgaaaatgcatgcaagatttggagtgtgcttgcatatcataggaagatgaatacagtcctcagattccccaaggtatcaataactctcaagagttaagaaccactgctctggggtcctctccgtggtagcaactaagttaaaatcacagaagccataaactcctcatagtcctcagaggtgccacatttggataaatatttaatgttctttaagcatgttttaagtgttcaaacgtacacatttctcattaacagtttttttagaggtaatctcttccacacaaaacagtcaattgtgcattttaggaagtcatcagcttataaatgggctgtgatccagggatctatttacaaaccggaatcaattttctcatcaagcaatgtaaataattaagcaaaagtctcatttgctataaagacactgggaacaagaaaccaagaaatgtggtaggaagaagaaagagattgccacccccttcctcgggacaggattgattccagaaaataaaaaataataggcaatgtttcttttcagaacctgttccctcttctgcagcattgctcccagggtacccccaaaatccctagagacacactaacaggacttccccatcatccttccccagcattacccgtctcccacgtcctgcagctccatttcctcaccacaaacgaactcacctaggaatctggaggctagtggcattattaagttcacactcatgtatgtgggactgatggctctttgacctcataatgtgcttgtactttcagcagaggacacatattgatccaaaggaatgactgattgggggtcaaggcagtatgacaaagtcaaggggaaatacaggtcagaggggttaggaaggggtgggaatgccacataaaatgccgaatcttcttagcaatctccttctatgcaactcatattccaatcattcccaaactctgcttccttcagcatctccagtgtgggtaagggtaaggagaataatggagactgaacataaaggaccctgggccactcttcttctgttttaaatttattttagttctctaacccttcccagtaaaactaatttgactaaaggacacaaaactaaagtttggaaatcactgctccaaaataaacagatattttccagcttattccctttctccacttctgattccacaatatttgttcaaacctataagttttgttgcatttttcacccgttgtattttagtagagggttgagaagaaaatagacaggaaggagctagggaaactatctatatgca

SEQ ID NO: 725476 - DNA, 1145 bp, Homo sapiens
acccctcactacctacaccactcattaggrtacttgccttaccctgccttgggatatgctgtcttgtttccaatatagtgaaagctcctggagaaagctcctgtgacccagcattacctccctgaagccctctcacctccacttgcagctcgcctatgtcatccaccgaccaggcctcatcatcgttgtcatagttgggcacagtgctgaagctgccagctcgctgctcatgggtaataccacattcgggcaagttttctacggacctcgtactccgaattcggttctcggggatccgggcagggacactggtggtgtcaaagttttcacattcaaggacttccacataaatcaggtagggagcctgggggaagagtgagacagtatttgcaacttacttccaccactaacccccaaatctcaactctgttagcaaggttcttcctgctgtcctttctcctagctccagccttcatccaatagtcctctgaaactatgaacactatatttagggcagatacttgtcctatgatcacctatgtaaagaatttgtgtgacagaatccttaagtcttcaaaatatttcaactgagctccaaaatgtacagatgatgtgcttgggccaaaccactctagactatcaattacaggctgtaagggaggcctagatgcctctgtgggctcgtcctgaagacagggcccagggagctacagtggacaaaaagactgggacaaagctgggcactgtcccaaggagtgtcccaaacttcagtatttcctttgaaagaagaatatgggccgggcgcggtggctcacgcctgtaatcctagcactttggggggccgaggcgggtggatcatgaggtcaggagttcaagaccagcctggccaagatggcgaaaccccgtcgctactaaaactacaaaaattagccgggtgtggtggcaggcgcctgtaatcccagctactcaggaggctaaggcaggagaatcgcttgaacctgggttgcggaggttgcagtaagccaagattgtgccactgcactccagcctccgcaatagagtgagactccatctcaaaaaaaaaagaagaatctgaaccatgaatactcattccagtcagcacacaaattcagctaattctctcc

SEQ ID NO: 725477 - DNA, 1452 bp, Homo sapiens
aaatactctctacatgtcatcttacatttgtccaaacccatgaaatatataacaccaagagtgaaccctgatgtaaactatgaactctgggtgataatgaggtgttggtgtcggtccatcaattgtaacaaatagacagctgtggttggggatgttgataataggggaggctgcacatgtatgggggcgggaggtatgtgggtaatctctgtaccatctgttcagttttgctatgaccctgaaactgctctaaaatataaagtctacttaagaaagaaaagtcccaatatacatagccaagaaaccttcccacccaatcaggccaagtcatcctactcctttgcacataccggctgcctcaggtaaactccctctggtaactttccatgctttctrcttttccagtttattcacatctggatatatctcgataaaacagctctatgggatggcttttcacaatacttccttggacttccatgcagactgccaccattcaagacatcagccccatccctaaaacactctgattaactcttagactaataggaccttaatattcatatcttaacttttgaggatccagagggaagaaataataaggagggcttgtcactagtgagctagtcactctcaagcagttcagattataagccttttggatttcaagtttaagataatttttgcaagctgactgtcattacaaggctcacaggaaaagactttgctccctccttctcaacttccttccttcccaacctccctttcttccttccctcaaaccaccttcattagttactctcccatcagaagacctcattattaggaattctcttaaaatgccttttacagaaaacagtcctctctttctgccttgaatgtgagctatttgaccctgaagagccgcagctgttcagtggcctgacatttttatggctggtgagttcacactaaaagctggcttccaatgtctgctagaggcactgctaggagggggtcttgcgggccctactatctttccgggctcactgctaaagaattaatgcaatagggagagaatcctctgtcatgtaatgcttgtaggacaattggcattgacttctcccccactggactgtgtaaaggagaccttgaccaatccagaaactatctacagccattaaagtacacaccacaaaaggtggctcccaaattcccatctgcctattctgttgtcttgcaccaacagctaagcaacacactaggacccaagttccagagttgtctgtattgctatcagacatgagctgtgaccctcggtcagtctcccacacatcttggcttcacactttagaagctggacagagcagccctaaaacttcccattgaaggatgctgtagccctgcctctgaggttctcagtccttagttgctgggaatttactgcagccaactcattaacgagaattaaac

SEQ ID NO: 725478 - DNA, 647 bp, Homo sapiens
tttggttgaagcagaaattacaggccttaagccgagccctcttggctgtcatgtgcacctcatagcaacacaaaaggtgctctggagacagcagtttacataagaaaatgaacacacacaaagatgttcaccatcattagccactagggaaattcaratgaaaaccgcaatgagatatcactgcacacctatcagaatagctaaaataaaaaagggtgatgatacaaatactggcaaagatagggagaaactatgtcactcgtgcactactggtgggaatgtaaaatggtatagccactctggaaagcagtttggcagttgcttaaaaagctaaacacgtaactatgcaaccaaacaattgcactcctgggcattaatcccagagaagtgacaacttatgttcacacaaaaacctgtacgctagagttcatatgagctctatttgtaataacccccaaatggaaataacctagatgtctttcaacagatgaataggttaaactgcaatacatctatatgatagaataccactcagctatacaaagaagccaattattaacacatcaaacctgggtgaatctccagaggattataccatgtgaataaagctgataccaaaatgttgcatactgtatgattccatttat

SEQ ID NO: 725479 - DNA, 1411 bp, Homo sapiens
ggcacaagtgaacttaaagtcatttagcatggccaggaaatagagaagacgatgctggtgggggtatttttccagaaagacaaaaagactcaaaattagtttaatgagaggagttctaaaattgtatttcattttgtaaagattatgtgtctggctgtagataggttgaaagagaacatgacaagaagaccagttaagaaggttatcaaagtaatggcaagaaataatgaagttgggattttgcctctgaaaatattaattctataaggaagcaaaatgtcaaattatgtaatgtgaatgtgtgtttatgttttcagtgttttcatctttgtaaaatggcacaggagttctgtttccaacaatgtgagttaattaggagctccaagtgacccacctgcatgaaataactaaagtctgggaaagataaactatgtgagacattgctggtcccagctggagatggagagatctccaggaactcttctctttcaaaacacaaaccagcccaccctgagttaggccagagtgacaaggcaggcagttgggatgagagggttgtctgaggtcaattgctggtagcagcagtgttatctggatactgaatcttgggtagcctctgctaagactagaccctcaagggcctgaagcctaaggtagtagtggccatggctgctgacaaaagtagcagagcctctttgctggaaagcttccccattctcaatttaaccctgtaagactcttgctcattaaaatctagtaatggcctcatagtctgtggttactaaataaaatagcactaggacttattggtacatgcaacaaacaatatatttatgctctgagaggacacagataatggactttcacctacaggatatgtaactgctacctataaagaaagtaaggatgtagtcacaagctgtccataacaataagattattaggaataaatacatgtgatggggaagaaaaggaaacttttagaaatgaaagtttatacttgccaaaataaaaaaaaaggtagtcagcagattaaacagttgaagatagaattagtgaactagaaaaaratgcatagaaataatggaatattgcactgagaaagaaggagatggaaaatcaggtgcaagaaggtgagatccatgttgggtaggtgtgggagtggtccaggcttaaagtcttacacctcacagaagccagtctctcttataacaattccatgaacttctggggtcctgcaagtgacatgccaattataagagtcactgaactcaagaaagccaaaccatggtatccccatcaggcatttatagttcatttatggttctccccagtcgagatataatttaccaggcaaggatcatttgtatcataagcagtgttgcctagcaatatagttgacattctatcc

SEQ ID NO: 725480 - DNA, 1411 bp, Homo sapiens
ggcacaagtgaacttaaagtcatttagcatggccaggaaatagagaagacgatgctggtgggggtatttttccagaaagacaaaaagactcaaaattagtttaatgagaggagttctaaaattgtatttcattttgtaaagattatgtgtctggctgtagataggttgaaagagaacatgacaagaagaccagttaagaaggttatcaaagtaatggcaagaaataatgaagttgggattttgcctctgaaaatattaattctataaggaagcaaaatgtcaaattatgtaatgtgaatgtgtgtttatgttttcagtgttttcatctttgtaaaatggcacaggagttctgtttccaacaatgtgagttaattaggagctccaagtgacccacctgcatgaaataactaaagtctgggaaagataaactatgtgagacattgctggtcccagctggagatggagagatctccaggaactcttctctttcaaaacacaaaccagcccaccctgagttaggccagagtgacaaggcaggcagttgggatgagagggttgtctgaggtcaattgctggtagcagcagtgttatctggatactgaatcttgggtagcctctgctaagactagaccctcaagggcctgaagcctaaggtagtagtggccatggctgctgacaaaagtagcagagcctctttgctggaaagcttccccattctcaatttaaccctgtaagactcttgctcattaaaatctagtaatggcctcatagtctgtggttactaaataaaatagcactaggacttattggtacatgcaacaaacaatatatttatgctctgagaggacacagataatggactttcacctacaggatatgtaactgctacctataaagaaagtaaggatgtagtcacaagctgtccataacaataagattattaggaataaatacatgtgatggggaagaaaaggaaacttttagaaatgaaagtttatacttgccaaaataaaaaaaaaggtagtcagcagattaaacagttgaagatagaattagtgaactagaaaaaaatrcatagaaataatggaatattgcactgagaaagaaggagatggaaaatcaggtgcaagaaggtgagatccatgttgggtaggtgtgggagtggtccaggcttaaagtcttacacctcacagaagccagtctctcttataacaattccatgaacttctggggtcctgcaagtgacatgccaattataagagtcactgaactcaagaaagccaaaccatggtatccccatcaggcatttatagttcatttatggttctccccagtcgagatataatttaccaggcaaggatcatttgtatcataagcagtgttgcctagcaatatagttgacattctatcc

SEQ ID NO: 725481 - DNA, 1281 bp, Homo sapiens
tccatccacagctctattagcagcagaaggatcttatttggaggttgaagtagggaatggaagatcttatttgtgtctaaagagcctttttaaggaagggcattctcttcaactgtacacacacaaaagcaatcacccatccccaatacttaccaataacctggcacttacgtgattatctgcttatttactgaggttactacagaatttacataaagtacaagccttttcaaaagaacaatctgcaactatttctgatctttctgtttcctcttttttttctgcctttaatatttggtccccaaatgcagcgcccacaccttatacacctgcatgcctagcaaagtgctttgcctgtaagcagtcacccatgaacgttgttcagttgaatctaatcagatagtgtaggtggtgggacagtcagcaggaagggkgcattcactcagcattgaaggctcagttactggtaatgagcagggaagaatcaaatgtgtggctgttgctgttccttcttttaagaatttgcatttagtcaaatgaggtattatttggatcgcaaacaaatgaagctcaggcatggttttaaacctttctatagcaagaaagatgtgtatggttaatgcaattaattgaaatgtctgtcaatagcaaagcatttcttttaaaaagtgaaaaaaataggctcactcttccttgtgatggcggctggcattttgctcactccttgtaccccttaggtaagaagtctctcaatagcaaagcatttcttttaaaaaatgaaaaaaatagcctcactctttcttgtgatggtggctggcattttgctcactccttgtaccccttaggtaagaatcacatgggcagatgacaggtaggttctgtgaagagcaaaattgaaatggaggctgggtgcagtggctcacacctgtaatcccagcactttgggaggccgaggccggaagatcatgaggtcaggagatggagaccatcctggctaacgtggtgaaacctcgtctctactacaaatagaaaaagttatccaggcgtggtgtcatgcgcttgtagtcccagctactcaggaggctggagcaggagaatcgcttgaacccagaaggcagaggttgcagtgagcccagatcgcaccactgtactccagcctgggtgacagagcgagactccatctcaaaagagaaaaaaaaaaatgaaatggaaggatgcagctgaacatatgaaaaataagtggccaaaattgttggccactgttttgctttggtgggcaat

SEQ ID NO: 725482 - DNA, 2274 bp, Homo sapiens
tgttggttaataaccaccacctcttagctccctcagcttcacctcactcctctctatctcaggttgtttcctcttccaaaatgcattcacattcatatacaagacaggtacacagtctctcattttctatcctcttctcattctttataaatgatattaacactcttccccaccccattggttcttttactctacccatctctcagttgccacaacactctgagtcttttgtttcgaaacttctgtaaatggatgttatttttctctggtcacctgtttggttgtagatatggatgattgtttatgtaaatgtacacacataccagttaaagttcaaaagtaggctgttcacatgcattagctaatctcagcattaaaccttctttctaaccttataaaataaatggcaatatatgttcaaatggctgctgtcagaggtccaacctctgatatcccacagtggaaatcagtcaactcatgtcagcaaccaccattcagacctccactgtgaaagcccccatccatgttttatgtatgcctcaccactttagagtttgtgcttcataaaggaagagactccccctgttctgatatcccacctgagcaatatagcacctacttcatcaaggggctcaaacatttttgtgtgtgaactggctgttgtcagcttgttcatcacagtagccagcatcgcgcttctctgatgttgaagatcttctagcagaacataaagacctggtaaattttccccttgcacactgactggggtgtgtgtgtgtagggggtggaactttaatctgggcctggttttctttagatttctaagattttgatatacatgacgtcatgatcactagaattccttgataaaaagatcactcaggatggcttgaagtatgtgaacttgaatgttttagaaatccagttgtagactkgctattgctattttgttcataccagaacttttataagttagcatataaaaccatggagcaagctagaacactatatatggcgtctgaagaatgttatgtttttgcccaaagaactcttttctaatagaatatttccaaataagtaaaacattgaaaacaactcctcagtgaagacagaaatggtaaaaaggacacttttgttacaagtttaaagatatgaaatagtaactgtaaaatatatataaatataagccaatacttgttttatttaaaaataaatgttgaaaatatttaaggtagatggtattactgagatatcagaagaatctaacaatataacaaaggcaagtaaagcaataaaaaaaccaattataagctgtttgggggcactgcataaacacagcatggtctaaatatgaagaaaacttaaaatctggaaaatgttaagtagttgattgggcgtagggaaaaatgtatttgactttgaagctaggaacactatccttagtagcttaggagtaataacattagatccttacagaaggaagtataattttaacaaacaatttgacattgaatattatttgggtagttataataatgctaagactattgaaaacatactatcttgagttatggagataacccctggaagaactaaaaagagactggatatactattgttactgtatacatatatttttatttaactttaaaaatttcttggtattttgcattttggccatttaaaaagattgacactggggcatggtggcatgtacctatagtcccagctactcaggaggctgtggcaggatcacttgtgcctaggtgtttgagtccagcctgggcaatgtaacattgcaataccccatatctttttaaaaaaaaattttttttaaagattggcattgaaaggggttctaaagcaaagaatttggaataaaattgtattctcagtcatacactttgggttgcattaaagattccatactcagttgctgttttctcactgagaccctgaaaatatcttaacaatagcagcattatttgtgattgggaaaagcagctaagaggcactggctcccatttgctttctatattgaccatatggcaccagtaaatgatattaaactacttcaaagacaagttaaaagtacaagtttccctccccctgctgagtttgctattagttttatgtctagggtgctataccctacaatattttgtttttactactgtttagttaataaaaagtcataggaggtcatcatacatgttaagctcaaatgaggtagacaggaataaatggtttcaaaagctgaggagtattacaatt

SEQ ID NO: 725483 - DNA, 2274 bp, Homo sapiens
tgttggttaataaccaccacctcttagctccctcagcttcacctcactcctctctatctcaggttgtttcctcttccaaaatgcattcacattcatatacaagacaggtacacagtctctcattttctatcctcttctcattctttataaatgatattaacactcttccccaccccattggttcttttactctacccatctctcagttgccacaacactctgagtcttttgtttcgaaacttctgtaaatggatgttatttttctctggtcacctgtttggttgtagatatggatgattgtttatgtaaatgtacacacataccagttaaagttcaaaagtaggctgttcacatgcattagctaatctcagcattaaaccttctttctaaccttataaaataaatggcaatatatgttcaaatggctgctgtcagaggtccaacctctgatatcccacagtggaaatcagtcaactcatgtcagcaaccaccattcagacctccactgtgaaagcccccatccatgttttatgtatgcctcaccactttagagtttgtgcttcataaaggaagagactccccctgttctgatatcccacctgagcaatatagcacctacttcatcaaggggctcaaacatttttgtgtgtgaactggctgttgtcagcttgttcatcacagtagccagcatcgcgcttctctgatgttgaagatcttctagcagaacataaagacctggtaaattttccccttgcacactgactggggtgtgtgtgtgtagggggtggaactttaatctgggcctggttttctttagatttctaagattttgatatacatgacgtcatgatcactagaattccttgataaaaagatcactcaggatggcttgaagtatgtgaacttgaatgttttagaaatccagttgtagacttgctattgctattttgttcataccagaacttttataagttagcatataaaaccatggagcaagctagaacactatatatggcgtctgaagaatgttatgtttttgcccaaagaactcttttctaatagaatatttccaaataagtaaaacattgaaaacaactcctcagtgamgacagaaatggtaaaaaggacacttttgttacaagtttaaagatatgaaatagtaactgtaaaatatatataaatataagccaatacttgttttatttaaaaataaatgttgaaaatatttaaggtagatggtattactgagatatcagaagaatctaacaatataacaaaggcaagtaaagcaataaaaaaaccaattataagctgtttgggggcactgcataaacacagcatggtctaaatatgaagaaaacttaaaatctggaaaatgttaagtagttgattgggcgtagggaaaaatgtatttgactttgaagctaggaacactatccttagtagcttaggagtaataacattagatccttacagaaggaagtataattttaacaaacaatttgacattgaatattatttgggtagttataataatgctaagactattgaaaacatactatcttgagttatggagataacccctggaagaactaaaaagagactggatatactattgttactgtatacatatatttttatttaactttaaaaatttcttggtattttgcattttggccatttaaaaagattgacactggggcatggtggcatgtacctatagtcccagctactcaggaggctgtggcaggatcacttgtgcctaggtgtttgagtccagcctgggcaatgtaacattgcaataccccatatctttttaaaaaaaaattttttttaaagattggcattgaaaggggttctaaagcaaagaatttggaataaaattgtattctcagtcatacactttgggttgcattaaagattccatactcagttgctgttttctcactgagaccctgaaaatatcttaacaatagcagcattatttgtgattgggaaaagcagctaagaggcactggctcccatttgctttctatattgaccatatggcaccagtaaatgatattaaactacttcaaagacaagttaaaagtacaagtttccctccccctgctgagtttgctattagttttatgtctagggtgctataccctacaatattttgtttttactactgtttagttaataaaaagtcataggaggtcatcatacatgttaagctcaaatgaggtagacaggaataaatggtttcaaaagctgaggagtattacaatt

SEQ ID NO: 725484 - DNA, 579 bp, Homo sapiens
ttttctaaacatacctcacacctatctactttttcctggcttgaccattgctcctttattttaccctccattggaccacattaattattttctaactggtctttcacatccattcagggcttcctccaattcactccactctctggagtgttgcactaaaagtcctttaaaaataatgcttctgtttaaaatcaattaattgaagttgccagaaagatgaaacattaagttatgaacatgttgtcaaagagcatagtttcactcctgtccagctctccagctttatgtttctcgcatctcccacttgctgctccacattccagcttctttcattcccttcagttatttgaacaggtgcacgcttctcctcccagccttagggcttgttaaatatttctttttctgatacatcctagccccatttagggagaaaccccttgctatggtctgaatgtctatatccccgaaaatgcgtatgytgaaacttaatccccaatgtgataaggattaggtggggccttgggaggtaacaaggtcaaaagggcagagcttttatgaatgggattgaggtcccacacc

SEQ ID NO: 725485 - DNA, 2696 bp, Homo sapiens
  misc_feature 1493, 1503, 1504, 1505, 1506, 1507, 1508, 1509, 1510, 1511,1512, 1513, 1514, 1515, 1516, 1517, 1518, 1519, 1520, 1521,1522, 1523, 1524, 1525, 1526, 1527, 1528, 1529, 1530, 1531,1532, 1533, 1534, 1535, 1536, 1537, 1538, 1539, 1540: n = A,T,C or G
  misc_feature 1541, 1542, 1543, 1544, 1545, 1546, 1547, 1548, 1549, 1550,1551, 1552, 1553, 1554, 1555, 1556, 1557, 1558, 1559, 1560,1561, 1562, 1563, 1564, 1565, 1566, 1567, 1568, 1569, 1570,1571, 1572, 1573, 1574, 1575, 1576, 1577, 1578, 1579: n = A,T,C or G
  misc_feature 1580, 1581, 1582, 1583, 1584, 1585, 1586, 1587, 1588, 1589,1590, 1591, 1592, 1593, 1594, 1595, 1596, 1597, 1598, 1599,1600, 1601, 1602: n = A,T,C or G
tgctaaaaatataaaaattagccaggtttggtggcgcatgcctgtaatcccagctactcggaagtttgaggcacaagaattgcttgaactcaggaggcggaggttgcagtgagccaagatcgcgccacagcactttagtctgggcaacggagcaagattctgtctcaaaataaaagtccatttctaattccatttgagggatatggaataaagtacataaaaagtaacgagtcaaaagaaagaaaaggttttagtgaaaatgaatgtactcttctcccccttctattgtttgtaatagacttaatctttaaagcagttctggatttacaaaaacaaaaaaattattcagagtgtacccatatcccctcccgctacctctcacccctagttcctccgattattaacatcttgtattagcgtgctgcatttgttacaactgataccagtgttggccttccattattcttttaaatgtgaatctgactctggggatttgtgtgactgaatctcgcagattgagaacgatttttaacaaccagccatgcttgtaaaaacatgtggaagtttctctgactctgaaataagagggacaagatggttcccatgcaggcttgcgttggaaatgggggagcgtgcacagtctaactccatgccccgtgtttttcttgagtagccctctgggttgaatcaccctggacttcagctgaggcagggggattgttttatgctcaagaaagctccaggagtggtagaatctggccatcaagatgttctgtgaaatggggctcttgtcttttctggagaacatgccttcttggccctttgatcatgagacatctcaccacgccctcctttaacattgctaatgatggggactgaccaccccgtcattaaaccccatggcagtctaagattaagccattcagaatcttactagaaatgactaagcggaccgttttttcttgtgaggagagaattaaaggcgtttccaatccctaatgataaaaccagcatcaaattgtagagaattgcaatttctttcttacaaacagcaaatttttgtctcctttcattttttaaactgttgaacrtgtcagatggtatgcatagagagatttcagaggtctagtcaatgtgcaaatgttttgtggttttattttgagtttgaagtcagagcactgaattccacaaggcttgagcctcactctccctcctgagcacccaggcttcacggacatgactaataggagtttattcacagcctgctaccatccttggtcataacgttgctcaaggcccgagcaggcctgccaagaccacagtgtagccctgttaatatcacatgaccgtcggagagtttttggaaaacctcctctggccgactgtttatccgcccccattgatatttgtctgaagataagttatacagtctgtttactaaaaaatgcgtcagaacatgctggggatttagctcgaactcgaagcgggttttnccccttattnnnnnnnnnnnnnnnnnnnnnnnnnnnnnnnnnnnnnnnnnnnnnnnnnnnnnnnnnnnnnnnnnnnnnnnnnnnnnnnnnnnnnnnnnnnnnnnnnnnntataggcttgattggagggaagtaagccgtatgagcactttttaaatgaatttttatttctcatttccacttagtgatggatgcacatttttccactaataaacatttgaacttttttcagtttttaagaacatcgtaggtggcatatttcacaatcttggcaaggcagacgtttttggagtaaatcgaaactggaggccagaagtactggctctgaactgaactaccacttgcaaatcgatgtagcagaaggaataatggatcatgtggaccacgcagaaagcgatctgagacgggcgtgtcagccgcatgtggatgaatagtcctttgtgggcaggaaggagagggagtgggtgggtatgagggcaggagaaagaatcagctctgtgtttgggggctgtgagaggacactcagaagaaggcttttacaccatattttatattcacaagtttatttatgttattttgagtccaacagaaagagtcacaaacgttaaactttagcaaccccctaatgattggaaaagatgggcaaatccttgctttaagagcagctgtatcgtatggagaagaagtcatctctgctgggaaaactcgcgaacagatgcaggctaaagcgaaagatcaactctccacaccattacattttgaagggctttgaagttatttttagaaaaactcaaaaatctaaatcaaaaatcagattttttctttttttttttcctactgcttccttttcctttttcttcttctcttgtcccttctcctttttggttgtttctattgctatttttacatgttcctttaggtggggggaagataaggtgtgaaatgtattcaagtgcaactttttcaaaataataaaatacatgtttattatgaggaaaactcaactgcctatagaaatgacaacggtaaatgtaaataagcaaaagatcagagatataagtgtatagccatcacttcctttagcaatcaaataatgagctgggcgcagtggctcacacttgtaattccaacactttgggaggccaaggtgggtggatcagttgaggtcgggagttcaagaccagcccggtcaacatggtgaaacc

SEQ ID NO: 725486 - DNA, 2437 bp, Homo sapiens
tcttgaactcctgacctcaggtgatctgcccaccttggcctcccaaagtgctgggattacaggtgtgggccaccatgcctagccagaatgagattctttttccctttttggctaagaattattaaagtaaaaatattgtgtgttttagacaatgtttttgctagcttttactttcttgaattttatgtagttctgtcatagctattatataacatatatgttgttgttgttgttgtttttggccaatcatctagctgtcccagtgcccggggttaacattgaagaacaccttcagttacgacaagaagaaaaacggcaacgtgtaatcagaaggcacagattagaggaaggaagaggtaagatgtagctacagagaaaaagtacatgaaaatccactttcctaccctatcctgaaaccactgaaaagttcacacaataaactaatttggtaagaaatcatcaaaattaaaattagcaatattctgataactcatataatgggaaaatattcagggtattcatgcttcttctaataacatacgtttaggtatttataattgtgctaataacatacttttaattcagcagggtgtttatggcataagtcagccatattaagaactgtgccatctgcctactatcaataactattagaaatggcaactttttaaaaatagatattctcacaacttgtccttcacccggactttggactcatctatttgaccgtggaacaaaattcaatttagtctttttcatttctattttcttactcatttatgctcattatcatttggacatagtcctgctatgctgccctccagttcagcacataactatgctttcatgtgtccttttttggaaaaacctcattctagttatttacaggaagagtaagatggcaggtctgcaggtttcatttgcaaagataggtctattgtttatcttttcctcattgtttatgagcttaaaagtttcttagcttaaaaatacatttaactggccaggcacggtggctcacgcctgtaatcccagcactttgggaagctgaggcaggcagatcacaagatcaagagatcaagaccatcctggccaacatggtgaaaccccatcactactaaaagtacaaaaaaattagctgggcgtggtggtgtgcgcctgtagtcccagctactcaggagactgaggcaggagaatcacttgaacctggcaggtggagcttgcagtgagccatgatcgcaccactgcactccagcctggcgacagagtgagactccatctcaaaagaaaacaaacaaaaaaaatttaactgtggttataattggtatttgaatacgcaaagataaatatatgtattactaaagatttccttgctcagtaaattttttttttgtaggattaagacaaattgttatggaagtctatgattttattcctccaataggcaaaattttgattagaaatgtttactgatattgcatattttaaatgcttattagaaatggcatgatatttgatgcatgaaataaaccttttacccatttaaccatcattatatttttttctagctattctttttgttaatatatggaataagtagtaaaatgtataatacacatggtgaattctaggtttactaaactttaaattgtaaaacatatacttggcacatgaagagtgttcttcatagcatctgataagtgatgttgattgataaggtgaatatttactattgtttggctttgcttgcataatgtcctttaaaggatattttaatgagattaatatagatactgtcagtatttacattatataagtatatgggaaaattgcatgttaaatatttcttacaaaacaggatagaattaagtttctgatgtggtaattaataattttttatgttgatataattttttcagattagttaccattctatctgtttgctacctgtttcttctttctttagaaatattaggttgagcgacatgaatgaacctacaaaatgcagctatttcttacatttaaactacagtatagcacatccttacacttaattattcacatttaattacttgcctaatgcggtgtatcttgttactctttttctcttccctctaaaaaagctattcttctctaggtatagtatatttgtgcatataggaaataaaggaacawtgaatcgtgcattgataacttgacataacttggtgattgcagaatattcttttgccatttatttttaaatttgacataaacctgtgaaacataattgtaaacattaaccctttaaagttaaaaaaaaaatcctccactagctaaatatttaaagaaattatgttgttgtatctgactttccaaagatagattgaggttctaggcacttagtgtatattttgtgacaaataggtttcatctgcagtcctaaatatatagaaca

SEQ ID NO: 725487 - DNA, 1209 bp, Homo sapiens
atttaaatgtggcttatttataaccacattctggtccttatggggttgtccaggtatctaacacatttttggactgcttttcttcatattagttggtagtaagggaatacatatttatttcaatagtcaatgaaaaagataactaatttatttttcctccaaaagcagaatatatccctgaatatgatatattttgctcactatttacttttttttttctttttgagacagagcctcrctctgtcatccaggctagaatgtagtggcatgatgatctcagctcactgaaacctccggctcccagattcaagcaattcttatgcctcagcctcctgagtagctgggattacaggcccatgccaccacacccagctaattttcgtatttttagtagagacgaggtttcaccatgttggccaggctggtctcaaacacctgacctcaggtgatcctcccatctcggcctcccaaagtgctgggattacaggcgtgagctactgcacctggcccctgtttacatttttgtgctctcttatttttgtcaaaaaataaggacagatcttaaaagagtatgagaaataaatgttgagtgttttggctgcttctctaatcatgtgcttgccatgtttccttccctggttctgtccagggattgaagctcagttgcttccacagttagtttgtggctgtgttttcttgctgtgctacctggtggttggatgagaacgtgaccagagtgttcgcagtgctccaggctcccttgttccagaatgctgtgaggggagagaggtcccgagccaggggtggaagaatatctattgagtcaatgtcagcattcttttattctttttcagctacaggcttactagtgagaaacttcctattactttttaaattaaactcttacctgaccaggtccctatagagagccatacttttaaactggttaatagttatttacttaaaatatcatatcttaccattgattgtgctgtttattttaaaacataaatgaaataatttagggacatatcatgtgaaaacaacattacatatttttctaattgtattcacagtttcagtatttattttggtctttttacatggatattctcagattatatgagttcaatagtgactttcttttatactatcaacttactatgtcaaagtgactttttaaatgaacaatttggaatactaatattt

SEQ ID NO: 725488 - DNA, 617 bp, Homo sapiens
caatcagaatgaaataacagcagagacattttaatctgctttagagaaaaataaaaagtgtagtattgtttaatctattttagagaaacataaaaatatagtattactaggactctgtcttttctgtttaagtaatatgctacgccaatattgtgatgcctagctggtagcttgagatctgacctcacaatgacaatgctttattgctcccttcatgcagatgcctggtaaccaggagtcctagtttagctcttcaacactcttagaaaataatctttagtttcagtgtatttgaaagcctattgatctgccactagttagacccatagactagccacaccaggtttcttacccaaattttaaccctgaagatcctactacttaatcattttcaaaaactccatttagaagaacaaaatgaatacatttkactatttaatatttaaaacctggcctaaaggaataatattaacgtatatgaatatctaatattcatagctatgtatgctatagctttaccattggggcaagccagaccatgaaagaactgtaccccacattatatacatttgctttctgcttcacatttgggtgttatgacatcagctgccctccca

SEQ ID NO: 725489 - DNA, 527 bp, Homo sapiens
ttattttcttcctttccttccctttccttcctttcttttttttctttttgaagatttggagacttcttctgtcactcaggctggagtgaagtggtaccattatagctcaccgtagcctagaattcctggactcaagcgatcttcccacataagcctcatgagtagctgggacaacaagcatggtcactgtacctggctgtgaatccatttccattgtcttctttttattgtcattgtactggtttttggttttcagtaatttggtcctgtcccgtggcatggttagtaatttttgattgaatgctggatattaggtatrtaaaattgttgacatttggatgattttatactccttccagagaggattttctttctgttggtaggcagttagtgtaagggtagatcaccttgatttaatcaatgattaagatgatgtgtgatggaatttaggcccatgtaaggtctggcatattttggtttgttcttaatcctaggacatagcctttctgcggtctaactttaagcca

SEQ ID NO: 725490 - DNA, 2446 bp, Homo sapiens
gcatgagtcccatcccctgaacccccagccccagaagtttttacttaagagtcactgtggtagtgaatcattgttaacagattatagtgtgagctgccatcttaattatcattataatgtatttaggacttttatatatcaagaatcttgctaaagcctttcatataagtcacatttagtctgtctgacaacattttatagatgaagaaatggaggctaagtttacataactaatagctaatgacattcctgattttttcagctttattcttaatcacctaactgtatttcctcatcttctgaagaagttcatcatattcctcaatatttagggggagaagaaagttggagaactatcagtctgaagtctcctgtgtctcttggaatatggaagttatcgtcatactatcagatatagtttatttcaaaaactgaacatattgtagcagaggaataaagtagtgaaatacagcagagaactaatggtctgttcagtttgccaattgtacaaaaagaaatagaaacacgtgtaccttgactttttttttggagacggagtctccccctgtcgccctgctggagtgcaatggcgtgatcttggctcactgcaacctccgcctcccgggttcaagtgattctcctgcctcagcctcttgagcagctgggattacaggcgtgcaccaccatgcccagctaatttttttgtatttttagtagagatggggtttcaccatgttggtcaggctggtctcgaaatcctgacctcaagttatccgcccgcctcagcctcccaaagtgctgagattacgagcatgagctaccgtgcctggccataacttgacattttctatcagattatgacaaaattttaaaaataaagaatgagcaaaaattatagattacagccatgtaatttaataggttacgtggcatttagggatatataagagagtatacttttcaaataaataaccactcaaaaatgtgtgtgtctaggaaagttcagtgtgtactagaaataaagatatgcatggtaagtattgacaaagacacaagtctgcattaatctctcagaacacagtaatagaaaactaaaaataaaattttattttcctgttagcataagttgaaaactgtgctatttaatacagagtttgaaagtagagactcttgagtgaaatatatacattcattgcaaattgaaacacctcaatattaaaataatggggaattgtacaaataggcagaaacatattgctttaaaccagttgtttgaaaggcacattaaaacagaaaaactttttgaacgtattagaaaaagaaataataatagatsataaaagccatttggaaaaacaccaagactaaccaaaagtcagaccacaaatgatgtagttaatttaatatacacttacatagtttgtgtgtataaacatgtattttttaaaagttcaattttattagtaaagttgtacattgaaatgtaggagatgccatttctcctattaaatggtagtgctcagttgttgacagtgcactgacagtataatgcagtagttaagagggtggattctggacccatactccctgtatttgaaccccagctctgctactgatgagccagtatgaactgctaatataaagtctcagttcagctgaggcctttctggccttagtcatctcatctgtaaaattaacctgtgtagaggacttggcacataactaacattcatgttgctgttgtcaaaccatcactctcttctttaaactcttcagtgaaatttccttttaaagataaaaggagcattttttctgcaactagaccctgcagtgcctggcccccacttgtctttgcaaccacatttcctgccagtgtacccctgtgaattatgccatacccacaaatgccttcttgaataaacccaggtatttaccacttcagagccttcttgttttaacttctgtttgaaaagttcttctgtccacacctgcttaggtaccacatacgtaagtaaccctttcctctggctagttccttctcatccttcaatccttaaacgtcacctcagagagaccttccctcaccatcctgtacatactagtgcccccattattctaattctctttttctttcattgtactaatcataattggtagggttttttttacatatatttgtttgcattttctaatgtctgtcttccttatgtgatagatacagtgtctgttttgttacccactatgacatgccaagaatggtacctgatagataattggcctttgctgtgctgtatgaatgaaggaacactaactgctggacataattacagcctttctagaaagcaagaattatcaagaataaaaaaaaaatcattccttttgatataacaatcttttaacaaattttcttaaagatattataaagaatggtgcaagggccatcaca

SEQ ID NO: 725491 - DNA, 2446 bp, Homo sapiens
gcatgagtcccatcccctgaacccccagccccagaagtttttacttaagagtcactgtggtagtgaatcattgttaacagattatagtgtgagctgccatcttaattatcattataatgtatttaggacttttatatatcaagaatcttgctaaagcctttcatataagtcacatttagtctgtctgacaacattttatagatgaagaaatggaggctaagtttacataactaatagctaatgacattcctgattttttcagctttattcttaatcacctaactgtatttcctcatcttctgaagaagttcatcatattcctcaatatttagggggagaagaaagttggagaactatcagtctgaagtctcctgtgtctcttggaatatggaagttatcgtcatactatcagatatagtttatttcaaaaactgaacatattgtagcagaggaataaagtagtgaaatacagcagagaactaatggtctgttcagtttgccaattgtacaaaaagaaatagaaacacgtgtaccttgactttttttttggagacggagtctccccctgtcgccctgctggagtgcaatggcgtgatcttggctcactgcaacctccgcctcccgggttcaagtgattctcctgcctcagcctcttgagcagctgggattacaggcgtgcaccaccatgcccagctaatttttttgtatttttagtagagatggggtttcaccatgttggtcaggctggtctcgaaatcctgacctcaagttatccgcccgcctcagcctcccaaagtgctgagattacgagcatgagctaccgtgcctggccataacttgacattttctatcagattatgacaaaattttaaaaataaagaatgagcaaaaattatagattacagccatgtaatttaataggttacgtggcatttagggatatataagagagtatacttttcaaataaataaccactcaaaaatgtgtgtgtctaggaaagttcagtgtgtactagaaataaagatatgcatggtaagtattgacaaagacacaagtctgcattaatctctcagaacacagtaatagaaaactaaaaataaaattttattttcctgttagcataagttgaaaactgtgctatttaatacagagtttgaaagtagagactcttgagtgaaatatatacattcattgcaaattgaaacacctcaatattaaaataatggggaattgtacaaataggcagaaacatattgctttaaaccagttgtttgaaaggcacattaaaacagaaaaactttttgaacgtattagaaaaagaaataataatagatgataaaagccatttggaaaaacaccaagactaaccaaaagtcagaccacaaatgatgtagttaatttaatatacacttacatagtttgtgtgtataaacaygtattttttaaaagttcaattttattagtaaagttgtacattgaaatgtaggagatgccatttctcctattaaatggtagtgctcagttgttgacagtgcactgacagtataatgcagtagttaagagggtggattctggacccatactccctgtatttgaaccccagctctgctactgatgagccagtatgaactgctaatataaagtctcagttcagctgaggcctttctggccttagtcatctcatctgtaaaattaacctgtgtagaggacttggcacataactaacattcatgttgctgttgtcaaaccatcactctcttctttaaactcttcagtgaaatttccttttaaagataaaaggagcattttttctgcaactagaccctgcagtgcctggcccccacttgtctttgcaaccacatttcctgccagtgtacccctgtgaattatgccatacccacaaatgccttcttgaataaacccaggtatttaccacttcagagccttcttgttttaacttctgtttgaaaagttcttctgtccacacctgcttaggtaccacatacgtaagtaaccctttcctctggctagttccttctcatccttcaatccttaaacgtcacctcagagagaccttccctcaccatcctgtacatactagtgcccccattattctaattctctttttctttcattgtactaatcataattggtagggttttttttacatatatttgtttgcattttctaatgtctgtcttccttatgtgatagatacagtgtctgttttgttacccactatgacatgccaagaatggtacctgatagataattggcctttgctgtgctgtatgaatgaaggaacactaactgctggacataattacagcctttctagaaagcaagaattatcaagaataaaaaaaaaatcattccttttgatataacaatcttttaacaaattttcttaaagatattataaagaatggtgcaagggccatcaca

SEQ ID NO: 725492 - DNA, 653 bp, Homo sapiens
tccaggatacatgtgcaggacacgcaggttgttacataggtaaacgtgtgccatggtggtttgctgcacagatcaacccatcaccttggtagtaagccctgcatacattagctgttcttcctgctgctcccctcccaccacccccacccccatgacaggccccagtgcgtgttgttccctgtcacgtgtccatgtgttttcttctttctgtttttagcgtctgttttgtcaacatctagcatatgacttgacagaaagtagatactgtaagtcctacaaaacactacaaataccaccatattaaaaacataaagtagggaggctggaaataaccattatttagctttcatacatgtttcttaatggtttgcagtatatatgaattctmtgctacatgaacttagaaagcttagagtttctttataaacagtttcatgccaattcagtctctaacaacttcctctaggaaagtaatgaattctgactgggcatatctccaggataaatatttttattattattattaaacacagaaaactaacacgggaataaaactcttctgccaaagcatttcataaaataaagtgttagagatattcttctggacagtttattaaaaacggtgaggctccgaggccacatctctatgtcta

SEQ ID NO: 725493 - DNA, 660 bp, Homo sapiens
ggggtcctattcacaaggtgaagctacttattagtggctatttgtctatttaaggaatgattttgcctctgcagtgattaaactttcaaatgacatttccccacacataaaccagttagtttcgcctgccgtagaagggtgaaagacttctatggaacacggtattttaaattaaactcttctataaatggagtgacaaaattttaactggaagcactttttgagaccatatgtggtaaattgaaaaccaaaacataaccagagaggctttgccaagccaacacaactcctggttttccatctctaaccgtgtagtggtcagcacggaaggctgmacagttcttggctgagatggatcttgtgctgacagcggcaacagagaggctgcagcaaggccgggactttgcacctcaatctcttaaatgtgggcttcctgcttgccctctttttccttttggcctccaaatataagcaatcactcagtactctaactcaagtcctatcctctttctttcttactacaggccaagagcaatgaaaatctggctaacacagtgaaaccctgtctctactaaaaatacaaaaaaaaattagccgggcgtagtggcgggcgcctgtagtcccagttactctggaggctgaggcgggagaatggcgtga

SEQ ID NO: 725494 - DNA, 604 bp, Homo sapiens
tgatgtccgccttcctgtatccaagtgttctcattgttcagttcccacctatgagtgagaacaygcggtgtttggttttttgtccttgcaatagtttgctgagaagacagggtctctcactctgcgtctcaggctggagtgtagcggcaccatcttggctcagtgcaacctccgccttccatgctcaaatgatccttccacctcagcctctggagtagatggaactatatagtagatggaactataggtgcttgcctccatgcccagctaattttttttttttttttttttttggtaaaaacggggtttcgccacgtgtcacagactggtctcgagttcctgggctaaagagatcagctgcctcagcctcccaaagtgatggatcacaggcatgagccaccctgcctggctgtcaattcctaaaatttaaaattaattgagttgatatggtagttgaaacactaggctgcatagatcttaggagatttttttggtatttccatttttttgggtgagaatagtttacactggtagaaactcgttttattacagtggcttctagatactgaagcttgtgtattaggctaatttttcacttgtttat

SEQ ID NO: 725495 - DNA, 604 bp, Homo sapiens
tgatgtccgccttcctgtatccaagtgttctcattgttcagttcccacctatgagtgagaacacgcrgtgtttggttttttgtccttgcaatagtttgctgagaagacagggtctctcactctgcgtctcaggctggagtgtagcggcaccatcttggctcagtgcaacctccgccttccatgctcaaatgatccttccacctcagcctctggagtagatggaactatatagtagatggaactataggtgcttgcctccatgcccagctaattttttttttttttttttttttggtaaaaacggggtttcgccacgtgtcacagactggtctcgagttcctgggctaaagagatcagctgcctcagcctcccaaagtgatggatcacaggcatgagccaccctgcctggctgtcaattcctaaaatttaaaattaattgagttgatatggtagttgaaacactaggctgcatagatcttaggagatttttttggtatttccatttttttgggtgagaatagtttacactggtagaaactcgttttattacagtggcttctagatactgaagcttgtgtattaggctaatttttcacttgtttat

SEQ ID NO: 725496 - DNA, 604 bp, Homo sapiens
tgatgtccgccttcctgtatccaagtgttctcattgttcagttcccacctatgagtgagaacacgcgrtgtttggttttttgtccttgcaatagtttgctgagaagacagggtctctcactctgcgtctcaggctggagtgtagcggcaccatcttggctcagtgcaacctccgccttccatgctcaaatgatccttccacctcagcctctggagtagatggaactatatagtagatggaactataggtgcttgcctccatgcccagctaattttttttttttttttttttttggtaaaaacggggtttcgccacgtgtcacagactggtctcgagttcctgggctaaagagatcagctgcctcagcctcccaaagtgatggatcacaggcatgagccaccctgcctggctgtcaattcctaaaatttaaaattaattgagttgatatggtagttgaaacactaggctgcatagatcttaggagatttttttggtatttccatttttttgggtgagaatagtttacactggtagaaactcgttttattacagtggcttctagatactgaagcttgtgtattaggctaatttttcacttgtttat

SEQ ID NO: 725497 - DNA, 604 bp, Homo sapiens
tgatgtccgccttcctgtatccaagtgttctcattgttcagttcccacctatgagtgagaacacgcggtgtttggttttttgtccttgcaatagtttgctgagaagacagggtctctcactctgcgtctcaggctggagtgtagcggcaccatcttggctcagtgcaacctccgccttccatgctcaaatgatccttccacctcagcctctggagtagatggaactatatagtagatggaactataggtgcttgcctccatgcccagctaattttttttttttttttttttttggtaaaaacggggtttcgccacgtgtcacagactggtctcgagttcctgggctaaagagatcagctgcctcagcctcccaaagtgatggatcacaggcatgagccaccctgcctggctgtcaattcctaaaatttaaaattaattgagttgatatggtagttgaaacactaggctgcatagatcttaggagatttttttggtrtttccatttttttgggtgagaatagtttacactggtagaaactcgttttattacagtggcttctagatactgaagcttgtgtattaggctaatttttcacttgtttat

SEQ ID NO: 725498 - DNA, 604 bp, Homo sapiens
tgatgtccgccttcctgtatccaagtgttctcattgttcagttcccacctatgagtgagaacacgcggtgtttggttttttgtccttgcaatagtttgctgagaagacagggtctctcactctgcgtctcaggctggagtgtagcggcaccatcttggctcagtgcaacctccgccttccatgctcaaatgatccttccacctcagcctctggagtagatggaactatatagtagatggaactataggtgcttgcctccatgcccagctaattttttttttttttttttttttggtaaaaacggggtttcgccacgtgtcacagactggtctcgagttcctgggctaaagagatcagctgcctcagcctcccaaagtgatggatcacaggcatgagccaccctgcctggctgtcaattcctaaaatttaaaattaattgagttgatatggtagttgaaacactaggctgcatagatcttaggagatttttttggtatttccatttttttgggtgagaatagtttacactggtagaaactcgttttattacagtggcttctagatactgaagcttgtgtattaggctaatttttcasttgtttat

SEQ ID NO: 725499 - DNA, 488 bp, Homo sapiens
tgatccaatatcaatggccacccactggtcaccgttccaacttaaagaatagcccccccaaaagcccccaatttgtgggtgatcaccatgtgccccaagactccttgcctttgtgttgacagccccattcccataactgaagtggaatccagagcttctgccatctttgtccacatccccagtacctgttcctsttcgttactgtcccttaaaatgaagcacccaaactggccacgaggcctctgtctcctatgggactacctctccaacggggtgcctttagccttttaagaggaaccactgctgggtccattgtttgtcctcactgccccctaagtactgtgcccccaacaagaggacgttaccatgtcaccatataactaaaactggacttcagacattttctttgattgtcagcaaagccaaaataatgagctcccttggctgagagagtgagcaattctttatctgagacaagaaaccactcc

SEQ ID NO: 725500 - DNA, 548 bp, Homo sapiens
cagaggtttgctaatgtatgtcaagtttttgaaactgctggtataggcataccttgttgtattttacttcgcattattgcacttcagagatgttgtagtttttttactaattgaagttttgtggtaaccataggttaagcaagtctgttcgtgcaatttttccaatatcatgtactcactttgtgtctctgcrccacattttggttatttttaaaatatttttatttttaaaattattactatatagattatggcaatttgtgatcagtgctcctcgatgttacttttgtaattgttttggggtgccaaaaactgtacctatataaaacaagtcagcttaattaatgtggtgtttgttctgagtgctccattgactggaagttctgtctccatctccttaggcctccttttcattgagacacagcaatattgaaatcaagctgtttaataatgctacaattgcttcccagtgttcaaatgaaaagaattgttgcatgtcttgtcactttaaatcaaatgctacatgtgattaagcttagtgaggaggg

SEQ ID NO: 725501 - DNA, 548 bp, Homo sapiens
cagaggtttgctaatgtatgtcaagtttttgaaactgctggtataggcataccttgttgtattttacttcgcattattgcacttcagagatgttgtagtttttttactaattgaagttttgtggtaaccataggttaagcaagtctgttcgtgcaatttttccaatatcatgtactcactttgtgtctctgcaccacattttggttatttttaaaatatttttatttttaaaattattactatatagattatggcaatttgtgatcagtgctcytcgatgttacttttgtaattgttttggggtgccaaaaactgtacctatataaaacaagtcagcttaattaatgtggtgtttgttctgagtgctccattgactggaagttctgtctccatctccttaggcctccttttcattgagacacagcaatattgaaatcaagctgtttaataatgctacaattgcttcccagtgttcaaatgaaaagaattgttgcatgtcttgtcactttaaatcaaatgctacatgtgattaagcttagtgaggaggg

SEQ ID NO: 725502 - DNA, 1002 bp, Homo sapiens
gaagaacacacctatttttaatgaatatatttctttggcaggaaagtatatagaagaacagttgctggagcaaattcttggctttaccatggcaactttcacaacgttacagcaccacaaagatgaagtggttggtgacatactccaaatgctgctcaaatttacagattttctggcttttaaagaaatgtttctggactgcagagcagaaaaagaaggccagagactggacttaagccgtggtttagtggagacttcwttgtgcaaatcatcttctatgacagcttctcagaacaatctgcagcagtaggacctacctccagacaatgaatggtatcattctcaatttcacgggctcagtagttcaataggctcggctcatgatgacaggagaacgtatcctggaaaaactgattctgttctgcaactcttcattcgcattaaatattgatggggtaaaagccaaaatgatctaatcctcctggacctatttatcctgaaacatcttgttgggtttttgtttttgtttttgttttgagacagggtctcgctctgtcgcccaggctgtactgcagtggcccaatctcggctcactgcagcttccacctgcctggttcaaatgattctcctgtctcagcctcccaagtagctagaattacaggcacccaccaccacgcccagctaatttttttgtatttttagtagagacggggcttcaccatgttggccaggctggttttgaactcgtgacctcaagtgatccgcctgcctcagcctcccaaagtgctaggattacaggtgtgagccaacacacccacccctcccccggccgaatcaccttcttgtattcattaaccctaatactcctcccctccccaagtaggtacctctctcaggtgcttctgactcaggcagcttgtgagcaagcccatgtcaagcattccactctgtggggggcctttcctcaccccagcattcacgtttgcgtatcaaaacccacca

SEQ ID NO: 725503 - DNA, 1002 bp, Homo sapiens
gaagaacacacctatttttaatgaatatatttctttggcaggaaagtatatagaagaacagttgctggagcaaattcttggctttaccatggcaactttcacaacgttacagcaccacaaagatgaagtggttggtgacatactccaaatgctgctcaaatttacagattttctggcttttaaagaaatgtttctggactgcagagcagaaaaagaaggccagagactggacttaagccgtggtttagtggagacttcattgtgcaaatcatcttctatgacagcttctcagaacaatctgcagcagtaggacctacctccagacaatgaatggtatcattctcaatttcacgggctcagtagttcaataggctcggctcatgatgacaggagaacgtatcctggaaaaactgattctgttctgcaactcttcattygcattaaatattgatggggtaaaagccaaaatgatctaatcctcctggacctatttatcctgaaacatcttgttgggtttttgtttttgtttttgttttgagacagggtctcgctctgtcgcccaggctgtactgcagtggcccaatctcggctcactgcagcttccacctgcctggttcaaatgattctcctgtctcagcctcccaagtagctagaattacaggcacccaccaccacgcccagctaatttttttgtatttttagtagagacggggcttcaccatgttggccaggctggttttgaactcgtgacctcaagtgatccgcctgcctcagcctcccaaagtgctaggattacaggtgtgagccaacacacccacccctcccccggccgaatcaccttcttgtattcattaaccctaatactcctcccctccccaagtaggtacctctctcaggtgcttctgactcaggcagcttgtgagcaagcccatgtcaagcattccactctgtggggggcctttcctcaccccagcattcacgtttgcgtatcaaaacccacca

SEQ ID NO: 725504 - DNA, 583 bp, Homo sapiens
caaaaaaaaaaaaaaaaaaaaaaaggaaaagcatcctgagaatgttgctgctcatgctaatttccattccaaattaaattttagttgatcctttccctctaaatgtctgggtttgagatttaatataaatgtatagcgagggactgatgttagaaaaaaatgaagaaattctagtctagtgaatattaaatatcagaacaattttactcccacttttgatggggaaaaaaaagtctccagcactagaagtcaatgtgattatacatatgatcactatgcagttataaggtgtttgtagaaacaatccagaatatacttatatatttggggtctaattgtgaaacttttamagaacagaactcacagcttccagggctgctcagggcctcgtgtgcatgactctgaatctaggaaacgttactgacatagctgctgggagtttctttgtcaggtcctaagtagcacttgaggcagttctgcattatatgtgattacatcccactatatttattgtttccttttcccttaataaaattttagaaaagaacaattttgagtagtatgtatcccaaccacatcactc

SEQ ID NO: 725505 - DNA, 583 bp, Homo sapiens
caaaaaaaaaaaaaaaaaaaaaaaggaaaagcatcctgagaatgttgctgctcatgctaatttccattccaaattaaattttagttgatcctttccctctaaatgtctgggtttgagatttaatataaatgtatagcgagggactgatgttagaaaaaaatgaagaaattctagtctagtgaatattaaatatcagaacaattttactcccacttttgatggggaaaaaaaagtctccagcactagaagtcaatgtgattatacatatgatcactatgcagttataaggtgtttgtagaaacaatccagaatatacttatatatttggggtctaattgtgaaacttttacagaacagaactcacagcttccagggctgctcagggcctcgtgtgcatgactctgaatctaggaaacgttactgacatagctgctgggagtttctttgtcaggtcctaagtagcacttgaggcagttctgcattatatgtgattacatcccacyatatttattgtttccttttcccttaataaaattttagaaaagaacaattttgagtagtatgtatcccaaccacatcactc

SEQ ID NO: 725506 - DNA, 586 bp, Homo sapiens
tgagccaggagaaggaatttcacaagagaatgtcatcagttaaggcaggaacaggccattttcacttcttttgtgatggaatgtcatcagttaaggcaggaaccggccatctggatgtgtacgtgcaggtcacaggggatatgatggcttagcttgggctcagaggcctgacgcaaaccatatcaaagagagaatgaaaccaacaagtgaccagctgtcctggactgttgtgtgtcatctggacccatagcagacctggaagaatgagtgatacacttttgtcagaatcatttttatttttttcaaatcacagcataatctagcttatcctggtcaataaaatgagggaattgaaacaaaaatataaagaagacrgttgtaggatgcccaaagctctttctttagctgcttgaaatgtttacagtgattcaatgtatgaattcttatacttagttagccaggtgcagtggctcacgcctgtaatcctagcactttgggaggctgaggtgggcggatcataaggtcaggagatcgagaccatcctggccaacatggtgaaaccccgtctctactaaaaatacaaaaa

SEQ ID NO: 725507 - DNA, 625 bp, Homo sapiens
ttgagcccttagaaggcataaataaattctacttaatagaaacattttgtgtatttctcctaaattgccagacctatataatttctgtacattgtttctaccactgttacatagcaactactggtatgtttgactgtttctcccattggtattacagataactatgcctgccttttccctagaacaaatcacaatgtattgagaaggagcttctaattaccaacattatagcaatctaaattcaggcatttcacaactcactcttaaactagactaagaaatagctaactagtcttcctttgtcttcaaaacgttttatctaatcaaacctctacatgccataaactggaatgcagtggcgatctcagctgactgcaacctccgcctcccgggttcaagcaattctcctgcctcagcctccccagtagctgggattacaggcatgtaccaccacgtctgrctaatttttgtattttaagtagagatggggtttcaccatggtggccaggctggtctcgaacttctgacctcaggtgatccacccacttgggcctcccaaagtgctgggactataggcgtgagccacctcgcccagcaagcaacattcttaaaaagagactggatc

SEQ ID NO: 725508 - DNA, 906 bp, Homo sapiens
tatttgaagcacttattgatcatcttgtatacctatgatatataaggtaatgtgataagttctggaaatacaaggaaataaaagatgtctcacttcttataaatttaaatttatcagtaaaatcttacattttaaattactgagtactaagtattaataaaattatggaaaatgtgtagaacatggagaggcagagaagagaaataagcctgtgggcttgggtgacaccaaagttctcaaaaaggtacgaaagtttgaactaggttttgaaataaataagtaagaaatccaggaagacagatttcctagaaaaatgtaaaatcatgtgtttttttctgaagaacacaaaaaattttaatatgtttttaccatacattgcatgtataatggaaaataaaawtgtaaaaaaagatcatgcaatacaataaaaaagaatgggtcaaacctaaaaggtttacactgcatggaaagaaatttgaaatttattctgcaggaaatgggcaaaccaattgtgaataactggcaagagagactgactcatggtcaggtttaatttcaggaagattgccccagaagcacagtagacaatgatcagtagaagataaaacagaggctgggcatggtggtggctcatgcttgtaatcttggcactttgggaggctgaggcaggtggatcacctgaggtcaggagtttaagaccagcttgaccaatatggtgaaaccgtatctctactaaaaatacaaaaattagacaaatgtggtgccatgcgcttgtagtcccagctacttgggaggctgaggcaagagaatcgcttgaacctgggaggcagaggttgcagtgagccgagatcacaccactgcactccagcttgggtgacagagtgagactccgtctcaaaaaaaaaa

SEQ ID NO: 725509 - DNA, 906 bp, Homo sapiens
tatttgaagcacttattgatcatcttgtatacctatgatatataaggtaatgtgataagttctggaaatacaaggaaataaaagatgtctcacttcttataaatttaaatttatcagtaaaatcttacattttaaattactgagtactaagtattaataaaattatggaaaatgtgtagaacatggagaggcagagaagagaaataagcctgtgggcttgggtgacaccaaagttctcaaaaaggtacgaaagtttgaactaggttttgaaataaataagtaagaaatccaggaagacagatttcctagaaaaatgtaaaatcatgtgtttttttctgaagaacacaaaaaattttaatatgtttttaccatacattgcatgtataatggaaaataaaaatgtaaaaaaagatcatgcaatacaataaaaaagaatgggtcaaacctaaaaggtttacactgcatggaaagaaatttgaaatttattctgcasgaaatgggcaaaccaattgtgaataactggcaagagagactgactcatggtcaggtttaatttcaggaagattgccccagaagcacagtagacaatgatcagtagaagataaaacagaggctgggcatggtggtggctcatgcttgtaatcttggcactttgggaggctgaggcaggtggatcacctgaggtcaggagtttaagaccagcttgaccaatatggtgaaaccgtatctctactaaaaatacaaaaattagacaaatgtggtgccatgcgcttgtagtcccagctacttgggaggctgaggcaagagaatcgcttgaacctgggaggcagaggttgcagtgagccgagatcacaccactgcactccagcttgggtgacagagtgagactccgtctcaaaaaaaaaa

SEQ ID NO: 725510 - DNA, 779 bp, Homo sapiens
cttttccaccattatcagaaaatataatgataatattcacatttattctatgaactggaaaccagacctctgatgaagggtgggtggtttcctttttgaccaaggctgtgcttctgagattttaaggaaatagtctaaagttacaaggtcaaagaatatagatatgtttagagctcttaatagatactagcaaactgcttttccagattgtccgaatttatactccactagcaaagtgcaagaaagcctgcttcactgtacaccatacctgtggcagcactgagcrttaatatttttgagggtgaaatgatttctcaatattattttgatttatgttattgcattactagtgagtttgaacattttactctcaggatattttaacttgatgcaaaatgtataaaaataaactttggtagaatatttccttctaaactggcatagtgaatcctcccttcagccaattctgaatacttacatgaaaaattcttcaattagcattcttaatttgaaggttctctttacctcattttttttaaaggcttggtttgtttaacattaaattatggcttaaagtgaattcttcagccaagggaagttggttcttttttttgaagccaaaagacttcagtatattagtaattctgtatagaaatatgcagaacatgggaaaatgttctgtatatttagaattctagaattttgctaaaaatctctttctccagtggggagcctgagagtgtacaattaatgaaaatgatttaccttttgcatgtcca

SEQ ID NO: 725511 - DNA, 779 bp, Homo sapiens
cttttccaccattatcagaaaatataatgataatattcacatttattctatgaactggaaaccagacctctgatgaagggtgggtggtttcctttttgaccaaggctgtgcttctgagattttaaggaaatagtctaaagttacaaggtcaaagaatatagatatgtttagagctcttaatagatactagcaaactgcttttccagattgtccgaatttatactccactagcaaagtgcaagaaagcctgcttcactgtacaccatacctgtggcagcactgagcgttaatatttttgagggtgaaatgatttctcaatattattttgatttatgttattgcattactagtgagtttgaacattttactctcaggatattttaacttgatgcaaaatgtataaaaataaactttggtagaatatttccttctaaactggcatagtgaatcctcccttcagccaattctgaatacttacatgaaaaattcttcaattagcattcttaatttgaaggttctctttacctcattttttttaaaggcttggtttgtttaacattaaattatggcttaaagtgaattcttcagccaagggaagttggttcttttttttgaagccaaaagacttcagtatattagtaattctgtatagaaatatgcagaacatgggaaaatgttctgtatatttagaattctagaattttgctaaaaatctctttctccagtggggagcctgagagtgtacaattaaygaaaatgatttaccttttgcatgtcca

SEQ ID NO: 725512 - DNA, 625 bp, Homo sapiens
gcaatgatacacattcacaaaaaaagagaaatatttataggttattcataggttagttgaggatatttataggttagttgtcagtggatttttttttaatattttgtgctttgcaacatctttcagattttctatataatataaatgttttcattttataataagaacggagacgtttttaaaaagaaaagccaaatcagccctttttggagggacttatctcagtaatcaaggcaaaactataattttcctttatttttcacatcactatatcaattcccagcttctcaatacagagagggcttagacacagtgaactcaaattatcatggtgaaaaaaggaaataagacctgtcatataataatagggtaagatatccacatcttgtcatttttcctttaaagcaaatatttattttattatcacattattggaaaatgagaaagaattgggaggaaaatttattagttccattkcagcaactgctgacgagatgaacaaataagctatcatatgggatacaagtccatcctcattatttatcattctaactaccattaacagaatgagatctgtctgccaggtgccttacaaacttcattttatttccaaatctcggaagaa

SEQ ID NO: 725513 - DNA, 625 bp, Homo sapiens
gcaatgatacacattcacaaaaaaagagaaatatttataggttattcataggttagttgaggatatttataggttagttgtcagtggatttttttttaatattttgtgctttgcaacatctttcagattttctatataatataaatgttttcattttataataagaacggagacgtttttaaaaagaaaagccaaatcagccctttttggagggacttatctcagtaatcaaggcaaaactataattttcctttatttttcacatcactatatcaattcccagcttctcaatacagagagggcttagacacagtgaactcaaattatcatggtgaaaaaaggaaataagacctgtcatataataatagggtaagatatccacatcttgtcatttttcctttaaagcaaatatttattttattatcacattattggaaaatgagaaagaattgggaggaaaatttattagttccattgcagcaactgctgacgagatgaacaaataagctatcatatggratacaagtccatcctcattatttatcattctaactaccattaacagaatgagatctgtctgccaggtgccttacaaacttcattttatttccaaatctcggaagaa

SEQ ID NO: 725514 - DNA, 602 bp, Homo sapiens
acaaaaaattgatcccacaaaacagtgcaaatgaatttagttatctaaatatttatcagaatgtgtgcaaagcatagtggtcgtagggaacaatgggattaataaaatcaatggctgccttctaggagaatatagccttttcagagaataaaacaagtacttaaagcactccaaagatcacttgagcttgggaggtcaaggctacagtgagctgtgattgtgccaccacactccagcctgggtgatagagtgagatcctgtctcaaaaaaataaaataaagcactccagtggcaggtaagactaaggaaagaggaccaagagaatactacaaccgctactgaccattctagccactgaagcccaataaatatgacattctggcacactccaaatataaaacactccacttatatcattaacctgatagcccagcattgtttctgtagatgsaataagagagaatcataaatccagtcacttctaccatacgcgagttttacaagtacacatacatgtggtgtgtttgtataaacatgtgtattatgtatgcatatatcatgtgcacacattcacacataatttaaaatttttctcacttgga

SEQ ID NO: 725515 - DNA, 632 bp, Homo sapiens
tcttaactaaaataataataataaaaaataccctgtaaaatatttaaataatggtcccatttccataaatagtttggcatcttcaaagttatatttaaatagtatttttataatttacctgcatatttaagaaaatgagtttttaaaacatatcatgaaatcaayataaagaagctataactggtgtgataattctagaatttcaccctgaaacaaaaatatcatcataatttgcaaaatcctttgttaatttaattccgtgtatgtactcctatatttcaacaaaggtgctattttttttcacctggggctccgatatatataaataacagcaaatctcttatttttaaatgtaactcattagtttctcgatctttcatgttttttacatatgcatttatcaaagtatacatcagtaaatcttaaaatctaagcctaaaattatatttaagatttaaattttaaattccaaagcatgtaaaatttagtgaatataaaatttactgaagcactcttattcaaacgggacaaaaatctgggaacatgatgctgattagaatagcaaggtaaacataagccacagaaatgttgagctctctcctactatgtaattgtcttctcagaggcaaagt

SEQ ID NO: 725516 - DNA, 581 bp, Homo sapiens
tgccaagcactattctaggggctagggatacaacagtacctgtcctcattcagcctacattctaacagagaagagattgtaaataaagaagaaaataaatatatggaaaggtaccaggcaataatatgtacaatgagaaaaaaaattaaaagaagaacttaataggtgcagagcaatgagatgggatgggataggamgaggtggggtaaacctcagagaggaggagctctctattcactgctgttcccccaacacctagaacagcacctagctcagagtgagtgagagtataaaaagggggattggagaagccctccctgaagatgtgatacttaaagatgagaacctagtactaagtgagggagccagctgccaagcaaagatctgacggcaaaatattccagggagacggaggagtgggtgcaaaggctctgaggcaggaacatgcctgtcgtgtctgagacacagcaagaaggctggtgtgcctggagaaaagcaagtaaggccggcagtgataggagatgatgctggagaagcagaacatgataaatagtttaggttttattctgagtgggatgaga

SEQ ID NO: 725517 - DNA, 1342 bp, Homo sapiens
tttaatgttctgataatctgtcgaagattcttctagggcactgaagatagcaagtagtcagaaaacaaatagtgaaggggcttcccatggcagttaatggtcaatacctgttgagaccccagagaaaataaaaaatgattcctaatgattgctggaggttgtggcactaatggaatatatttatatgcataattaaaaatggtatccttttgaaattcactgatttttggatgtgtgattacattaggcttaagtttaccttccttacatcttctaaaaamgtgggggaagtgtgtaactatatttcagggtgcacaagccactattaattctgccgccaggtggaatctgaaagtggcaccataatcatcattttccaccttgaaattgaggatgtctatatgtgtcctctgagtcctcctctctctccaccagccccataatcactaccttgtatcttcacttatgtctctatctcctgctttggttagcgggctcctctaaggacatagctacattttagctatctttagatttcaggcaacaatgaacacatactgagtgctcagtaaatggttgttgagttgaatttttaagaatttcatgcatccattaaatggaagtaatcgactcactaattaaaaatgaccttcaccttttatgaaaggaattgatcatagatcttgacgtttccaaactttggttattagtttgtgcagttggttaaaaaaaaattcttcagttcttagtaattattctgtaatgtggaactattttatatattgtcctccccctattgcttttcatgtttaatgatatttgttgtatttccaaaggaaaaaaggggtttggaaggccaaagggaattaaaatatagaataaagtggtatggagagtttcagaaaaggaagaagaaaatttcaaaggcaagataatgtattcttgtgaaagtctgcgggaagtcagtctcatttagccaaaatcaactcagcacttactattagccaagaaccatgacaagtaatctgagggatgtaaaggttaataatagttctcaagaagcaaccaaaaactttaaaaagtgatcatatttgcttagcgcaaggattgatggaggtaagtggggctgactttgaaaaacctgtattttaaaaattacatatacatattatatttggaaaaatacagtatacatgtattgatgtgatataaaaatgaaatgggcaaaaagaagctgaagaagggcccagaaatgggaggtgggattgggcaggaattttacttatttatttatttatttatttttgagacgaagtcttgcagtgttgcccaggctgaagtg

SEQ ID NO: 725518 - DNA, 1342 bp, Homo sapiens
tttaatgttctgataatctgtcgaagattcttctagggcactgaagatagcaagtagtcagaaaacaaatagtgaaggggcttcccatggcagttaatggtcaatacctgttgagaccccagagaaaataaaaaatgattcctaatgattgctggaggttgtggcactaatggaatatatttatatgcataattaaaaatggtatccttttgaaattcactgatttttggatgtgtgattacattaggcttaagtttaccttccttacatcttctaaaaaagtgggggaagtgtgtaactatatktcagggtgcacaagccactattaattctgccgccaggtggaatctgaaagtggcaccataatcatcattttccaccttgaaattgaggatgtctatatgtgtcctctgagtcctcctctctctccaccagccccataatcactaccttgtatcttcacttatgtctctatctcctgctttggttagcgggctcctctaaggacatagctacattttagctatctttagatttcaggcaacaatgaacacatactgagtgctcagtaaatggttgttgagttgaatttttaagaatttcatgcatccattaaatggaagtaatcgactcactaattaaaaatgaccttcaccttttatgaaaggaattgatcatagatcttgacgtttccaaactttggttattagtttgtgcagttggttaaaaaaaaattcttcagttcttagtaattattctgtaatgtggaactattttatatattgtcctccccctattgcttttcatgtttaatgatatttgttgtatttccaaaggaaaaaaggggtttggaaggccaaagggaattaaaatatagaataaagtggtatggagagtttcagaaaaggaagaagaaaatttcaaaggcaagataatgtattcttgtgaaagtctgcgggaagtcagtctcatttagccaaaatcaactcagcacttactattagccaagaaccatgacaagtaatctgagggatgtaaaggttaataatagttctcaagaagcaaccaaaaactttaaaaagtgatcatatttgcttagcgcaaggattgatggaggtaagtggggctgactttgaaaaacctgtattttaaaaattacatatacatattatatttggaaaaatacagtatacatgtattgatgtgatataaaaatgaaatgggcaaaaagaagctgaagaagggcccagaaatgggaggtgggattgggcaggaattttacttatttatttatttatttatttttgagacgaagtcttgcagtgttgcccaggctgaagtg

SEQ ID NO: 725519 - DNA, 2644 bp, Homo sapiens
tcttaaatgagtcgtaaaatagatcgtgcctctaaaagggccacagaaagcactggccacagtgagcttcgtggaattcgctgactgcataaatcagggagatgagtttcagagaagccttgttctcccttactggatataaaatggttgacttctaaattgggagagaagtcagcccaaatttccctgaggctgccagagggcacgaggacagaggtcctgagaggggagattgggttttctaaaaggcacctgccagggaagaggcaaaagatgccaaccccatgctggccctgagcctcggggaagcgccttctttctgctggggaagcaggagagcccagtgctggcgttcccaaacatcctcacagtcaccttccagatacgccatttccaaggaccacccgtgctatttacttaacagttttagaaagagaattccctcaccctatttcgtarccgcattttagcaacagtatctctaacccatggttatatatatatatatgggcaggctatattttttctgatacttcacaataaatggtagtagataattcctccaggtctcatcctctcctctctcttccatagggtgccgcagggatccaggcatctccatctgtgagcctccagggtctctgcagaagaggaaggctccacccacacttccttggctagagtcagtcatgcggccacagcctagtgcaagggaggctgggaggtgtggtttcaggataccagtgaagcaggaaatgagaagaaaaggggacctgtttctgacattattaaaataaaaaatgcatctctgcatacctctcaggccacatctgggaaaggctgacttttctgagaggccagcatgcagtgctgggtgaccttgagcaggtgacttacccactctgagctcaagtctttgccacacatatggagaggctcactggagttttctagctgggaagattcgacgcacagcccacctagcacttggcccagggcagagcccgctgcggctcgttccgcccccacccccacaaaccgtgttgcagacaccaagggcgtggccctgccaggtgccctctcttaaatcttctataaaaggagagggctggctgggtgactgtttccaacccaacatccacaaagtggataaacgggcagacgcgagtgactttcttaagtacacagccagcttgttgtgggccctgtctagggtgatggcatccctgggggccacaggctgtgggccccattgccttcaagcctgcgagctggctgccacagctcacccactgcagggggcacactgacgggcttcaggtccctcctccaggacacagggaggacagggatggagtgtttttcagaagacaggtcaaggctgatgacaggtccgggctgatggggagcagccgtgaagcaggctgtttgcatcatcactgtagtctccactctggaaaaccaaaatcaggtgactcgctgaattcaaaccggggaaggctgagccagagccagaactggggtctcccctctaggccaagtctgactgagaagctgggaggcctgtggctggtgcccaacagttcacttggtggctgggggctctcagcagcagccaggccaggcccaagccacacagactcccacctctgtttctgcggaaaaatagcaaacacgattcctcaggagaccagggagaggtggggacgggggtgcagctcagaccaggaccggggccctgacagaggaccccaagcagagagcagggcagtggtgccagggaggcagtctggctagccacacctctgatacaggccgcagagcttggctgctcttgcctttgggagggcctccaccacggttttggcagtgctgatactgaaacctgtcggctgtttctgagcatctggacatatgatgtagtgcttattgatggcaggagaagcagggagtgaccatgcatgttagcatgtaatttattccacacccataattctgttctgcagccagtgatgacagggagactcgctgcctcttatcaggcaggggcaccttcatgacatcggcccctccttggagctgaggccgggtgggctttattcaaggaccgcccccccgtgctgttctcaggctgagatgaagctaggatgatgggatctagccgggtgagtactggcagaagcccctgtgactgtggcagacagaaagatgccatatcctcttccccagaacctgtgaatgttcctatctaaagaggctttgcagatgagcttaagttaaggatttcatggaaaagggagattattctggatcatctgcacaggccctatggaagctcaagggtccttataaaagggagttaggaggctcagcgtcagagggaagacatgaggaccggccagggggttggaggcgagaagatgctgccggccttaaggagagggaggaaacgaggggagggagcccatggcctctgacctctgcctcgaggcaagttagtcagagacccctgccattcacagaagacaagaggcagccccctgggctccagctgctctttggtgaagcctggaaggggtaagagaggcggtgccctggacaccctggagaacccacgcttttcaggcttgagcctggggtggat

SEQ ID NO: 725520 - DNA, 561 bp, Homo sapiens
ggaccagtgaccgagcatgccagcacctgatgccgtcctgccctcagctctgccttcctccaccccatgctccctccatgagattccactgcgtgatrggctcttccagccaccatagtacccaagccacagggaccagattcatcagtgtctttacttctcctcctcctcacactgggccatcccagctgcaaaggcaaccttgaatcccccagcctccaggccgccctcatcccatcctcaccatctcagcactgggatctttgctccgggatcccccccaaatccatcttccaaagtgcagccaaagacctcccgtcccccaggccttggcctggcctccctgcctgagcctcctcagcctcctcagcaccagctctgcccctgctgaccacagctcagatgggctgatttccttctgttacttcagtgctctggggttgcttttccctctggcctgtggtgtcccttcaatgagtaagggagcaagacttgctcctccctctggtcttgacttgcgtgcctcttcttccaggaagccttccttgactcctacaacca

SEQ ID NO: 725521 - DNA, 1149 bp, Homo sapiens
tttttcagtctatgtatttaccatgcaatattttggatatatstattctacaaattttcattatgtatctgctgttcaaatttaagttggcatctttcatgctatctggtgatcctgtagctgaagtgagcagggtaggatgcagctgggaatagattctatgtatagatagtaaatatctcctgccattcttgaccacagacatctgtcatggacaataaggccagcattcagtggccctacctagcacatactttttcatagactgaatgttatctgtataggtgtcgaaatgaaagagtgtcttagtagtctattccatcattcataatgtaaaccacacaatctcttccttaaaatcaaaattcaaaattaataaaatctaatataactatttccaaaccaacaaccttaaaatataagcctcatttgaaatcctaagctgtggaagatttgaatacattgcatacggactaaagaaaatagattctagtttaactggtccaacaaatattcaacaagtgccgagggttgccacatttattgacttgccatgttgagtcatgttctgtttctttaatttctttatcatgatatgccagtttgggcccatattcttgactaaaatgtttaattaagtatacctggtttatgcacaatctgaactgatattgatgagtaacttttaatttaggatttataggagcacaccacagttataattgactgaattggattcactcacaaattcaggagagttttaaacaaacaaattgtggtatggtcagaaatgtactcatgcaaatacatatgatgaccaaataaaataaaaaagtgcagaccctgagctttgcgcctttcattattgtcctgggaagttgttttcatcaacttgcacctcgttccaggtttttccacgtatgagaaaatatgactgacaaggttttagtttttctgggttccatgttaaaagacttggggaagtaacttttttggaccaatatggctcagcacacacttctggctacgtggtgactagcgatcagatttgatttatgtatgagaacatggcaactctaaatattaatttggcactttctgaatgctgagccctgttccaggaactgaatgtgaactaccaaacaaaat

SEQ ID NO: 725522 - DNA, 1149 bp, Homo sapiens
tttttcagtctatgtatttaccatgcaatattttggatatatgtattctacaaattttcattatgtatctgctgttcaaatttaagttggcatctttcatgctatctggtgatcctgtagctgaagtgagcagggtaggatgcagctgggaatagattctatgtatagatagtaaatatctcctgccattcttgaccacagacatctgtcatggacaataaggccagcattcagtggccctacctagcacatactttttcatagactgaatgttatctgtataggtgtcgaaatgaaagagtgtcttagtagtctattccatcattcataatgtaaaccacacaatctcttccttaaaatcaaaattcaaaattaataaaatctaatataactatttccaaaccaacaaccttaaaatataagcctcatttgaaatcctaagctgtggaagatttgaatacattgcatacggactraagaaaatagattctagtttaactggtccaacaaatattcaacaagtgccgagggttgccacatttattgacttgccatgttgagtcatgttctgtttctttaatttctttatcatgatatgccagtttgggcccatattcttgactaaaatgtttaattaagtatacctggtttatgcacaatctgaactgatattgatgagtaacttttaatttaggatttataggagcacaccacagttataattgactgaattggattcactcacaaattcaggagagttttaaacaaacaaattgtggtatggtcagaaatgtactcatgcaaatacatatgatgaccaaataaaataaaaaagtgcagaccctgagctttgcgcctttcattattgtcctgggaagttgttttcatcaacttgcacctcgttccaggtttttccacgtatgagaaaatatgactgacaaggttttagtttttctgggttccatgttaaaagacttggggaagtaacttttttggaccaatatggctcagcacacacttctggctacgtggtgactagcgatcagatttgatttatgtatgagaacatggcaactctaaatattaatttggcactttctgaatgctgagccctgttccaggaactgaatgtgaactaccaaacaaaat

SEQ ID NO: 725523 - DNA, 1149 bp, Homo sapiens
tttttcagtctatgtatttaccatgcaatattttggatatatgtattctacaaattttcattatgtatctgctgttcaaatttaagttggcatctttcatgctatctggtgatcctgtagctgaagtgagcagggtaggatgcagctgggaatagattctatgtatagatagtaaatatctcctgccattcttgaccacagacatctgtcatggacaataaggccagcattcagtggccctacctagcacatactttttcatagactgaatgttatctgtataggtgtcgaaatgaaagagtgtcttagtagtctattccatcattcataatgtaaaccacacaatctcttccttaaaatcaaaattcaaaattaataaaatctaatataactatttccaaaccaacaaccttaaaatataagcctcatttgaaatcctaagctgtggaagatttgaatacattgcatacggactaaagaaaatagattctagtttaactggtccaacaaatattcaacaagtgccgagggttgccacatttattgacttgccatgttgagtcatgttctgtttctttaatttctttatcatgatatgccagtttgggcccatattcttgactaaaatgtttaattaagtatacctggtttatgcacaatctgaactgatattgatgagtaacttttaatttaggatttataggagcacaccacagttataattgactgaattggattcactcacaaattcaggagagttttaaacaaacaaattgtggtatggtcagaaatgtactcatgcaaatacatatgatgaccaaataaaataaaaaagtgcagaccctgagctttgcgcctttcattattgtcctgggaagttgttttcatcaacttgcacctcgttccaggtttttccacgtatgagaaaatatgactgacaaggttttagtttttctgggttccatgttaaaagacttggggaartaacttttttggaccaatatggctcagcacacacttctggctacgtggtgactagcgatcagatttgatttatgtatgagaacatggcaactctaaatattaatttggcactttctgaatgctgagccctgttccaggaactgaatgtgaactaccaaacaaaat

SEQ ID NO: 725524 - DNA, 648 bp, Homo sapiens
tcttaatttcttccgaaaaatttcaatctgtccatgtacttctccaacaagtattctgattgcaaattaaggccaggagaaaagaaaaagtttaaaaaaatcaaatgtctgcaaatgtragaaagaaatgtacttataaataatgaccaaataattaatacagcactaaataggccaaagggtatagtttacaatattgaccaattattatttaaatagtagatactgaaaatggccagatgaaattatattctttagaagatagcttcactcttagatttcctgcaagtataatgcacgttgattaaggtttgggattaaccaaaatacctttcccagtatgttttctttgagatctaatgttggccatgttggagttattatacacaatttaatcagtatatttctgctaatgtggtgacattagggacaaggaacaagctcgtgtaccagactttgctctgggtttggaaatatggagaaaattaggcaattaacttagattattgatttcaaatctttcttattttctactgcatgtgtttaatgttataaatgtccatctatgaagagtttttgttgcatcttacacattttaagttgtatttttatttagtttgaaatgtttttaaattttgagatttttta

SEQ ID NO: 725525 - DNA, 2528 bp, Homo sapiens
cagattttatctctgtaggcctctgggaatacttttagagattcacagtgaaaaatcagagtcaactcatgaatttctactttattgcataaaaacaaggggactataaaatgtgttcaaagggtataggatggaaatatacagaaatatagatcacacataacctgaatcagttgattcatctaaattatagtaatatctaaacaattgatgttacattgacgatccctttatttttatttttatttttttgagacaaagtcttgctctcatgcccaggctggagtgcagtggcgcgatcttggctccctgcaacctctgcctcccaggtaggagtgagtctcctgcctcagtttcccaagtggctgcgattacaggcacctgccaccaagcccggctaatttttgtattttttttttttttcagtagagacaggggttttaccatgttggccaggctgtactccgactcctgacctcaaatgatccacctgccttggcctcccaaagtgctgggattacaggcatgagccactgcacccaacctgaagatccatttaaaaagttatctccttcattagagatttccattctcctcttgctcttttgttgacctgagtttcctctgggcactttaatttctgcagttgtgaaaacagctgcatcttaaacagagccaccagagaactacagaggaagctacatttgatttcttttcatgagacacttaagagggaaagctgggtgaagagtatatgaggactctgaactatatttgcaaatattctgtaaatctaaaactattcaaaaagaaaattaggaaacttgggttttattacctctaagtagccaaaggctctaggtggctgattaaagcatcgaagctttaaaaattactatagcaattttgaatttgttacgttcctttctgacaataaattattacttaattcttttctagtgagtctggattcttagtcttaccctgtctacagtcttaaacatatggcaattccattttccataagacatccagaggcatcttactaaatagcaaaactttttggacttcctttcaaatataaaagatataacagacaaagttctcttccttcctccttctcttctctcatcctgcaggctcccacagaacatggatgactgccatcacactgtttatgatgagyattgcacttgactggtcatttgtcatccttataatgtggtaaatgttatggacataggggccacttgtcactgttttcccatcatctactatagcatcctacgtataaggagaaaacagtgaatgatgatggttgttgaatgcaaaacttatgatatcataattattggaatttactgaagaatgtagggttgtattacacaaaatcctgtgctttttaaaccagtgagttttcatgttttagttctgtacactgttctgtttgattgccatttgtcccttcttgatcttctgtacctgactgtgtatatgcctgttgtagctatatcttcttctgatttgatgattttcatataatttttgctttcttctcaaaagaatatgagactattctatttgtggctagaattgtttgattctaactacattaactaattctattaaagagctgattaattaaatgcggtttaattttgtaatactattggtttggtatatcttccttgaattcttattttcaatccaatcacccattgtttttatattatttaataatagcttcataataaagcaataattacttttctagagcaaactgctatcatatactataagcatgaacttattaaaataagcttaaccatgtctattttaatgttaaaagcaaaacaaaaccaacaaaaactttaataagtaacaaagataagtaaaaaagtttcaccagaaacctctagtcttgcttatggaaagattaatacatcgaattatgttctatcaaataatcagaatatttgtgtaataagaattagaatgattttttttctagaaatcataatggccaatttttaaaaagtgaaaccatgtgagtgctgaatatttttttcctagcttatagatgaggaaactgtacatgagaaactaaatatttgtattcaactcccaattttggtcatttttagttataataccacccctttttgttaactctgtttttaaggtaataattatttaattctcccctcctcatagcttgtttttttttttttttttaatggaagaatctcacactgatgtgctttatcacacaatagatttagctgtggttttctcgtgagggtgttgtgttcttgatggtgctgtgagactgacatttatctcctcagtttccttgttaaacattctcagcagagtgccttggactgacaaactgaaatacattttgattaggcaacatgagcagaaggagtgtggggagaggactgtataaatctgttttactcaaccttgaagaaatgttaagtgttaattccctgcgtcaaataaagtacaccaagtatatatgc

SEQ ID NO: 725526 - DNA, 2528 bp, Homo sapiens
cagattttatctctgtaggcctctgggaatacttttagagattcacagtgaaaaatcagagtcaactcatgaatttctactttattgcataaaaacaaggggactataaaatgtgttcaaagggtataggatggaaatatacagaaatatagatcacacataacctgaatcagttgattcatctaaattatagtaatatctaaacaattgatgttacattgacgatccctttatttttatttttatttttttgagacaaagtcttgctctcatgcccaggctggagtgcagtggcgcgatcttggctccctgcaacctctgcctcccaggtaggagtgagtctcctgcctcagtttcccaagtggctgcgattacaggcacctgccaccaagcccggctaatttttgtattttttttttttttcagtagagacaggggttttaccatgttggccaggctgtactccgactcctgacctcaaatgatccacctgccttggcctcccaaagtgctgggattacaggcatgagccactgcacccaacctgaagatccatttaaaaagttatctccttcattagagatttccattctcctcttgctcttttgttgacctgagtttcctctgggcactttaatttctgcagttgtgaaaacagctgcatcttaaacagagccaccagagaactacagaggaagctacatttgatttcttttcatgagacacttaagagggaaagctgggtgaagagtatatgaggactctgaactatatttgcaaatattctgtaaatctaaaactattcaaaaagaaaattaggaaacttgggttttattacctctaagtagccaaaggctctaggtggctgattaaagcatcgaagctttaaaaattactatagcaattttgaatttgttacgttcctttctgacaataaattattacttaattcttttctagtgagtctggattcttagtcttaccctgtctacagtcttaaacatatggcaattccattttccataagacatccagaggcatcttactaaatagcaaaactttttggacttcctttcaaatataaaagatataacagacaaagttctcttccttcctccttctcttctctcatcctgcaggctcccacagaacatggatgactgccatcacactgtttatgatgagtattgcacttgactggtcatttgtcatccttataatgtggtaaatgttatggacataggggccacttgtcactgttttcccatcatctactatagcatcctacgtataaggagaaaacagtgaatgatgatggttgttgaatgcaaaacttatgatatcataattattggaatttactgaagaatgtagggttgtattacacaaaatcctgtgctttttaaaccagtgagttttcatgttttagttctgtacactgttctgtttgattgccatttgtcccttcttgatcttctgtacctgmctgtgtatatgcctgttgtagctatatcttcttctgatttgatgattttcatataatttttgctttcttctcaaaagaatatgagactattctatttgtggctagaattgtttgattctaactacattaactaattctattaaagagctgattaattaaatgcggtttaattttgtaatactattggtttggtatatcttccttgaattcttattttcaatccaatcacccattgtttttatattatttaataatagcttcataataaagcaataattacttttctagagcaaactgctatcatatactataagcatgaacttattaaaataagcttaaccatgtctattttaatgttaaaagcaaaacaaaaccaacaaaaactttaataagtaacaaagataagtaaaaaagtttcaccagaaacctctagtcttgcttatggaaagattaatacatcgaattatgttctatcaaataatcagaatatttgtgtaataagaattagaatgattttttttctagaaatcataatggccaatttttaaaaagtgaaaccatgtgagtgctgaatatttttttcctagcttatagatgaggaaactgtacatgagaaactaaatatttgtattcaactcccaattttggtcatttttagttataataccacccctttttgttaactctgtttttaaggtaataattatttaattctcccctcctcatagcttgtttttttttttttttttaatggaagaatctcacactgatgtgctttatcacacaatagatttagctgtggttttctcgtgagggtgttgtgttcttgatggtgctgtgagactgacatttatctcctcagtttccttgttaaacattctcagcagagtgccttggactgacaaactgaaatacattttgattaggcaacatgagcagaaggagtgtggggagaggactgtataaatctgttttactcaaccttgaagaaatgttaagtgttaattccctgcgtcaaataaagtacaccaagtatatatgc

SEQ ID NO: 725527 - DNA, 633 bp, Homo sapiens
attaaacctctttcttttgtaaattgcccagtatcgggtatgtctttatcagcagtgtgaaaacggaccgatacactagggtatggggagggatgaacttttttctggaatattccagctctaaatcagaagaaaaaacactaaagtcattctctacatctaaaatgctttctatagcctctgaggctttgtagcctctgccctaccctggctttctccaggctagcctactcctcctttagcctctgcacaggccacttccttagcctgtgttccccagctcccaaggctgtgttatgtgacctatgtgcttgtgctgctccccgtgatcaccacttaatggaaattgtctgtttactccttcatctctgctgctagaccataagttcctagaaggaaagggaaaggattttcctgttcacaggatatcctcagcaccagcacaatgtgggaacccagtaactgtgctgacttggtttaagtctctagctggataggggaaaaaatggagcatctgaaaccaggagcataaaccctgaaatagcacacyagtcaaggtaaaccaggtcaagtactgggggaggaaggggacctagaaggacagtcctggagaaaaacatctcaaggacaaca

SEQ ID NO: 725528 - DNA, 2173 bp, Homo sapiens
atactcatagagagtccaataggctgtgggggtgttgattgatgtaaaaaggtaactagctgtgattattaggtaatgagactgttttttttgtgtgtgtgtggctccttggctagctccaaatgaataaatgactgaaacatcaggcctcgggactccttcagaatgcatggtgaatgaagaaaggcaagatgatcaggtccctgtgtttggtcaaggttttgtgaacaagcaaggtcttggagttgaaagtaatacaatcagtattaaataaaatgatatgagagagcacctaaacagatagcagatattctcatgggttttcaccaccaagttatttaccatgattattattaaaaccatctgctgcctggcaaaaaaaaaggcttttgtctgggcaccaaccatcccactctctttattgcttttatatggagcctggggagggagatggatgggatgagtggccacaactccatttgggagtgtctcagacaggctagcatagcatgttgtattgcattcagagaactgggtgactgtatttatcaaggtgacaagaataggcagcaccctcaaggaactgtcaagtggagttcagcagtgagagtacgcagtggggatggggctgtgggcaggggagagcattagggaaagtcagacagcaagttccattatagaacctgggggcagtcgagcaggtgttttgcctcagtctcaccttagtccaaccccattgcctgggcaacaatgtcaataaatataatgactatttttgagttctgattgcagccaaacattaagaggaattttacatatataaccatttaactactgtcttacagatgtagaaactacatctggaaagcaaaactggcttgttcagtgttattcagccagcaatggggtctgaacctagggacttctcctgccagagtttgggctcttttcataaagccacactgcttcccaacaaacagaagttttcccaacagacttagaccaagctaaaatgtagcatgcagtgtagaaataccaaccactctcttggaaattatatggcttggaatttcaaagggccagagcagaggtacctgagggttatgggctgtgaggtaccacaggcccatcttctgctgcttcccagctccacatcaacccaaaagggcttcaggaagaggcaaccaggaacccaacaggcttgttctaggtgcctccatccctggggctcttcatggacagcagctgccaaggccatagctctcatacgtgtccttcctgcaggtgttcaagagggcctttcttctctagactgctctcaggtatcctgatgacatctctgctcagaagagtggactgatgagaaattggatgagatcaaaaagcaagcccatagctggaggaagactgagatgagatcttgattctctggttcctggctcaggagcctgcccctcatacgcacccactagctgcccggtggtactcaacatctagggcattgagcagggcattgagccactgagcagggaaatatcgcccaagaagtctatcacctggcaatttcctaaaaagtaaaggatctctccccagaatgaatataaagaatgccacttattctcatgagaatatgccaattcagtcatgctggaacttgatgctagatctttcaaatgactttaatatgacccatcaattattcaaagaataccttttggggaccatttttctagaccccttaccaatatatatatatatatattttctttttttatattgcgcatcctttattttacacttactaaagtcctttataattatttttttcattagctccaagggagctagyaaagggaggaaacagtgtaatcttgcttccataagaaactggttattggcaaaaggaagtcaataaatgtaatccagcaaataaacagaaccaacgacaaaaaccaaatgattatctcaatagatgcagaaaaggcctctgacaaaattcaacacgcttcatgctaaaaacactaaataaattagatgttgatgagacgtatctcaaaataataacagctatctatgacaaacccacagccaatatcatactgaatgggcaaaaactggaagcattccctttgaaaacgggcacaagacagggatgccctctctcaccactcca

SEQ ID NO: 725529 - DNA, 659 bp, Homo sapiens
tttaaatgaaatgtctacttgtgatgacaaagggaaggaaatataaaataagtggtaggggagggataggatgaacgtcaattctgcctttgattgaagttgcaggagcaaactgtggtatgtgccaccaactcctgtgtattaagttttttgtagaactgtagctggttatgaacttgaggacttggtaacagactgaatttaatgtagggcaggcacagtgatcagagtgctgaaggggtgaactgtgtcagatgcatctgatacactgactcatcctctcaatrtctcctctcatcccagctgtgactggaatggagagttcaaaggaattcaagctgatagcatcttgctttaggacagatgtttcttgtctttctgttcaatcctaaggccatttctatacaacggacacttttttttttctgtattaagagtctgtttatttcagtattaaggtaaaagaacctagttataataagtgtttttcatatctttcttcatcattctcacaacaaatatatgagaagaatgacgcttaaaaggtatgtaactttctgaggtgaggcaactagtaggttgtagaattggtttttgaatgcagatttctctccttctttctccactgttctttctcacccttgtttgcactagtgatc

SEQ ID NO: 725530 - DNA, 615 bp, Homo sapiens
catagcccatgcataaagctgagctggttgcttttagaagcacggtgtgtagttcacagtgaccagcttgcagtctttggtggtacttctgtttctgctagctgtgatgcccagttggagatatcaggaaccagtgtagcccatgtasaaagctgatctggttgctttcagaagcctggtgggacgttcaaactggcttgagtccctagatggcttgtcttcaagcccattatcagagccgatcccaaagacctgcctaggcagggagacaccatcttctgtgcattttggtgaagaataacagctagttttgcttaactcaggaggacaaacagtggttccactcagccagaacgccttccccatggtctcacccaagggaaaagatgcccaccttgcctatttaggggaagcatgtgagctatttttaaataaaactattaataacaactacagctaaaatacattatcaagggatacgtattacaaaatgatgaaaattctgacatccaaaacaaaatgtgtgtatggtggggtgagtaaagttagagttgtcgcatgaaatcaaagttgttatcagcttgaaatagactgttataagttaaatgttttata

SEQ ID NO: 725531 - DNA, 1427 bp, Homo sapiens
aatcaagctattaaaatagatttgagaacaaaagctgaaatataatgatgaattcatagcaaatcccacttattaaaagagggagtaaattttaaaaaaagaatccacttcacatggctgttgtcagtctggcttagagaaaaagcacttatgctgttggttgagtggagaacaaattccactgggtgatgtggccattctaggaaattaccaagttccaagtcaagcctcattgagccaaacctttttccaattttcaaactctttttagttattagatttagacataaaaaaatatagatctttagggtatgcaattgtgtttcttataggaagagaaacaaacagaagcaagctagaaagacagtttgtgtccacctaagaacaagtattttaagcaaccactcaaatttcaccataactgcaaccagaaattggttcaggcaagaattatcaatgtatgttaggtattagagggaaagtttaaagaggagtatgatcttcaaatgtttccctacagattgcttattagttgcaaggggaaataacatctacacagtaaataaatcagattaacacttgaccagatgatcaaaattagtatcaccaatgaacagcacctgcagttgtgataccctgagaaggaccctatatcagtagtggtatatattacagattcacgatagacacacaccacctgaatctaaccataagaaaacatcagacaaacccaaaatgagaaatattcttgaaagaaataaataaattagggagactatagttaacaataatttgctgtatatttccaaatagctataagagaagatttgaaatgctcccaacacaaagaaacgacaaatgtttgaggtgatagatatcctaaatacaatcattacacattgtactcatgtatcaaaatatcacatgtaaccaatacataagtataattattatggatcaattttttaaaaagaaagaacacagacatgaactggtctgtagttataaaaaatgtcaatgtcagctggctgtggtggctcatgcctgtaattccatcactttggaagaccaaggcaggaggaccagttgaggctgggagttytaggctgcagtaagctacgatcccaccaccagactctgtaaacagttatggagttacagataactccataactctaaaaaaaaaaaaaagtgtttttgtttaatgtttttttgtttgttttcttaatcacccaggctggagtgcagtggcatgatcatagctcaccgcagcctccaaatcctgggctcaagcagtcctcccacctcagcctcctgtgtagctgggtctacaggcacacgccaccatgcccagctaattttttttattttttgaagcaatgagttctcactatgttgccaaagctggtctcaaactcctggcctca

SEQ ID NO: 725532 - DNA, 1358 bp, Homo sapiens
ttggccaggctggtcttgaactcctgacctcaggtgatccgcccacctcggcctcctaaagtgctggaattacaagcgtgagccaccacacccagcttttgaagttttctaacaagtctgcaatgcctctgctgtgctagcaccatgcacatcctcaaggcagaatgaaaagacactgtctctcttctcacaaaataaacttttatatggattcctttgtggcctcataggaagttttaaaactcctgcggggaatagatgatccaaatcaatagcattccttcagttcctgggagtgtttaatgacacaatacaggaggaccagatatcttcctgatgcggacgcccacaaacccaaggcagcctgaactattcaggccaggggaagtgggggcctcatggtctcattcggggtgagcaattgctatgagttggccaagttcccaggatgctggggaaccacacagggtataatggtggttggcagctcctgtactctctttactgctctggaccctgtaactgttgcaaatacacagatcacacgcaccgcctcggtcaaggaccagagtgggctcctctaatgtatgtggccttctgcgttccctggctcagcttccctgggtcagatctccccagaatggttgcttggtttttacttggctttataaggtatgtcacaggggattttatagaaaccaaaattctattaatttgtccttttctttttcctggctataagtgttgtctctattataaataatgattactaagaatttgttagtgacactgaaaatgcgcacactctatgttaagggaaataaccctgatgtaaacttggaagttgtatgtacagtgttgggagaattgagtgaaaaataatgactgcaaacaaattagatagcgtaataccagacacatacggtttaataaagaccaactcttattatcttaccatttcctagccataaacattcttccatatttgaattggctgttgctgctattaattctggctaagacacgtttcacatcckcctgtggttataatgatgccagcgcctcacccatagtgttaacgcatttcttgctggccccgcaagggaagagacagaggctcagcctgggataaactgtgtacatcgtggaaagtagcgtaaattaaaggccagctaaaggtggattagtgcttgtgttttgccttcctcgtagcatctcagcgttaagagtaagacatgcggtaaacagcgcttcttcaaatcataagaagcaacgatgtcacagaaaaattcattgacttggtggagggagaaaagagctcatactgttacaggaatcattttttttctcttatggag

SEQ ID NO: 725533 - DNA, 1358 bp, Homo sapiens
ttggccaggctggtcttgaactcctgacctcaggtgatccgcccacctcggcctcctaaagtgctggaattacaagcgtgagccaccacacccagcttttgaagttttctaacaagtctgcaatgcctctgctgtgctagcaccatgcacatcctcaaggcagaatgaaaagacactgtctctcttctcacaaaataaacttttatatggattcctttgtggcctcataggaagttttaaaactcctgcggggaatagatgatccaaatcaatagcattccttcagttcctgggagtgtttaatgacacaatacaggaggaccagatatcttcctgatgcggacgcccacaaacccaaggcagcctgaactattcaggccaggggaagtgggggcctcatggtctcattcggggtgagcaattgctatgagttggccaagttcccaggatgctggggaaccacacagggtataatggtggttggcagctcctgtactctctttactgctctggaccctgtaactgttgcaaatacacagatcacacgcaccgcctcggtcaaggaccagagtgggctcctctaatgtatgtggccttctgcgttccctggctcagcttccctgggtcagatctccccagaatggttgcttggtttttacttggctttataaggtatgtcacaggggattttatagaaaccaaaattctattaatttgtccttttctttttcctggctataagtgttgtctctattataaataatgattactaagaatttgttagtgacactgaaaatgcgcacactctatgttaagggaaataaccctgatgtaaacttggaagttgtatgtacagtgttgggagaattgagtgaaaaataatgactgcaaacaaattagatagcgtaataccagacacatacggtttaataaagaccaactcttattatcttaccatttcctagccataaacattcttccatatttgaattggctgttgctgctattaattctggctaagacacgtttcacatcctcctgtggttataatgatgccagcgcctcacccatagtgttaacgcatttcttgctggccccgcaagggaagagacagaggctcagcctgggataaactgtgtacatcgtggaaagtagcgtaaattaaaggccagctaaaggtggattagtgcttgtgttttgccttcctcgtagcatctcagcgttaagagtaagacatgcrgtaaacagcgcttcttcaaatcataagaagcaacgatgtcacagaaaaattcattgacttggtggagggagaaaagagctcatactgttacaggaatcattttttttctcttatggag

SEQ ID NO: 725534 - DNA, 841 bp, Homo sapiens
tgtcaaaatgaacatactccactataaaaacacatagatacacctcatctacccatgaatttcaagtagggataagttcttaaatgattgaaattcacccatccaactttctcaccatccatctctggcactgttgcacaggacctgtgaaagccatatcataccagtataatggtacaggtgaatttcctttaccattccctatcttttaagatttgatataaatgtgtacaggccatagtagcacatgggatataagcttgtggaaggatgtacaggggcaagctctttgtggctttcatgtttgaggatcccacaatgcctctgctggtgctctgaactaacatagcacctgtgcctacagtgtgcagccttcgcccagggtaggccaggcccttctcagtcttgcacctcctccaggttatccctgccaccctcctccgtcatgtgtcctccatcacctggggcaacatccctggaccagaggcctttcttgaagagcccactgtgcaacttttgtaacaaaaatgtatacagcacagcatttcctaagaaggagaaatagaaccaagatcctataatttgagggacaaaagagctagagaagctccaggtgccaattaatggtgacacattaggaaacactcagaggtgagaaaatatcagccaggcagtcaagagtacactgttcactaacaaacatccaycaaattgcagaggctatggcggcacacatttccgtctccctcgtgttacaggtctgtctggggtttggttctgctcaacattctgttcaatttatgagcaagtctgatggagtcactatctgggacactgccag

SEQ ID NO: 725535 - DNA, 1062 bp, Homo sapiens
agaactcaagtgtttttaattaattttattgtttttcaatttacgtgttggttaacccaataaaagtgttttcatttttaaaattaaccttctgtttttaatttttttcaagtccagagccaagtttgttttgttttgttttttacttgaacagctggcattttgtaaactattgacaagataatcgtttgcaaaggaatccatttctgtatgtctcacaacatcagacacacagatgcatctttgaataacactactgaactagacttcatagttccttatacaatgacttcacaattactcgtggacaaaaacaaatttatttttggaatagtactgacattttcagctttattggcatttaaaaatggaaccaaagcaattgagtgtaagtcagaggcagactcaagatgagaaactgcacttcctgactcaaaactgaggccatgcatctattcccaagggcagacacaaaggtttgagctctctgaatagatcagccagcagcttatggatagaatatattaaacaaaaggcccaataatatgactgcagcgtttgaaggcccccwaaatgagcaattgagctcattttggcatcagctactttataagaaaagaaactgtgagaaaagggagatctaaaactgttctttcactggagacctattatcagttgcacacacagttattgaagttgctcttacatgctacacctgcagcattgtgtgagataattattttattctttgcgcattagaacaaacagacctcccagagagtaatgtgcgttcttatttttttaatggatttatggactcaaagtattgaataccaaattttctgtgggttactgaaaaggcacagagggattctacaacaaattggttgtcagagtccaggcgcctgtatccaaggaaatggacttaatttaatccaggtgactggctattcaacaaaatcttttcttaatgaatggtaccttgacctctacttgtggagtctctttcatgatctacatttcttgcatctaactagtcttattttcccacacgactctcca

SEQ ID NO: 725536 - DNA, 1865 bp, Homo sapiens
  misc_feature 943, 944, 945, 946, 947, 948, 949, 950, 951, 952, 953, 954,955, 956, 957, 958, 959, 960, 961, 962, 963, 964, 965, 966,967, 968, 969, 970, 971, 972, 973, 974, 975, 976, 977, 978,979, 980, 981, 982, 983, 984, 985, 986, 987, 988, 989: n = A,T,C or G
  misc_feature 990, 991, 992, 993, 994, 995, 996, 997, 998, 999, 1000, 1001,1002, 1003, 1004, 1005, 1006, 1007, 1008, 1009, 1010, 1011,1012, 1013, 1014, 1015, 1016, 1017, 1018, 1019, 1020, 1021,1022, 1023, 1024, 1025, 1026, 1027, 1028, 1029, 1030: n = A,T,C or G
  misc_feature 1031, 1032, 1033, 1034, 1035, 1036, 1037, 1038, 1039, 1040,1041, 1042: n = A,T,C or G
taagctatgcatagttacacaggcagcctttgaattgaggtactcctaattcctagagactgtgctcttcatcaaccagccttgcatgtatcagtactacccgacgctttccagccactatcaaaaaaagttgtttcatggtctgtgacacaaaggagaaggaaagaaaagaaatttaacaaagtattacatatttcaaaacataaatgttcaggcatgtctacactagacaaaaatcaaagcagtcacatgtgcacatccatatatgggatcaacatgtgtcctcaggcacgcatatcatactgggtagcccattctttcatcttcctaagctgagctcactaatcctcccccaataagattaaaaatgaatggactgtcttgatgcagcttcaactatcatctccaaacaaaaaatgctcacaaacatatccctctctaaatgacgtctcagctacttttaccgactagaaaataatgacttagatgtcctggcaacaccttcaattcaacatatgaaaagcaccttactctacaaacagccyttccttccaaccattccaatttctattaatggatcctggttacagggttagtctgtatgacactttccattatgtctgtttcccttatgagcggggtaaacatttatcacacaaacgagaacctttatttttctttgagatggagtcttgctctgttgcccaggctggaatgcagtggcgcgatctcggctcactgcaagctccgcctcctgggttcacgccattctcctgcctcagccttttgagtagctgggactacaggtgcccgccaccacgcccggctaattttttgtatttttagtagagatggggtttcactgtgttagccaggatggtcttgatctcttgacctcgtgatccacccacctcggcctcccaaagtgttgggattacaggcnnnnnnnnnnnnnnnnnnnnnnnnnnnnnnnnnnnnnnnnnnnnnnnnnnnnnnnnnnnnnnnnnnnnnnnnnnnnnnnnnnnnnnnnnnnnnnnnnnnnggcaacatacagagaccctatctctgcaaaaaaaataacaaattagccaggcatggtggtgcacacctatagtcctagctactccagaggctgaggtgagagaatcacttaagcccaggagtttgaggctaaagtgagccattatcgtaccactgcactccagcctgggcaacagggcaagaccttgtctcaagtaaataaggaataaaagggggtcctttttaagaattaagcataggctgggcacggaggttcacacctgtaatcccagcactttgggaggccaaggcgggcagaacacttgaggtcaggagtttaagaccagcctggccaacacggtgaagcctcgtccctactgaaaaaaatatatatatatacaaaaattagctaggggtgatggtgtatgcttgtagtcccagctacttgggaggctgaggcaagagaatcacttgaacacaggaggcggaggttgcagcgagctgagatcccgccactgcactccagcctgggcaacagagtgagactctgtctcaaaaaaaaaaaaccagaattaagtgcagacaaaaggcataaattgagatgtctgatcaccctacttatgaagagcacacataatatggaaaaaattctcaagtagaagcaaggaaacctgagttctattcctggctctgctgctaactattaatagcttcctgtctttaaccaattttctggcctttagtgctctcatacatatactgagaaaactaggactggcgtctaaggccccttatagcctctagtgcatatatatctgaaagcaggatcaactcacacaaaaggg

SEQ ID NO: 725537 - DNA, 1865 bp, Homo sapiens
  misc_feature 943, 944, 945, 946, 947, 948, 949, 950, 951, 952, 953, 954,955, 956, 957, 958, 959, 960, 961, 962, 963, 964, 965, 966,967, 968, 969, 970, 971, 972, 973, 974, 975, 976, 977, 978,979, 980, 981, 982, 983, 984, 985, 986, 987, 988, 989: n = A,T,C or G
  misc_feature 990, 991, 992, 993, 994, 995, 996, 997, 998, 999, 1000, 1001,1002, 1003, 1004, 1005, 1006, 1007, 1008, 1009, 1010, 1011,1012, 1013, 1014, 1015, 1016, 1017, 1018, 1019, 1020, 1021,1022, 1023, 1024, 1025, 1026, 1027, 1028, 1029, 1030: n = A,T,C or G
  misc_feature 1031, 1032, 1033, 1034, 1035, 1036, 1037, 1038, 1039, 1040,1041, 1042: n = A,T,C or G
taagctatgcatagttacacaggcagcctttgaattgaggtactcctaattcctagagactgtgctcttcatcaaccagccttgcatgtatcagtactacccgacgctttccagccactatcaaaaaaagttgtttcatggtctgtgacacaaaggagaaggaaagaaaagaaatttaacaaagtattacatatttcaaaacataaatgttcaggcatgtctacactagacaaaaatcaaagcagtcacatgtgcacatccatatatgggatcaacatgtgtcctcaggcacgcatatcatactgggtagcccattctttcatcttcctaagctgagctcactaatcctcccccaataagattaaaaatgaatggactgtcttgatgcagcttcaactatcatctccaaacaaaaaatgctcacaaacatatccctctctaaatgacgtctcagctacttttaccgactagaaaataatgacttagatgtcctggcaacaccttcaattcaacatatgaaaagcaccttactctacaaacagcccttccttccaaccattccaatttctattaatggatcctggttacagggttagtctgtatgacactttccattatgyctgtttcccttatgagcggggtaaacatttatcacacaaacgagaacctttatttttctttgagatggagtcttgctctgttgcccaggctggaatgcagtggcgcgatctcggctcactgcaagctccgcctcctgggttcacgccattctcctgcctcagccttttgagtagctgggactacaggtgcccgccaccacgcccggctaattttttgtatttttagtagagatggggtttcactgtgttagccaggatggtcttgatctcttgacctcgtgatccacccacctcggcctcccaaagtgttgggattacaggcnnnnnnnnnnnnnnnnnnnnnnnnnnnnnnnnnnnnnnnnnnnnnnnnnnnnnnnnnnnnnnnnnnnnnnnnnnnnnnnnnnnnnnnnnnnnnnnnnnnnggcaacatacagagaccctatctctgcaaaaaaaataacaaattagccaggcatggtggtgcacacctatagtcctagctactccagaggctgaggtgagagaatcacttaagcccaggagtttgaggctaaagtgagccattatcgtaccactgcactccagcctgggcaacagggcaagaccttgtctcaagtaaataaggaataaaagggggtcctttttaagaattaagcataggctgggcacggaggttcacacctgtaatcccagcactttgggaggccaaggcgggcagaacacttgaggtcaggagtttaagaccagcctggccaacacggtgaagcctcgtccctactgaaaaaaatatatatatatacaaaaattagctaggggtgatggtgtatgcttgtagtcccagctacttgggaggctgaggcaagagaatcacttgaacacaggaggcggaggttgcagcgagctgagatcccgccactgcactccagcctgggcaacagagtgagactctgtctcaaaaaaaaaaaaccagaattaagtgcagacaaaaggcataaattgagatgtctgatcaccctacttatgaagagcacacataatatggaaaaaattctcaagtagaagcaaggaaacctgagttctattcctggctctgctgctaactattaatagcttcctgtctttaaccaattttctggcctttagtgctctcatacatatactgagaaaactaggactggcgtctaaggccccttatagcctctagtgcatatatatctgaaagcaggatcaactcacacaaaaggg

SEQ ID NO: 725538 - DNA, 1481 bp, Homo sapiens
  misc_feature 520, 521, 522, 523, 524, 525, 526, 527, 528, 529, 530, 531,532, 533, 534, 535, 536, 537, 538, 539, 540, 541, 542, 543,544, 545, 546, 547, 548, 549, 550, 551, 552, 553, 554, 555,556, 557, 558, 559, 560, 561, 562, 563, 564, 565, 566: n = A,T,C or G
  misc_feature 567, 568, 569, 570, 571, 572, 573, 574, 575, 576, 577, 578,579, 580, 581, 582, 583, 584, 585, 586, 587, 588, 589, 590,591, 592, 593, 594, 595, 596, 597, 598, 599, 600, 601, 602,603, 604, 605, 606, 607, 608, 609, 610, 611, 612, 613: n = A,T,C or G
  misc_feature 614, 615, 616, 617, 618, 619: n = A,T,C or G
tttgtaaatcactgcaccaagttagaatgcaaatatggcttttgctagcaaattccttcagtgtgagtatgatgagcacttgctagtagcttaatatattttactcttctgcccttgtagagcataacatggtaactatgtggacctagtaacaataaagatacagtaaccataaagacacaataactaaataattgcagggcttgcttggcacccagaaatctaaacctaatactttctcttatttcttgacctaactttctagttctctatgtggttggcaasaaatcgaaaaagtccatgaaaggatgtaacatcctacaggaacatatgtagtgactgagtatagatcagcagtcctcacaattcagtgtgcatttgtatctgggccccatgaatttcaaatcagcagttctgggttgagggatgaggtatctgctctaataagcaccctagatgattctgatgtaggtgttgtttccaacatgctttgagacaatctgacttaaagattcaacannnnnnnnnnnnnnnnnnnnnnnnnnnnnnnnnnnnnnnnnnnnnnnnnnnnnnnnnnnnnnnnnnnnnnnnnnnnnnnnnnnnnnnnnnnnnnnnnnnnctatttcatgcatagttctcagtatcacttctagctttatttatactgttccacatgaagaggaaacaaccaaccccagatctgctaaaatgtgttcagggtctcacattgtctcctaggtactctatttgagtagaatgagaagtgcagtcattacatctgccacaaaaaagcacatgtcttccaaatgtacatataatgcatacatggatgtgacattggtatatctttagttttaatattttaaaaattatatatagatatgtaaattattcaaaggcagggagcatcccttctgctttgtaaagaatatttgcggtgagggttagcaaccccagctgatcatgacagactctatttaaatatccacagtttcaaagcctagcttctcccaaagattaaaaaaaaaaaaacccaaaccaaaacaaagcaaaagctattagaaaacaatattattttctatattaataaataaagaaaaacaatattaaagtagataatataaagtaaaacaatattatctaagagctgggcaacttgatgtatgtagggtttgcagctgtgtcattttaagccattcttgatattactaactgggtactacaagttaaactttaagtttaaactaaactacattatctgtctatcacctatctatctatttatctattaactattatcaatatctatctttaaagtaggataccttatatattgtaaccgtattctattatcaaagtagctggctctatagtattatatgtgttcagagggtttttttcctcctttcataaatcatttttgagtcttttctacgggatagagagaatcaagtgtaaggtgtattgaagattaagttaat

SEQ ID NO: 725539 - DNA, 1094 bp, Homo sapiens
cataaagaagaatgtgttggatgggaaatgagatcctatggtttacacatttctttcttaaaactctctgcttcagctggttatttcctcatcctctcactcctttcctgtggttgcttcacaggccacggcacatgttcctgtggtcgctgtgtttgtgagagaggatggtttggaaagctctgccaacatccgcggaagtgtaacatgacggaagaacaaagcaagaatctgtgtgaatcagcagatggcatattgtgctcggggaagggtgagtatctctgctggtgcctggactccattcctgttctgacacatgatttgtagaacagcatgtagcaactgtctttcccagactgaactttgcatgaaagcaaaccactatgtcctctgctgtccccaacttgaagcttgaagattaaccaaatgaagttttggatctaagaaaatgaaatgcgtgtgagaggattcatgcaaaaatatccttgtatgcaaagttattgctgaatgaaatagaattaatacttttatcaagaaattaggacaacaaaatataccagatactaaatggacccaaaaatggggaaaaaaggcaaaagaatgattattgggctcacctctgaaacaacacagctcagaactacagaaaagtaatcacaagcatctgagctgcccaaagatatgactttgggaacttctggggctaaattatttagctgtatgtggagcaggggaagattgaaggtgtgagaagacataaaaggagacaaaatatttaatttagtttaatttttytaaaaaggaaagaaaagctatgggggaggggtagtatcccacaagtctgatggaattttctttgccctaaaaatcaccaattgttccaagtaaacatgtgcagcctgatataagaaaataggtaattgttcggttgggcaccgtggcccatgcctgtaattctagcactttgggaggccaaggcgggtggatcacttgaggtcaggagttctagaccagcctggccaacgtggtgaaaaatacaaaaatctactctattaaaaaaaacacaaaaaaattagccaggcattgtggctcac

SEQ ID NO: 725540 - DNA, 669 bp, Homo sapiens
ctgtttgatgatgttaaccagacccttcttcccgaaatctcacttcctaggacttctctgacactgctttctctctgagatgtcccctaattctttgaatttttacttacattattttaatctcattccttaaatgttagtgttcctgagggttttgtcttggtattctcatttagcatcacacaactgcatcctacaccaygctgactgcatctgaatttccagagaaaccttgcttcctgaactcaatatgtgtatttctttaaaaatagatatgtttgttatgttattgtaaaagcagtacacattcattgcagaaaacaaaaaaagtgaaagaaaatagtaaaaatcacccataatcataccacatggataattactgttaatattttgtagtatatctttgttttacaaaaaaacagggattacatggcatcttcttttcataatctgaatttttcacttaaaatatataacatattctttcatagtattaaatatagatattcatcttaatttttgctggttaccttgctcatactgtcttttattaaataataagctagtattgattatattttatctagcttatcattgtataaacaacattgtgatgaataagcttgaggcagtctttgtgtataatcatggctagttagtttgttaaaa

SEQ ID NO: 725541 - DNA, 669 bp, Homo sapiens
ctgtttgatgatgttaaccagacccttcttcccgaaatctcacttcctaggacttctctgacactgctttctctctgagatgtcccctaattctttgaatttttacttacattattttaatctcattccttaaatgttagtgttcctgagggttttgtcttggtattctcatttagcatcacacaactgcatcctacaccacgctgactgcatctgaatttccagagaaaccttgcttcctgaactcaatatgtgtatttctttaaaaatagatatgtttgttatgttattgtaaaagcagtacacattcattgcagaaaacaaaaaaagtgaaagaaaatagtaaaaatcacccataatcataccacatggataattactgttaatattttgtagtatatctttgttttacaaaaaaacagggattacatggcatcttcttttcataatctgaatttttcacttaaaatatataacatattctttcatagtattaaatatagatattcatcttaatttttgctggttaccttgctcatactgwcttttattaaataataagctagtattgattatattttatctagcttatcattgtataaacaacattgtgatgaataagcttgaggcagtctttgtgtataatcatggctagttagtttgttaaaa

SEQ ID NO: 725542 - DNA, 2393 bp, Homo sapiens
ggtctcactttatcacccaggctggagattagtgacataatcacagctcactgcaaccctgaactgctggcctcaagcaatcctcccaattgagcctcccaagtagctgtgactccaggctcatgccaccatgcctggctaattttttttttgagagccatagtcttactatgctgcccaggctgtgctggaattcctgagctcaagcaatcctcagcctcccaaagactgggactccaggcaagaaccaccatgcccagctgtgtggggacttttaaacttactcatatctcttttaaacttactcatatcataccacacatatttccttttttttttttttttttttttgagatggagtcttgctctgtcgcccaggctggagtgcagtgacgcaatctaggctcattgcaagctctgcctcccaggttcacgcctccacaccccgttaattttttttttttttttttttggtatttttagtagagatggggkttcaccgtgctagccaggatagtcttgatctcctgacctcgtgatccgcccaccttggcctcccaaagtgctgggattacaggcgtgagccaccgtgtccggcctaccacaaatatttctatacagttggcttctgttgatcttctagcaagttattaattgaaacagaaaaagcaaaagaaggtgggagaaaggcagacagaattacaataagaaacacaggacaatagaattgcaaaggccttaatctacttctttatttgtaagttactctagggctgcgaaatgtcattgagacatcattatggcagtcaatattcattatattgataaatacaaaattagaaatcaatatccaaatgttcagctgatggaatgagagataaatgtcaggtggatactgatttcaaaaattataggctttatacatctgtcttaatatatcaaaatttagtttgattgtgttttcactaatagaaccctgaaaagtcaatacaacattagattatttccaaacttgtgacatgcctccaaacttttcatcgagtacataatcactctgaaaataatattgctagacaaacgcatcttctctctaggtcaactatgtctttccaaacctacctttaacctgattcttctctgtttcaatgataaaacattaatttattttatatattttgtaaatttaataattgttaccttatttgtttcaactaagtgtgagtatgacaatcgtaactaatgctccccagaaaagactttaaaaggggaagaaaagaggttctgaccttggcaaagctccagtcaggattcctagagaacaggaggcttgagctaaattcgaagaatgcacagcagggaacttgttgaaggaaagggaggcagagaagagagcatagaagtgggtcttgggacacaggggcttgtggtcagcagattgggagtggaaggttgagcaatgatgtctttctagaggcattcccctgtctgaaccaggggaatgacattctgaaaagacctctctggcttcccttaggcaatcttatcaaggaagctcatatgcacgtgcttccaaagaagtccaatatagatgcagcaaacagcactaacataaaattagtcaagtgcttagaggaggcattccactactctctttcctaaattcaccgagaattggtctttacgtagcaagaaaggctccatcgactctcttccacacttcatttccctgcaggcaggaactgtacttgcagattcattgctgtattctcaggccctgaaagccatagctcacattctgtagcttttctcactgaccgggtactcaaatattcatattttaatattctaaatggagattattcaagacttgtttctataatctctactttgtagattgtctatatgaactgggcagagttttcgttacagatcaacacacctgtaaacatacaggcgggaccagtcttgaccaaatggcattggaaagtctcccttccaagcactacataccaactgcctaagagtgtctcagtgtatgttcaacaacagataaatctattttgcaaataatcctctcataattattttttccctatagaaatgcatataacccactttaaaatatttttatgatacataaaatgctaaaaatgagccctgagaaaactatgcaaatataatcatttatttttagatcaaaatggatgcaatctatattaaggggctagttactaaggttacaatgaatgagtaaatcaagtaaaacagtattcagtcttaacaagtatggaaaacatgctcagcaacatatatctctacagagagagctataatgacacattttttccccaagaactacatgtctgcccatctaagcatattttttctttttc

SEQ ID NO: 725543 - DNA, 2393 bp, Homo sapiens
ggtctcactttatcacccaggctggagattagtgacataatcacagctcactgcaaccctgaactgctggcctcaagcaatcctcccaattgagcctcccaagtagctgtgactccaggctcatgccaccatgcctggctaattttttttttgagagccatagtcttactatgctgcccaggctgtgctggaattcctgagctcaagcaatcctcagcctcccaaagactgggactccaggcaagaaccaccatgcccagctgtgtggggacttttaaacttactcatatctcttttaaacttactcatatcataccacacatatttccttttttttttttttttttttttgagatggagtcttgctctgtcgcccaggctggagtgcagtgacgcaatctaggctcattgcaagctctgcctcccaggttcacgcctccacaccccgttaattttttttttttttttttttggtatttttagtagagatggggtttcaccgtgctagccaggatagtcttgatctcctgacctcgtgatccgcccaccttggcctcccaaagtgctgggattacaggcgtgagccaccgtgtccggcctaccacaaatatttctatacagttggcttctgttgatcttctagcaagttattaattgaaacagaaaaagcaaaagaaggtgggagaaaggcagacagaattacaataagaaacacaggacaatagaattgcaaaggccttaatctacttctttatttgtaagttactctagggctgcgaaatgtcattgagacatcattatggcagtcaatattcattatattgataaatacaaaattagaaatcaatatccaaatgttcagctgatggaatgagagataaatgtcaggtggatactgatttcaaaaattataggctttatacatctgtcttaatatatcaaaatttagtttgmttgtgttttcactaatagaaccctgaaaagtcaatacaacattagattatttccaaacttgtgacatgcctccaaacttttcatcgagtacataatcactctgaaaataatattgctagacaaacgcatcttctctctaggtcaactatgtctttccaaacctacctttaacctgattcttctctgtttcaatgataaaacattaatttattttatatattttgtaaatttaataattgttaccttatttgtttcaactaagtgtgagtatgacaatcgtaactaatgctccccagaaaagactttaaaaggggaagaaaagaggttctgaccttggcaaagctccagtcaggattcctagagaacaggaggcttgagctaaattcgaagaatgcacagcagggaacttgttgaaggaaagggaggcagagaagagagcatagaagtgggtcttgggacacaggggcttgtggtcagcagattgggagtggaaggttgagcaatgatgtctttctagaggcattcccctgtctgaaccaggggaatgacattctgaaaagacctctctggcttcccttaggcaatcttatcaaggaagctcatatgcacgtgcttccaaagaagtccaatatagatgcagcaaacagcactaacataaaattagtcaagtgcttagaggaggcattccactactctctttcctaaattcaccgagaattggtctttacgtagcaagaaaggctccatcgactctcttccacacttcatttccctgcaggcaggaactgtacttgcagattcattgctgtattctcaggccctgaaagccatagctcacattctgtagcttttctcactgaccgggtactcaaatattcatattttaatattctaaatggagattattcaagacttgtttctataatctctactttgtagattgtctatatgaactgggcagagttttcgttacagatcaacacacctgtaaacatacaggcgggaccagtcttgaccaaatggcattggaaagtctcccttccaagcactacataccaactgcctaagagtgtctcagtgtatgttcaacaacagataaatctattttgcaaataatcctctcataattattttttccctatagaaatgcatataacccactttaaaatatttttatgatacataaaatgctaaaaatgagccctgagaaaactatgcaaatataatcatttatttttagatcaaaatggatgcaatctatattaaggggctagttactaaggttacaatgaatgagtaaatcaagtaaaacagtattcagtcttaacaagtatggaaaacatgctcagcaacatatatctctacagagagagctataatgacacattttttccccaagaactacatgtctgcccatctaagcatattttttctttttc

SEQ ID NO: 725544 - DNA, 711 bp, Homo sapiens
cttgctatgcaccagttacttctcagtcactaaggatatgtaattataagttatgccctcaggcagctttttgtctaacaataaccatttttcttttctgagatggagtctcactctgtcacccaggctggagtgcagtagcgcaatctcggctcactgcaagctctgcctcccgggttcatgccattctcctgcctcagcctcccgagtagctgggactgcaggcgcccgccaccaggcccggctaatttttttgtatttttagtagagacggggtttcaccatgttagccaggatggtctcgatctcctgacttcgtgatccgcccacctcggcctcccaaagtgctgggattacagacgtgagccaccgtgcccggcctgagccaccatgccyggccaccatttttcaattgacctattttctttttgtaaattggcagataaatctgtatatatttacagtgtacaatatgtttgtaaaatgactaaatctagctaattaacatatgctttaacttgcagtcatcatttttgtggtgagaacactttacattcactctcttggcatttttcaagaatataaatatattattaacatagtcaccatagttttacaatagatctcaaaagatcttttgtcataaaaataagtattattataaaagtttatcatacacctcattactctcagtaattgatcaaagagtat

SEQ ID NO: 725545 - DNA, 644 bp, Homo sapiens
tgtttctagaaataattattcaaccttaggtcaaataatttagatgactgttaaatcttcaggaagcttttaagaagcagattctttttaactgggaaatggttttgccacttatatttcatagggttttaatttgtttttaaaaatcacttcagaaatcaatatagtttgcaacaaagctattatatttatttgaattagtttcataatctctaacattattcgtgataatatgacttaatctataaaattatcaaaatccaaataaatttggttggactgctgtggatccttggtcaaaaggmataagtgatttccctaacctggccaaatactctcagaaagaatatatcagatgagaataggcaattttatggtggtatgctcatagactaagaaaaaagaaagaagactcaaacaaaaccagatatgacaaaggagacattttaacagataccacagaaatttaaaggatcattagagactgctatgaacaaagatacaccaataagttggaaagtctaaaagaaacagaaaaattcctagacacacataacctgacacgactgtaccaggaagaaatagaaaacctgaagagactgataacaagtaacaagatagatgcaataataaaaagtcttcca

SEQ ID NO: 725546 - DNA, 931 bp, Homo sapiens
cctgtaaacaggagaactaggtaagcacaaaaaaaaaaaaaagaacaccacacacaataggaagggggaaactacaatgcctggaccaagcgctgtgtaggcaatttattaacaacttgcacttttaaaagaggtttgatagaaggagaggaagtggagtgtttcaatttggtttggtcgggatttatcatgaggttcaaggcctcagagttagattcagaatttagctctccctttgtcgtccatcacagttaacataattctttttaaggaattcttaacattataactctaattatatgtcttattcccttactcaacaatccccaagaaaattcttggagaagaaasattgttacttattcaatgttagttccataacaaggtgcttttgctgagtgaagaatttgggagccacttaaaacttccaatggaagggatgctcccagaatagcaatacaggaggaaaagtttctcagtgatgtgagcatgtattagatcagtgttctcaaaaatgtggcctggaggccgggcacggtggctcacgcctgtaatcccagcactttgggaggccaaggcaggtggatcatgaggtcaggagatcaagaccagcctggccaacatggtgaaactccgtctctactaaaaatacaaaaattatccggacgtggtggcgtgtgcctgtaatcccagctactcaggaggctgaggcaggagaattgcttgaaccagggagttggaggttgcagtgagctgagatcgtgccacagcactccagcctggcaacggagtgagactccatctcaaaaaaaaaaaaaaaaaaaaaaaagtgtcgcctggaaaggcctagggatctctgagaccctttgggctggggggatagtggggtgcctgagatcaaaacgattttcctaataatactgagacatat

SEQ ID NO: 725547 - DNA, 806 bp, Homo sapiens
cttctttggagaatataatctatttctagagtatagttgagaaaaggttagactagctagtggtttgggaataatgtctatgcttcatagttatttggctatgtaacttataaactaatggaaactgttcagttgtcacattctggcatatccaggtagtgatttgtaatatttcagttgcttttatatttaatatttattttaagtatcacgtaaagtatggtcagtcaggaaatctcaccctcacattatgcatgaagatgctgatgctcagagaagtgtagatatcttaaagtatagatatcacccagttatttaatggcagctttgggactagaacacagcttctctaatgcctagatcttttcatcagaacttataacacctacaatttgtagcatcctcaacaaatgaggatttattgagtaattttcatagtggaggaacagaggtggataatgagcttataaagatgaatatgaccatagtctccacctttatggaatgtatggtcaaatggaaaagataaacacataaatgcaaatgttctaaagagtgggacagttacagagataaaagtaggcaaagatactgtttgagcacagagagaactacttggttcattttgggtttagggatgacttttttgggaaaaaatatttattttaatttttaawttttttaataatacactttaagttctagggtacatgtgcacaatgcgcaggcttgttacatatgtatacatgtgccatgatggtgtgctgcacccattaactcatgatttacattaggtacctctccta

SEQ ID NO: 725548 - DNA, 602 bp, Homo sapiens
catagttaattgaacttccttagataaatgtgtgtggagaaatatggttggggtgctccaaaaaaatagaaatgcatccttttaaaattctaaataaaaatataattactaagtaattcctcttgattagcacctctgttctcataataagctaggagtctgtgataatgttataagaatgacacttagtraaaagttcaagtgatatgccacaagtataagcagtacaatccggatctctttaattaagtatgtttagcagcaggtgggaggttatttttctccatagaaataaagtgaaaacctttcctgatgataaactgattgttttctcaatagcatatccgaaatagaaaccttacctatgaggtcctaatatctaatgttttattcttctgtgtatcctgttgaataagttactcataaataatttacctttaataagattagtggattcttcttttgtattatgccaaagagttattcatagacaacaaataccctcacaccactgagagtaaatggctatttaagctgagtttgtgtgtgtgtgtgtgtgtgtgttttctccaactccaagtaaccgaattggattaacattg

SEQ ID NO: 725549 - DNA, 1059 bp, Homo sapiens
gggagagctggttgatatttgggcaaagttctactcacctcccaacttggaataggttctggctcaaaactgattccccggcaagaccagaaatcgcctgagtgagtctggccctgctcccaggaattttggttgggcagattctcaggaggccaaggtgttcctgaggataactcgggcagctccctgctggccaggatgcattctgaaatcgtgatctggaatcatgccctgtcagtcctggagaaaacccaaagccatagattggctttagaacgagtccaacagcagggatggctgaggtcaagggcaggccctgcaaggcctttttatactcagaggaagttcctgctttccttcagcccagagcttggccaggggcaggaaagtttagataagctgagatctgtcactgccagatctgcttaagctgagggcttcagttcatgtcccatggcttgtgcctccagcatgcccaagacaatggataacaacaatattcattaccaygtactgaactgcttctctgccaggcactgggctggtttaattacaaaacatcactgaaggtaaacgtgatggtacctttgttgttggtcttcccttctggactgtgagctctttgaggaggggcttaaaaaaaaaagatcttctctgctctaagcaaattgtctggcaataataatggcttaataaaaatttaataagctccagaaggttacataacttacccaggtttacacaactagccaataataaagttaagaatcaaatctagaccagaaatggtggctcatgcttataatctcagcactatgggaggctaaggcaggaggattgcttgaagtgagaagttggagaccagccctggcaacatagccagattctgtctctaaaaataaataaataaataaattagctgggcatagtggaacacacctgtagttccagctactcaggaggctgaggtgggaagattgcttgagctcaggagttgaagtctacagtcaactatgattgtgccactacactccagcctgcacaacagagtaagactcc

SEQ ID NO: 725550 - DNA, 1059 bp, Homo sapiens
gggagagctggttgatatttgggcaaagttctactcacctcccaacttggaataggttctggctcaaaactgattccccggcaagaccagaaatcgcctgagtgagtctggccctgctcccaggaattttggttgggcagattctcaggaggccaaggtgttcctgaggataactcgggcagctccctgctggccaggatgcattctgaaatcgtgatctggaatcatgccctgtcagtcctggagaaaacccaaagccatagattggctttagaacgagtccaacagcagggatggctgaggtcaagggcaggccctgcaaggcctttttatactcagaggaagttcctgctttccttcagcccagagcttggccaggggcaggaaagtttagataagctgagatctgtcactgccagatctgcttaagctgagggcttcagttcatgtcccatggcttgtgcctccagcatgcccaagacaatggataacaacaatattcattaccatgtactgaactgcttctctgccaggcactgggctggtttaattacaaaacatcactgaaggtaaacgtgatggtacctttgttgttkgtcttcccttctggactgtgagctctttgaggaggggcttaaaaaaaaaagatcttctctgctctaagcaaattgtctggcaataataatggcttaataaaaatttaataagctccagaaggttacataacttacccaggtttacacaactagccaataataaagttaagaatcaaatctagaccagaaatggtggctcatgcttataatctcagcactatgggaggctaaggcaggaggattgcttgaagtgagaagttggagaccagccctggcaacatagccagattctgtctctaaaaataaataaataaataaattagctgggcatagtggaacacacctgtagttccagctactcaggaggctgaggtgggaagattgcttgagctcaggagttgaagtctacagtcaactatgattgtgccactacactccagcctgcacaacagagtaagactcc

SEQ ID NO: 725551 - DNA, 605 bp, Homo sapiens
ttactcattaaggatgatgtttgctgttagcagtaggttttttcatagaggtctttttatcaggttgaggaaatttccttgtattcctaatttactaagagtttaatctggaatgggtatttgagttttatcaaatgcttttcctgcatctattgacataatcatatggtttttctttttcagtctgttactttagagaattacattgatcgatttttgactattaaaccaaccttgtattgctgtggtaaaccccacttrgttatgatgaattaattatcttttttgtatattgttggatttgatttgttaaaattgtgtttagaatttctgcatctgtgtttgtaatggggaatattgatccatatttttcttttcctgtaaagtttttgtctggttttggtatcagcataatgctgccctcacaaaatgagttgagaagtattccttccttttcaattttcaagaagagtttgtatagaattagtgtgagtctttcttaaatatttggtagatatcaccagtagagccacctaggtctggagttttctctgtggaaagttttttttttttttcttttaaatagagtttatttttaagaacag

SEQ ID NO: 725552 - DNA, 616 bp, Homo sapiens
ttgcctaggctggagtgcggtggctattcacaggcgcaatcccacaactaatcaacactggagttttgacctgctccatttccaacctgggctggttcatccctccttagacaacctggtggtccccccatcctgggaggttgctgtattgatgccgaacttagtgcagacacccaaatgacatagtacactacaacacagaactcttggactcaagtgatcctcctgtctcagccccccgagtaggtgggactacaggctcatgctaccgcgcctggctataagtcagttttttttgacagcaaagacatagtcctgtacagaatcaaagctcttggaggcctttgctaacttttaccttactctctctcttcagaggggattggtggcagaaggaccaaaccctggaaaattctgattacagtaacggtgggtgaagcaggaaataaaggaagccctccttcactgctgctaggartataaattgctacaagcatttttgagaacaatttggaaaatagtaaagcagaagatatgcatacctcacctgttcaccaaatcctctcttgtaaaccatgtgacctggagacatttttgccacatgcacaaattacat

SEQ ID NO: 725553 - DNA, 1332 bp, Homo sapiens
ggacttgaagtcaagcaattgggctccagagccctcactcttttttctttctttcttttttttttttttaagacatggtcacactctgtcacccaggctacagtgcagtggtgcagtctcagctcactgtagcctctgcctcccaggttcacgtaattcttgtgcctcagcctctggagtatctggtattacaggcatgtgccaccatgcccagctaatttttatatttttagtaaagacgacttttcaccatgttggccaggctggtcttgaactcctgacctcaagtgattcacctgccttggcctcccaaagtgctggacttgtaggtatgagccaccgtacctggcccagggccctcacccttaaacctatcctctacagggctacctaggtttgggagagacataagaaatatagtatgaatgagaaaatgatatttgaatatcttatatgaattaaaatgatatttagataatttgaaataattacaagctcacgtaactagtttgtggcaaaatagagactagaattcaggtctcctaacgtgtcaatgtgagactggggacagaggctgggaatgtggctctagtgtgtggctgtgttggtatgaagccttgttgaaggtctgaaagaccttagaaccattccctccctctgccactttctagcttggtgaaccaggatagcttaggctccctgggatttgatgaacttgtcctagaacaaaaaggtcaaacaaaatgatctctaaggctttttccttctaaaattcagtgatacaaatttagtccctgccctccccaccaacacacacacacaggtttagtatccctaatctgacgaactgaaatcctcccaaatccaaaacttttggagtactgacatgacgccacaagtagaaaatttcgcagctgacctcatgtgacgggttgcagtcaaaatgctgtaaaaactttgtttcatgcacaaaattataaatattctataaaatcaccttcaggccatgtgtatgaggtgtatatgagtcaaatgaactttgtgtttggacttgggtcacatccacaaggtacctaattatgtataggcaaatattcccaaatctgaaacacttctggtcccaagcattttgaataayggattctcaatttgtatatctctgtgtgtgtatatatgtgtgtgtgtgtgtgtgtgtgtgtgtgtgtgtgtgtgtgtgtgtttattttggaactacctcccttaaggttttacctgtcatgagtcagtcatttatgtaaaagagaaacttaacttttctattggtgggaaattttatctaagaaataaagagta

SEQ ID NO: 725554 - DNA, 1188 bp, Homo sapiens
cagaagaagaaaaaggagcaaatgactctttgcctttgtcatgcaaagaagaaaagtaacatatagcagtgaaaccatctcatgaaatccagcctggcagtgccacaggtacggattcatccgtccttttattcattcattcaagaaatagctatttagggtccagcacgtgccaaatatatgtatcgatatatacaaatatatgtaattgcaattgctgcctatccaggagttggttgaattagcataggtcatgttactttgcagacgtggctcatttccttaaatctatcattattgtgtgcgaacagcatgttgaaagtattgagtgcttgagggtttgggttcattgccatacttttagattcattttaagaagtcccaaatatctcaaccctgataatgactcacttctagatgttgcaaagctcgttgcagtttgagtacagtgctggtctgtcccgtgcagaaccctagtgaatatcccaggccccrcagcatctttccagttcagcgtctgtgctgcttccctctgggaggggtatgaaatgggcatccacagaggtggcccactggccaggggaggacaaggcaaggaccctgccagtgggctgagttcctggagtttccccggccctccatgactgcacctgcccccagcaccccatccttcctggccccccaggtccttctgacggttgtcagggcatctagacaaagagctgggctggcactggagtggcctcagccctcggggagctttccctgcaatgtcactgggattgccatctgtctctcaccagggcatggagtcaggggctccgaggggctgccccagtgctgagcccatgccccagggctgcttacctccccgtacagtccctggtctgagctgcagcccctgcccatactgtgctggggcccgcacttcctactacctgcccttctcggcacgaataagcccaggggagcaggggacaggcagggcagcagcaccgggggtgcccaggctctcccctcctaggaagccagctcctaggctctggcctcccatgtatctggggccttggatcccctggggcctcccaggatggtggtcttgctaagggaagcagatacttcaggccagggtgcacgagagactgaggagaaaagagacattttccgaggaagtatgaaatgagatgg

SEQ ID NO: 725555 - DNA, 594 bp, Homo sapiens
cagatgaagatttgcatgaaggaggtttaatgctcaaactaagccctaaggctccatacctgtggaggaagtgaaagaagcccaactgggcacagaaggtggaacacaatgccagtcacacaaagacctcagtggatcctgggccatgaggagctctaagcacagatgacccttcagaaatgtctccaagtggggaaaggaatcatgctagtcactggatgtgggcttcccactccaccccatgagggcatgaccttaagtgagagagctctttggacacagggcatcctaagaggggcactcagcagccacattgggcaccaagactctcagcagctagaagaagaaggtatagtcccaaaggggaatctgggctgcacaccttagtatccattagaactggaagtaggctgaatcccaggcagggatcccctggagaacacaggtaatttttwaaaaaatcaagctatgtgtctgaggctatgtggtaagacatctcagttttctgctaggaaaagccaccaaaccagattggcttattcatgttgaaaagtctgagaatcacactcagatgttgttgataattctgcttgg

SEQ ID NO: 725556 - DNA, 1206 bp, Homo sapiens
ctttttctaaattacatggcttattgtatttgagttcctcctgcttttgacagctccatggcttccaattttgcttctgctgctttgattattattcctgattttgttgttgatgagacgtgtggttttcttcaattagctctgtcactcttacaaatgtgtgtgtctcgcaagtgtcctaattaaagtcaggaggaggaggggggaagattacaggcaattacaacagtgccatcctcctytctcaatgcgcttttctcatcattggggtgcattcttctgtatctccattttgtaagcacattgagcagcctctgtctttaaaatcccattaattttttcagaacgtgttatgcagctgtgtcagtgtgtcatatattagctctcaggaagcccaatagatttcatttagttttattaagtacagcctcctccctacccatttccaccatgctttgaattcatcctgagacagaaggctaccatcaccaccacatatggtcctgtaaagtctccccaaatctgtggccttgtgagttcagtctcctcttgtgtgggctcacattcagctcactccaattcaatactacaaatatttattgagcctatgtaatgtgccatgcattgtgctgggagccagaactacaaagacgaataactgcacagaggttaagatgatgtgggatagtgaaaagagtttggatttcagaggcagacaagacatagattcaaatgcctgctttgccacatgctagctttttggccttgggtaaatcacttagttggttttgtcatctgtaaaattatgttaataatacttaccttgcagggttgttgtgaagattggagataatgtatgcaaagtagctagcttggtgcctggtatagctcaataaatggtagctataattattatcatgaataagatatagtgtacttaaggaagtctactcaaagagagagaagagtaaattaacttttagaatatattgttatatgtataataatggaagtatgtaggagttaatgggatagactccctagaggctctccatgctctcttccacccacttctctgtctcctactactctacccccaacatactccagcctcctaacctctcgtcatcccgtctctttgcatttgctctgcttctttacctgaaagcccccttttcaggtccttacctggctggctctttctca

SEQ ID NO: 725557 - DNA, 1206 bp, Homo sapiens
ctttttctaaattacatggcttattgtatttgagttcctcctgcttttgacagctccatggcttccaattttgcttctgctgctttgattattattcctgattttgttgttgatgagacgtgtggttttcttcaattagctctgtcactcttacaaatgtgtgtgtctcgcaagtgtcctaattaaagtcaggaggaggaggggggaagattacaggcaattacaacagtgccatcctcctttctcaatgcgcttttctcatcattggggtgcattcttctgtatctccattttgtaagcacattgagcagcctctgtctttaaaatcccattaattttttcagaacgtgttatgcagctgtgtcagtgtgtcatatattagctctcaggaagcccaatagatttcatttagttttattaagtacagcctcctccctacccatttccaccatgctttgaattcatcctgagacagaaggctaccatcaccaccacatatggtcctgtaaagtctccccaaatctgtggccttgtgagttcagtctcctcttgtgtgggctcacattcagctcactccaattcratactacaaatatttattgagcctatgtaatgtgccatgcattgtgctgggagccagaactacaaagacgaataactgcacagaggttaagatgatgtgggatagtgaaaagagtttggatttcagaggcagacaagacatagattcaaatgcctgctttgccacatgctagctttttggccttgggtaaatcacttagttggttttgtcatctgtaaaattatgttaataatacttaccttgcagggttgttgtgaagattggagataatgtatgcaaagtagctagcttggtgcctggtatagctcaataaatggtagctataattattatcatgaataagatatagtgtacttaaggaagtctactcaaagagagagaagagtaaattaacttttagaatatattgttatatgtataataatggaagtatgtaggagttaatgggatagactccctagaggctctccatgctctcttccacccacttctctgtctcctactactctacccccaacatactccagcctcctaacctctcgtcatcccgtctctttgcatttgctctgcttctttacctgaaagcccccttttcaggtccttacctggctggctctttctca

SEQ ID NO: 725558 - DNA, 1206 bp, Homo sapiens
ctttttctaaattacatggcttattgtatttgagttcctcctgcttttgacagctccatggcttccaattttgcttctgctgctttgattattattcctgattttgttgttgatgagacgtgtggttttcttcaattagctctgtcactcttacaaatgtgtgtgtctcgcaagtgtcctaattaaagtcaggaggaggaggggggaagattacaggcaattacaacagtgccatcctcctttctcaatgcgcttttctcatcattggggtgcattcttctgtatctccattttgtaagcacattgagcagcctctgtctttaaaatcccattaattttttcagaacgtgttatgcagctgtgtcagtgtgtcatatattagctctcaggaagcccaatagatttcatttagttttattaagtacagcctcctccctacccatttccaccatgctttgaattcatcctgagacagaaggctaccatcaccaccacatatggtcctgtaaagtctccccaaatctgtggccttgtgagttcagtctcctcttgtgtgggctcacattcagctcactccaattcaatactacaaatatttattgagcctatgtaatgtgccatgcattgtgctgggagccagaactacaaagacgaataactgcacagaggttaagatgatgtgggatagtgaaaagagtttggatttcagaggcagacaagacatagattcaaatgcctgctttgccacatgctagctttttggccttgggtaaatcacttagttggttttgtcatctgtaaaattatgttaataatacttaccttgcagggttgttgtgaagattggagataatgtatgcaaagtagctagcttggtgcctggtatagctcaataaatggtagctataattattatcatgartaagatatagtgtacttaaggaagtctactcaaagagagagaagagtaaattaacttttagaatatattgttatatgtataataatggaagtatgtaggagttaatgggatagactccctagaggctctccatgctctcttccacccacttctctgtctcctactactctacccccaacatactccagcctcctaacctctcgtcatcccgtctctttgcatttgctctgcttctttacctgaaagcccccttttcaggtccttacctggctggctctttctca

SEQ ID NO: 725559 - DNA, 1838 bp, Homo sapiens
ggaaaatctgagtggctgtcagcactcaatattgctctgaatggccaygggtaatgatggcactgataggaagttctgctcagctgaacctttgaagcacagatgttcctctaagatgttgctgaagctggcaaacctctccaattttgtaggcagagaaagtcttccagcatttctggctttcctgctattagaaagagttggaaatactgtagaggcagcctctctgttgaaatttctgcattttgctttcccactagtggcttagatatgcagcttgacactttgataccagcaagaaggtcagtcagtactccatgctgcactgtaattgggaggttgatttcttctgtccatccagctctaactttacttttactttttcttctcagttattacagttgtgctgtattgtcactgtagtctacagtaatatatagagataattaaatgctgtagatgttctttgtcatgctgcttatataaaaaagtacatgatattgaagcactcttgagactttgcttttcaaagctgaagactgtgatctcgtatctctgccatctaagcatgggaaacaggtttagcgagagtgaaagagaattgtgtgaccttctctcaaaaccttgaactgaatcaaatatgcttttgttgggagaaagataatgactgaactgaggtcatctgaaaatgtgttacagactgtgttgtcagtacaacacaatgccccattcttgggagagattataaattctccacctttgatgacaatttttccatgatcatttttaaaaataatttccttgaaacttttctatgaagtgatgtttttttctaattgcatcacttgttctgatttatattcagaggaaagaagatgatattataaaataagaatttggaggtttctgagaactaaaagtgaactaaatatgttaaaagtttgtgatgaaaccccttgggaagaagaatttcaaataatttatgtaaatgccctttccttaaggaggtgaagcataactctctattctttaagtgtgaacttcacattgtgatttccttccaaagagtactgtatagaaaggaggagaaaaaacgactacacagtagagaaacctgaaaatcatttcagctagaaaatcaaggtcaacatcaacagtcataaatcatattgatagcatgaacccttgatatgatgtgatgagaatgacattttacctctgtgatcttcctctcccaaacctataaaatccagtctaatcatgagaaaaacatcagacaaattcctgagagacatcctacaaaacctgaccagctctcctcaaaactgtcaaagtcttcaaaaataaggcaagttggacaaactatcaccgtcaaaaggagtttaaaaagtcatgacaactaaatgtaatgtggcattctggatggaatcctgcaacagaaaaaagaacattcagtaaaaactaaggaaatctgaataaactatggatttttcttaattaaaaaaaattatgatacaccagtcattttcttatatcacaactgatttaattctaatagtgaaactatgtcttctttaaggaatagaatatatggctgggagcttaatatcctaaacctatgcttagagagaggtaaagtgacttgtccaaagttacacatttcctgaataagcctaagactacataacaacagagaattgtaggatttgccacaaccctatgatgatttatatattaattttctattgccactgtaatgaattgccataactttagcagcttaaaacatcatccatctattatatcaccatctattatatcatccatctattatatca

SEQ ID NO: 725560 - DNA, 838 bp, Homo sapiens
ctctccagcactctctttcctagggtttcttccatgtagcagggctgacgggggctaaactttagttttgagcttaaggggagataaggagtttttaaaggaggatcggttttaatagtcaaactgcctgggtccataccccaattctgtcccttaatagctatgcgagcttgggaaagctggttatcccctgattttttggtgaatttcctaatctgtagagtgatcaataattgttgctagattttcaaatgttttataggggtaaaaattagatcatgcctatgaagcattcagcacagtgtctggcatctagaaagtgcttcttccttatacctacttggctcacaccttcaccaaataattatttctttagatcttcccttctcagtgaagctttccctgagtatcctacttaatacctcaaacccttcccacctcatgatccaattggcacttctgatctatcttgctcttggttattcccttctaataatagccattttataatattctgatatattactttcttttttaatgtaggttacattttggagatagaagaggggctgagcaggggagaaggctactcttcatgaaaattttatttttcccttttagagattaaaaacaaaaattctctaagttaactacatccctatggcatcatacttgaagcttctactgagctttaatttaaacatcaaatcgcccccacatggtaaataaacagcagacaaatatctgktgactttgtaatgtcttttatgttttccacaagttcaactcctccattcctaactatggttgccactaagcacagattgtacccacgtta

SEQ ID NO: 725561 - DNA, 1255 bp, Homo sapiens
tggcctcatttaccttgcattgactgatgctcccaacacataaatctgcccattctttgcaaatttcaaattcaaccaagttactcttttttgtttgtttttgttttaggtttttttgggggttttttttgagatggagtcacactatgtaacccaggctggagtgcagtggtgtgatctcggctcactgcaacctctgcctcctaggttcaagcgatcctcccacctcagcctcacaagtagctgggattacgggcaggcaccgtcacacctggctaatttttgtatttttagtagagacagggtttcaccatgttggccaggctggtctggaactcctgacctcaagtgatccacccgccttggccttccaacgtgctgggattacaggcatgagccactgccctcagccttagttcctctttcttttttttttttttttttttttttttttttttttgagacggagtctcgctctgtcgcccaggctggagtgcagtggygcgatctcggctcactgcaagctccgcctcccgggttcacgccattctcctgcctcagcctcccgagtagctgggactacaggcgcccgctaccacgcccggctaattttttgtatttttagtagagacggggtttcaccgtgttagccaggatggtctcgatctcctgacctcatgatccgcccgcctcggcctcccaaagtgctgggattacaggcgtgagccaccgcgcccggcctagttcctctttcttatgtgagacctctcatttgaagcacagaaaaagtagatataattagaatctagttaattatgtaactttggattgccagttcccacatactccctatgggcattatcttcaaaggtgttgctacatttctactccttcaaaatactttgaacataaagtaactgcaattattttagtcaaggaaaactgtttgctaagttcacctccacatacttataattctaaggtcctcacttactattaaattattcaaatttattcactttttaaataggcttccaccttccaaagaggcttttatatgttccattgttacttttccggtgtttcccacacctgctacgtaactgatttgatgagaaaaattattttgacatcctatccttaataagaacaattgaattttctcctaaccataaaaagtgggcctttgtcatttgtgtcttcccctgtgcactcattgcactttcttctctagacctgtggttaaagtttgaaa

SEQ ID NO: 725562 - DNA, 1255 bp, Homo sapiens
tggcctcatttaccttgcattgactgatgctcccaacacataaatctgcccattctttgcaaatttcaaattcaaccaagttactcttttttgtttgtttttgttttaggtttttttgggggttttttttgagatggagtcacactatgtaacccaggctggagtgcagtggtgtgatctcggctcactgcaacctctgcctcctaggttcaagcgatcctcccacctcagcctcacaagtagctgggattacgggcaggcaccgtcacacctggctaatttttgtatttttagtagagacagggtttcaccatgttggccaggctggtctggaactcctgacctcaagtgatccacccgccttggccttccaacgtgctgggattacaggcatgagccactgccctcagccttagttcctctttcttttttttttttttttttttttttttttttttttgagacggagtctcgctctgtcgcccaggctggagtgcagtggtgcgatctcggctcactgcaagctccgcctcccgggttcacgccattctcctgcctcagcctcccgagtagctgggactacaggcgcccgctaccacgcccggctaattttttgtatttttagtagagacggggtttcaccgtgttagccaggatggtctcgatctcctgacctcrtgatccgcccgcctcggcctcccaaagtgctgggattacaggcgtgagccaccgcgcccggcctagttcctctttcttatgtgagacctctcatttgaagcacagaaaaagtagatataattagaatctagttaattatgtaactttggattgccagttcccacatactccctatgggcattatcttcaaaggtgttgctacatttctactccttcaaaatactttgaacataaagtaactgcaattattttagtcaaggaaaactgtttgctaagttcacctccacatacttataattctaaggtcctcacttactattaaattattcaaatttattcactttttaaataggcttccaccttccaaagaggcttttatatgttccattgttacttttccggtgtttcccacacctgctacgtaactgatttgatgagaaaaattattttgacatcctatccttaataagaacaattgaattttctcctaaccataaaaagtgggcctttgtcatttgtgtcttcccctgtgcactcattgcactttcttctctagacctgtggttaaagtttgaaa

SEQ ID NO: 725563 - DNA, 896 bp, Homo sapiens
ttgtagtcaaattcagaaaaaaaattgggggaaatgaacaagacaaagcagtagatgaggttcaaatgagtggtattcatttgttagttcagcagacatttattgagcatctgtttttagactatgtactgggctagatgctgaagatacagagtgtggttgaaaggacagacaagcaaggaaagctttctctcagaagtaatcacttccagaggaggtgatgtgggctcttgataattcaaccaagtgaagtctggaaagagggcagggagacgtcatgggtttgtcctgggaggaggagaaagggaaggatagcctgcctttaagagcagagagagcaacagctgcccagacacccaaggacctatccaaccttaagaataactcctgtcactgggatcacctttaggccatagtcaaaacctatgaaccaatcaccaatttaagaagagattagctactgctcaacaactttcctgccaaattcaggtgtcatgccccttggcaggcctatgctattactagttaattgcatgtgtgagtatgtgttccactctcatatcctttcccaccaaagaaaagaaaatggtgccatggagtgttctaatgtgggatattgaccaatgcattgaacgctgaaccagttaactccaaaagacaccaagtccttgcactgagatgagctttaggayatttggcaactaaatataattattatctaatataaatccaaatatttgaaaatgtaggatgttaagaacatgattcctgctgtcaacctaaataataaacacagtgagagaggctttaaaaaattatacattttttagaatagggcattgcaatggaaatatgcatgccatagtaaactacatgcatattcagggagacaaagg

SEQ ID NO: 725564 - DNA, 1299 bp, Homo sapiens
ctagcatcactcatcatttgacagtgttccctataaaatttaccaaataagcctaatcatttaatatctctacaagatgagaagtatatcctttgagactctccaggggctcaactggaaaattccaaagtgaaatctaggtcaaaatgatttaatttagaattttgatcctggggaagcaagccaaagacggaaaacagttttgaaacagttgatcaaaacaggatcatgggtcactgtaaattaatagccatgcatttaaccagagtgataaacaacttcaaaagcaatacagaaagttatatggatttttaaaaaccttaacactttcaaagctcagttttcctaagtaatcagaaacctagtaaagacaacacagaaagttatcttgataaaacataagttctctctccctctcttttttttctttaggtcagtgcccaaaaaggtaaagaaaacctcatgcagtgtgcttgcttctcctcatgggcagcccatttggataccctggaaattgaacctaatttaaaaggtatctgaatctaatcagtcacaggaagaatgtgtgtataccatattatagaggaaggtaaataagaaaactagtatcttgagtaggggaatatagtactcttagcaatagcatgggaagtttcctggttatgtggaacaattcagatacatcaagagaagccaagagtacaggataaagttatactggaggaaaacatcacttttttaggtcttcaagataaacatttcagcaacaggtcacaaaagcagagttagaactggagagaataaattacagtagctgatgaaaaagttgaaagagagattgttatcatcccaggctttttcaaagggagaaagagttgcaggcaatgatgcatgacctgcaaatcatgtgctgtgaaatacatcagaagttgaagtttgaagatatgaatatgagaagcttcaagaggaaaactctacctcaagaaataaaattaccattctgaatgaaaaagacatatttctaacctgaaaatagggaaattaaattacttctattaaaaaaagcagcagataattaaaaataaaaacatcttgtaaattttactaagagcagatcaatacacaacaaacaarcaaacaccttgttgttttaatatagagtaccaaacctttagttttctgttagcgtattttttttttttttggagacagggcattcctctgtcaccctggctggaacgcagtggcataatagctcactgtaacctcaaattcctgggctcaactgatcttcctgcc

SEQ ID NO: 725565 - DNA, 618 bp, Homo sapiens
ttacatttacacattattgcaaaactatgtgtaattctccaacattaacaaaagttgaaatatgctaaagtcaccttaatgtgttactatagacaataaaatcaaacattataagagtaatattactgataaaaatatggcagctacataatgattttaagttcatggtttyccaatcaaataataaatgccaacaatctgctcaaggttttgtagttctgttttttgatttctaattcaagagaaaaaagttaattttctagttcagaaggggaaaattaatcacagagcaacctcaaaaaagatagaggcaatactgtgttatcaacactaatgcaagagagtgataacatagatcatacaaacaatgggaatattgcaaatcattcattgtcaggagagactgaaccatgtgatttattttgtaattgtttttcttgagccaatgttaacactgatgtgcactatttgaacatatatcaactgataatagaaagaagtaggccagatggatgttgggtggcaagagaaaacctgccaaggagtaatgtttccctaagtaattaacaaaagctgtagttcaatttttaataatagaaataaaaaaatggttgagtc

SEQ ID NO: 725566 - DNA, 618 bp, Homo sapiens
ttacatttacacattattgcaaaactatgtgtaattctccaacattaacaaaagttgaaatatgctaaagtcaccttaatgtgttactatagacaataaaatcaaacattataagagtaatattactgataaaaatatggcagctacataatgattttaagttcatggttttccaatcaaataataaatgccaacaatctgctcraggttttgtagttctgttttttgatttctaattcaagagaaaaaagttaattttctagttcagaaggggaaaattaatcacagagcaacctcaaaaaagatagaggcaatactgtgttatcaacactaatgcaagagagtgataacatagatcatacaaacaatgggaatattgcaaatcattcattgtcaggagagactgaaccatgtgatttattttgtaattgtttttcttgagccaatgttaacactgatgtgcactatttgaacatatatcaactgataatagaaagaagtaggccagatggatgttgggtggcaagagaaaacctgccaaggagtaatgtttccctaagtaattaacaaaagctgtagttcaatttttaataatagaaataaaaaaatggttgagtc

SEQ ID NO: 725567 - DNA, 1918 bp, Homo sapiens
  misc_feature 1818, 1819, 1820, 1821, 1822, 1823, 1824, 1825, 1826, 1827,1828, 1829, 1830, 1831, 1832, 1833, 1834, 1835, 1836, 1837,1838, 1839, 1840, 1841, 1842, 1843, 1844, 1845, 1846, 1847,1848, 1849, 1850, 1851, 1852, 1853, 1854, 1855, 1856: n = A,T,C or G
  misc_feature 1857, 1858, 1859, 1860, 1861, 1862, 1863, 1864, 1865, 1866,1867, 1868, 1869, 1870, 1871, 1872, 1873, 1874, 1875, 1876,1877, 1878, 1879, 1880, 1881, 1882, 1883, 1884, 1885, 1886,1887, 1888, 1889, 1890, 1891, 1892, 1893, 1894, 1895: n = A,T,C or G
  misc_feature 1896, 1897, 1898, 1899, 1900, 1901, 1902, 1903, 1904, 1905,1906, 1907, 1908, 1909, 1910, 1911, 1912, 1913, 1914, 1915,1916, 1917: n = A,T,C or G
aacattccttataaaagtataactttattacttagttttagcctttttatatctggttgctagttaggcctttgtcttcaattcaatatgattttagttaaatttttcatatttaaaaattttcccttttcttattcaggtaacttactatatcttagttttgaaaaagagtttagcaacaaatattgaataaagtctactagacaaaaaacagtgtatttttacaaattgatatctgattcatgttacttgtccagttcagctttcattatttaattactgatgtagctatactttgatataatggaatgactcaaggttttgtacctgaagcaaccaagcccacatccatgctgggatttaatttaggtgatcccactcaggggtccagaactgggtcccctcttcaaaccaagtctgaattaggtattaacctaattgaaattgagtccaaattaggtattaggtccagacatttttctagacagcagatctgtaactattaccagattctcaaagggccccaggaccttaaattaccttggaaagtatcattttacccttttcttactttacctgctgtttcctattccggcataaatatttccctcatatgtaacaaaatgaaatgtcaaaatgcatgttgctaaggtagttaattttatttcctaattttgaagatgtcatgtttagaaatgtatatgctagtttactttaaccagggatccctgtatagaaaacattgtattgttaccactgtcaacacacaaccaatttttttacttcacatttaactacagaaaacctacgaaaattggcattcaaaaaatacaaggtaccatcacttaagtatgaattattgtaccactattatcatgtccatataaatcattttcctacaattttagaataagaaataaaattatctttatcttttttagttaactataaccatgtccctagacatttatgtattttacccacagtacaataaggtctcttgtaggacacagtcttattttttaaattatttatttatttattatttatttatttatttttgagacggagtcttactctatcgcccaggctggagtgcattggtgcgacctcagctcactgcaacttcgccacccaggttcaagtgattctcctgcctcagcctcccgagaagctgggactacaggcgtgtgccaccacacccagataatttttgtatttttagcagagatcgggtttcaccatgatgcccaggctcgtttttaagagacggagtcgtgctctgttgcccaggctggagtgcaggggcctgatctcggctcactgcaagctccgcctcccgggttcacgccattcttctgcctcagcctccggagtagctgggactacaggcgcctgccaccacgcccggctaatttttaaaaaaatatttttagtagacacggggtttcaccgtgttagccaggagccaggatggtctccatctcctgacctcgtgatccgcccacctcggcctcccaaaggtctgggattacaggcgtgagccaccgcgcccgcccaggatacagtcttaagcagtaaacatcaagtgagagtctgacaaataakaaaaaaccattcctaagataacataatgatgctgattaaaatgtaatagtgtgtgtatatatgtgtatacatatttaaataaaaatgatcttaaatattaccaacccacaatttataaaatggtacttttaaaagggagtattattatcctggatatttctgagaggtgttttagtggtttaaaaaggaaaataattatttggccaacgnnnnnnnnnnnnnnnnnnnnnnnnnnnnnnnnnnnnnnnnnnnnnnnnnnnnnnnnnnnnnnnnnnnnnnnnnnnnnnnnnnnnnnnnnnnnnnnnnnnnt

SEQ ID NO: 725568 - DNA, 1918 bp, Homo sapiens
  misc_feature 1818, 1819, 1820, 1821, 1822, 1823, 1824, 1825, 1826, 1827,1828, 1829, 1830, 1831, 1832, 1833, 1834, 1835, 1836, 1837,1838, 1839, 1840, 1841, 1842, 1843, 1844, 1845, 1846, 1847,1848, 1849, 1850, 1851, 1852, 1853, 1854, 1855, 1856: n = A,T,C or G
  misc_feature 1857, 1858, 1859, 1860, 1861, 1862, 1863, 1864, 1865, 1866,1867, 1868, 1869, 1870, 1871, 1872, 1873, 1874, 1875, 1876,1877, 1878, 1879, 1880, 1881, 1882, 1883, 1884, 1885, 1886,1887, 1888, 1889, 1890, 1891, 1892, 1893, 1894, 1895: n = A,T,C or G
  misc_feature 1896, 1897, 1898, 1899, 1900, 1901, 1902, 1903, 1904, 1905,1906, 1907, 1908, 1909, 1910, 1911, 1912, 1913, 1914, 1915,1916, 1917: n = A,T,C or G
aacattccttataaaagtataactttattacttagttttagcctttttatatctggttgctagttaggcctttgtcttcaattcaatatgattttagttaaatttttcatatttaaaaattttcccttttcttattcaggtaacttactatatcttagttttgaaaaagagtttagcaacaaatattgaataaagtctactagacaaaaaacagtgtatttttacaaattgatatctgattcatgttacttgtccagttcagctttcattatttaattactgatgtagctatactttgatataatggaatgactcaaggttttgtacctgaagcaaccaagcccacatccatgctgggatttaatttaggtgatcccactcaggggtccagaactgggtcccctcttcaaaccaagtctgaattaggtattaacctaattgaaattgagtccaaattaggtattaggtccagacatttttctagacagcagatctgtaactattaccagattctcaaagggccccaggaccttaaattaccttggaaagtatcattttacccttttcttactttacctgctgtttcctattccggcataaatatttccctcatatgtaacaaaatgaaatgtcaaaatgcatgttgctaaggtagttaattttatttcctaattttgaagatgtcatgtttagaaatgtatatgctagtttactttaaccagggatccctgtatagaaaacattgtattgttaccactgtcaacacacaaccaatttttttacttcacatttaactacagaaaacctacgaaaattggcattcaaaaaatacaaggtaccatcacttaagtatgaattattgtaccactattatcatgtccatataaatcattttcctacaattttagaataagaaataaaattatctttatcttttttagttaactataaccatgtccctagacatttatgtattttacccacagtacaataaggtctcttgtaggacacagtcttattttttaaattatttatttatttattatttatttatttatttttgagacggagtcttactctatcgcccaggctggagtgcattggtgcgacctcagctcactgcaacttcgccacccaggttcaagtgattctcctgcctcagcctcccgagaagctgggactacaggcgtgtgccaccacacccagataatttttgtatttttagcagagatcgggtttcaccatgatgcccaggctcgtttttaagagacggagtcgtgctctgttgcccaggctggagtgcaggggcctgatctcggctcactgcaagctccgcctcccgggttcacgccattcttctgcctcagcctccggagtagctgggactacaggcgcctgccaccacgcccggctaatttttaaaaaaatatttttagtagacacggggtttcaccgtgttagccaggagccaggatggtctccatctcctgacctcgtgatccgcccacctcggcctcccaaaggtctgggattacaggcgtgagccaccgcgcccgcccaggatacagtcttaagcagtaaacatcaagtgagagtctgacaaataataaaaaaccattcctaagataacataatgatgctgattaaaatgtaatagtgtgtgtatatatgtgtatacatatttaaataaaaatgatyttaaatattaccaacccacaatttataaaatggtacttttaaaagggagtattattatcctggatatttctgagaggtgttttagtggtttaaaaaggaaaataattatttggccaacgnnnnnnnnnnnnnnnnnnnnnnnnnnnnnnnnnnnnnnnnnnnnnnnnnnnnnnnnnnnnnnnnnnnnnnnnnnnnnnnnnnnnnnnnnnnnnnnnnnnnt

SEQ ID NO: 725569 - DNA, 1624 bp, Homo sapiens
  misc_feature 388, 389, 390, 391, 392, 393, 394, 395, 396, 397, 398, 399,400, 401, 402, 403, 404, 405, 406, 407, 408, 409, 410, 411,412, 413, 414, 415, 416, 417, 418, 419, 420, 421, 422, 423,424, 425, 426, 427, 428, 429, 430, 431, 432, 433, 434: n = A,T,C or G
  misc_feature 435, 436, 437, 438, 439, 440, 441, 442, 443, 444, 445, 446,447, 448, 449, 450, 451, 452, 453, 454, 455, 456, 457, 458,459, 460, 461, 462, 463, 464, 465, 466, 467, 468, 469, 470,471, 472, 473, 474, 475, 476, 477, 478, 479, 480, 481: n = A,T,C or G
  misc_feature 482, 483, 484, 485, 486, 487: n = A,T,C or G
ggccaggcgcggtggctcacgcctgtaatcccagcactttgggaggtcgaggcaggcggatcacaaggtcaggagattgagaccatcctggctaacacggtgagaccccgtctctactaaaaatacaaaaaattagctgggcgtgttggcgggcgcctgtagtcccagctactggggaggctgaggcaggagaatggtgtgaacccgggaggcggagcttgcagtgagctgagatcgcgctgctgcactccagcctgggcaacagagcgagactcagtctcacaaaaaaaaaaaaagctaattctcagttgtctgcagtaacctaaatactgcaagaaataaaatgatattgaataccttcaactctcattcaattttaataaacttnnnnnnnnnnnnnnnnnnnnnnnnnnnnnnnnnnnnnnnnnnnnnnnnnnnnnnnnnnnnnnnnnnnnnnnnnnnnnnnnnnnnnnnnnnnnnnnnnnnnacctcattcccggctaatttttgtatttttagtagagacagggtttcactatgttggtcaggctgacttcgtcatccacccacctcggcttccgaaagtgctgggattacaggcatgagccaccatgcggggtctattgttcctaaatttcctacagacagtgaactctctcattgcctgtaaagagagctaagcactcccaccgcccccaatgcccttcgaagaagaacagattacatggaacataattgtcaccatcgcctccatgaaatcttcctgactgcaaaccttccccacatccaggtccccataactcctcacttgttaaacagttgtcatttgctgtttatttttctttctccctgctcgattttgaggttcttcasgtcacacatctttactctactttcccaatatttccaaatgccttgcagagtgcctaaaacacaacagtccctcaacacggtcattaatttaagaaaaatccattgagcatctgttcgtgaccaggccctgctctaggcactggggttacacccgtgaacaaaacatacggcagcataaacataagcttacattgaagcagtgtttacataaatgaatgaacattagagcgccaacatcttcttgatagatcggaaactttactcagtgaaacaaaaacaaaacacgcacatggccagcttttacataattctttcacattgcgaaagttaagtctaagcctggtttgcaagtgaaatttagaatcctagaattatcacttgacacatggatttccctttatcaatgataaatgttcaaggacatgagccagagtccttaaatttccatcatactactattaggcccacaaactataacttgcccttggatgcaaccaaaattatcttcaaaaactgaaaaccatgtttcatgaaaacacctctttcatagaagaggtatttaatgagaaccagtctttcaccaccacccattactatttccatagagtatttctaattttctaaatcctttcatttcacttatttatttatttatttatttatttacttatttattttgagacaaaatctcgctctgttgcccaggctgaagtgcagtggtgcgttctcgggctcactgcaacctccactt

SEQ ID NO: 725570 - DNA, 1624 bp, Homo sapiens
  misc_feature 388, 389, 390, 391, 392, 393, 394, 395, 396, 397, 398, 399,400, 401, 402, 403, 404, 405, 406, 407, 408, 409, 410, 411,412, 413, 414, 415, 416, 417, 418, 419, 420, 421, 422, 423,424, 425, 426, 427, 428, 429, 430, 431, 432, 433, 434: n = A,T,C or G
  misc_feature 435, 436, 437, 438, 439, 440, 441, 442, 443, 444, 445, 446,447, 448, 449, 450, 451, 452, 453, 454, 455, 456, 457, 458,459, 460, 461, 462, 463, 464, 465, 466, 467, 468, 469, 470,471, 472, 473, 474, 475, 476, 477, 478, 479, 480, 481: n = A,T,C or G
  misc_feature 482, 483, 484, 485, 486, 487: n = A,T,C or G
ggccaggcgcggtggctcacgcctgtaatcccagcactttgggaggtcgaggcaggcggatcacaaggtcaggagattgagaccatcctggctaacacggtgagaccccgtctctactaaaaatacaaaaaattagctgggcgtgttggcgggcgcctgtagtcccagctactggggaggctgaggcaggagaatggtgtgaacccgggaggcggagcttgcagtgagctgagatcgcgctgctgcactccagcctgggcaacagagcgagactcagtctcacaaaaaaaaaaaaagctaattctcagttgtctgcagtaacctaaatactgcaagaaataaaatgatattgaataccttcaactctcattcaattttaataaacttnnnnnnnnnnnnnnnnnnnnnnnnnnnnnnnnnnnnnnnnnnnnnnnnnnnnnnnnnnnnnnnnnnnnnnnnnnnnnnnnnnnnnnnnnnnnnnnnnnnnacctcattcccggctaatttttgtatttttagtagagacagggtttcactatgttggtcaggctgacttcgtcatccacccacctcggcttccgaaagtgctgggattacaggcatgagccaccatgcggggtctattgttcctaaatttcctacagacagtgaactctctcattgcctgtaaagagagctaagcactcccaccgcccccaatgcccttcgaagaagaacagattacatggaacataattgtcaccatcgcctccatgaaatcttcctgactgcaaaccttccccacatccaggtccccataactcctcacttgttaaacagttgtcatttgctgtttatttttctttctccctgctcgattttgaggttcttcaggtcacacayctttactctactttcccaatatttccaaatgccttgcagagtgcctaaaacacaacagtccctcaacacggtcattaatttaagaaaaatccattgagcatctgttcgtgaccaggccctgctctaggcactggggttacacccgtgaacaaaacatacggcagcataaacataagcttacattgaagcagtgtttacataaatgaatgaacattagagcgccaacatcttcttgatagatcggaaactttactcagtgaaacaaaaacaaaacacgcacatggccagcttttacataattctttcacattgcgaaagttaagtctaagcctggtttgcaagtgaaatttagaatcctagaattatcacttgacacatggatttccctttatcaatgataaatgttcaaggacatgagccagagtccttaaatttccatcatactactattaggcccacaaactataacttgcccttggatgcaaccaaaattatcttcaaaaactgaaaaccatgtttcatgaaaacacctctttcatagaagaggtatttaatgagaaccagtctttcaccaccacccattactatttccatagagtatttctaattttctaaatcctttcatttcacttatttatttatttatttatttatttacttatttattttgagacaaaatctcgctctgttgcccaggctgaagtgcagtggtgcgttctcgggctcactgcaacctccactt

SEQ ID NO: 725571 - DNA, 1749 bp, Homo sapiens
  misc_feature 525, 526, 527, 528, 529, 530, 531, 532, 533, 534, 535, 536,537, 538, 539, 540, 541, 542, 543, 544, 545, 546, 547, 548,549, 550, 551, 552, 553, 554, 555, 556, 557, 558, 559, 560,561, 562, 563, 564, 565, 566, 567, 568, 569, 570, 571: n = A,T,C or G
  misc_feature 572, 573, 574, 575, 576, 577, 578, 579, 580, 581, 582, 583,584, 585, 586, 587, 588, 589, 590, 591, 592, 593, 594, 595,596, 597, 598, 599, 600, 601, 602, 603, 604, 605, 606, 607,608, 609, 610, 611, 612, 613, 614, 615, 616, 617, 618: n = A,T,C or G
  misc_feature 619, 620, 621, 622, 623, 624: n = A,T,C or G
tccctgtgctagacgtagggggacatataaatggttttgaatttcagtttctatgtcagtgagaattctgtgccagaaaagagcatctgctctttattttacagatgaggaaatttagtcccagagagagcgtgatttgcctcttcccttgagattagccagcagagtcaataagaaaaatctaggtcttctgattcagtccagtgcctttctctgtatgtcgcactgtttccctcattatcttgagatttgctggagccacaggactgcacaatggttgtgcatatgtggatttgagtgccacagctgaattaactcatgtcaatctcagtcccaagcctgttcccacaacacgtggtaaatcgtcactccttgtggtctcagaattgggtgcctggaggatatcataatcaccagggatagttttttctgttgctgcctggtgcacacatctcctctgccttgacttgtctgaagtctttccccctttgaggcagggactgaaggggtgggtttcgagatcgnnnnnnnnnnnnnnnnnnnnnnnnnnnnnnnnnnnnnnnnnnnnnnnnnnnnnnnnnnnnnnnnnnnnnnnnnnnnnnnnnnnnnnnnnnnnnnnnnnnnacttttaaggcaaacgtagttgtggttttaagaacgccggtttgaggtgcactgagactgagcagggaggggtatttgttactgtggacctggtgatgaggactcccttatgtcttctctgagctagaacttctcttttgaattggcttcatgcttcaaactcatgacctctcttaccttattggttggcaggttttgtgcaatggattttatcagtaaggaactgaatttaaatcttgcaattagataatgtgattacttaaggggactttcactattttaggccgggactccaatcaaataaatcccaggccctgcccaatctatgtgctcaaaattttcgagttttcagttgtgatgggtcaccctctgtatattcttactgtagtacacaatgcaaaatgtatcaagataattaactgatttaggtgttcacagtgctattatggaacattacttcttttagtgtgacacgcattaggctctatcacttgtgtcatgctagcctgattagcacctcttcctagggctgtacgctgactcttattttttttgagacggagtctcgctttgtcactcaggctggagtgcagtggcacaatcttggctcactgcaacctctgcctcctgggctccagcaattctcctgcctctgcctcccgagtagctgggatcacagccaccatgcccggctaatttttgtatttttagtagagacagggtttcaccatgttggccaggctggtcttgaactactgtcctcgagtgatccgcccaccttggcttcccaaagtgctgggattacaggtgtgagtgaccgcacccggccccctgactcatttttagagaagaaatgttctgttttctagaagcattttctaacttctcaaggggccaaccgaagtttactttcgttgttcttctgtacgtgtgcctggtttcctaaagccctttgcttgggaacagctcactcagtgaggctgcctggggtgttgcagcctcaggtgttggtggtgtagggttttctgtgcttgcccttctgccacaacytctgcagtttctcatttcctgctctgctccctgggtcccaggtactggtcgctcatttggctttattgcctatga

SEQ ID NO: 725572 - DNA, 607 bp, Homo sapiens
catcttcctactggtactgctggcctgccctggcctctgcctggccaccgtattcctgttcttactgcctgggggagctgagcactgacatgctagagccatttccacctctgaactgttcttctcaccctcttctctctatgattctcagatttctcatctttgccattatcatgtctcactttctttttttctaggaataaaaacaaaagttaatttttgatgagcacttaccatgtgctttctttttattggctcatgtaatccttataccagctccattgtacagaatragaacagagaggcacagagaggttcagcaacttgcccaaaatcacacagctggtaaatagggaagccagagctcagtctagatgatccgagacctctctggaaagcagcagtgagcacatcagacttagaattgtaaaacatgggtttgaatacaggctctgtcacctcctgtgactttgctgtctaggtctcagcttccttcctcattcacaaggtgggacgatgaacatgcgccccatccattcatagggtcatttcaaagtcaaattatgtaacaggcgtaaaaaggatattgaaaatgggaaagtgggct

SEQ ID NO: 725573 - DNA, 607 bp, Homo sapiens
catcttcctactggtactgctggcctgccctggcctctgcctggccaccgtattcctgttcttactgcctgggggagctgagcactgacatgctagagccatttccacctctgaactgttcttctcaccctcttctctctatgattctcagatttctcatctttgccattatcatgtctcactttctttttttctaggaataaaaacaaaagttaatttttgatgagcacttaccatgtgctttctttttattggctcatgtaatccttataccagctccattgtacagaatgagaacagagaggcacagagaggttcagcaacttgcccaaaatcacacagctggtaaatagggaagccagagctcagtctagatgatccragacctctctggaaagcagcagtgagcacatcagacttagaattgtaaaacatgggtttgaatacaggctctgtcacctcctgtgactttgctgtctaggtctcagcttccttcctcattcacaaggtgggacgatgaacatgcgccccatccattcatagggtcatttcaaagtcaaattatgtaacaggcgtaaaaaggatattgaaaatgggaaagtgggct

SEQ ID NO: 725574 - DNA, 615 bp, Homo sapiens
atgttctcacttatacatgaaagctaaaacagttcatctcatggaggcagaaagtagaaagataacagagactgctaggggtgagtgacacagggagggaaggatgaagagaaatgggttaaagtgtacaaacatacagttagataaaaaaaaataaattcagcatttgatagcagagtagggtgactatagttactaaaaatgtatttggktggtgaataccttaataacctgacttgttcaccatgcatttaatacatgtaacaaaatttcatatgtgccccataaatttgtacaaatttaaaaaaaagtttgagaaacagtaaaatgtatggtttaccactgcacatataagtgtcagggttctagcaggaaacagaattcaccccagatgcttcaaatgagtagatttcagaaatctacttacagatatattttagggttaattgaacaatcaagttataattaactatccaaagactaacaatagtaaaaagagtttcttcccactaggtctttcatgaaggagattgaattaagacgatgaggagtttacctagattttagatttattgtaggtgtggttaacctcagtgcaacacaggattccaattc

SEQ ID NO: 725575 - DNA, 615 bp, Homo sapiens
atgttctcacttatacatgaaagctaaaacagttcatctcatggaggcagaaagtagaaagataacagagactgctaggggtgagtgacacagggagggaaggatgaagagaaatgggttaaagtgtacaaacatacagttagataaaaaaaaataaattcagcatttgatagcagagtagggtgactatagttactaaaaatgtatttggttggtgaataccttaataacctgacttgttcaccatgcatttaatacatgtaacaaaatttcatatgtgccccataaatttgtacaaatttaaaaaaaagtttgagaaacagtaaaatgtatggtttaccactgcacatataagtgtcagggttctagcaggaaacagaattcaccccagatgcttcaaatgagtagatttcagaaatctacttacagatatattttagggttaaytgaacaatcaagttataattaactatccaaagactaacaatagtaaaaagagtttcttcccactaggtctttcatgaaggagattgaattaagacgatgaggagtttacctagattttagatttattgtaggtgtggttaacctcagtgcaacacaggattccaattc

SEQ ID NO: 725576 - DNA, 1208 bp, Homo sapiens
tcctatttttctttcagaaagatctgaggattttttttttccactttaaagtattttaagtttttgcattgatctctttacagtgatctctgtttacttcttccccttccctactcactgcggtgygtttgcttaggtctcagtattttctgctggagattttcttcaaaggtttggtattcctaggtgttttacagcactgaagcactaaacagctttcctccctgcctcctctccaggcagtttcctgggttaggagtctgggtgttggagagtgtaaagatggcagaacccagctgtttctcccatctgtcctgcctcttgttcagcccagttacagaactaggtgcctactcgacttttccctgcctctcgcagaactgaaccagttcagtcctccactcctctgtgttagtaaacattatcacttgaatgtttccagagcctatcatttactcacacaaatctcagcctgattgaaatatggaaaggtgattaatagttttcagcatcctttctgggttcactgccgataccatatatttggcagacatccttccacatctgtggcttgaattatttcccagtttcttcattaggttttgttgttgttattgttgtttcattttcttggggtctcggggaacagaatgaagtaaatagttttttcctggaagttcctggagattttatttaaatccaagttgccctgggcatttttcagaagtgttgagtcattttcagtttttacctttagttatttaacaagttttgagtacctactaatagtagcatacagcaagatggtaattcttacaagtcattatattacctaattatccttgattatgtaattttcttcataatcctctacccaccccattttgtccttttaaaagtttaaatcattggaaagctagcccaatgattttggaaattccctttcaccttcatcagaatgcattggattaagcaaaccaaataatctctttcagactgtctaaatcttttacggctggtgttacttttagagacacatggctatgtaattacacagtagagtcacattgcgtatttgtaagaatatagttataagtgcccaggaaaaaggggttgggggagaattaagagggagtaaattatccaaaaggctctgggctgccttcatcaaatgaaggcatgcagtcaaataatgtgatggagaagtc

SEQ ID NO: 725577 - DNA, 1208 bp, Homo sapiens
tcctatttttctttcagaaagatctgaggattttttttttccactttaaagtattttaagtttttgcattgatctctttacagtgatctctgtttacttcttccccttccctactcactgcggtgcgtttgcttaggtctcagtattttctgctggagattttcttcaaaggtttggtattcctaggtgttttacagcactgaagcactaaacagctttcctccctgcctcctctccaggcagtttcctgggttaggagtctgggtgttggagagtgtaaagatggcagaacccagctgtttctcccatctgtcctgcctcttgttcagcccagttacagaactaggtgcctactcgacttttccctgcctctcrcagaactgaaccagttcagtcctccactcctctgtgttagtaaacattatcacttgaatgtttccagagcctatcatttactcacacaaatctcagcctgattgaaatatggaaaggtgattaatagttttcagcatcctttctgggttcactgccgataccatatatttggcagacatccttccacatctgtggcttgaattatttcccagtttcttcattaggttttgttgttgttattgttgtttcattttcttggggtctcggggaacagaatgaagtaaatagttttttcctggaagttcctggagattttatttaaatccaagttgccctgggcatttttcagaagtgttgagtcattttcagtttttacctttagttatttaacaagttttgagtacctactaatagtagcatacagcaagatggtaattcttacaagtcattatattacctaattatccttgattatgtaattttcttcataatcctctacccaccccattttgtccttttaaaagtttaaatcattggaaagctagcccaatgattttggaaattccctttcaccttcatcagaatgcattggattaagcaaaccaaataatctctttcagactgtctaaatcttttacggctggtgttacttttagagacacatggctatgtaattacacagtagagtcacattgcgtatttgtaagaatatagttataagtgcccaggaaaaaggggttgggggagaattaagagggagtaaattatccaaaaggctctgggctgccttcatcaaatgaaggcatgcagtcaaataatgtgatggagaagtc

SEQ ID NO: 725578 - DNA, 595 bp, Homo sapiens
ttgggcggacaataactatttggttgtttttctataagcatgctggtattttatggtttcttgctcagttgctattgggtacacacatctttttgtgcttagcaattgatggctttttggagcccccagctgatgtaattatgagttttatatgtctaactgtcatctgcagccttaccactaaagtctttcacgttattttacaactgaccttttagtcttgggctgtttgatcataggtatttcccaaatgcacttgacaaccctctgactcctttagcagagaaatgctttgatttgtttaaaaaaattatatattgataaacactaagttccctaagtatgaaataaaataaattgaagtttagcttctaagtataccacgccccagtgaaccatgctggttagaagcatgactagtgaagctgcactattttaaagaagcygtctggagatagtcgagttctctttcggggcagggatgggagaatatgcatttgagggcaaagggaaggtggaataagaaactgaacattggaagccttgaggcggggacccacgagattcagtgttgtctctctcattgggatcattc

SEQ ID NO: 725579 - DNA, 595 bp, Homo sapiens
ttgggcggacaataactatttggttgtttttctataagcatgctggtattttatggtttcttgctcagttgctattgggtacacacatctttttgtgcttagcaattgatggctttttggagcccccagctgatgtaattatgagttttatatgtctaactgtcatctgcagccttaccactaaagtctttcacgttattttacaactgaccttttagtcttgggctgtttgatcataggtatttcccaaatgcacttgacaaccctctgactcctttagcagagaaatgctttgatttgtttaaaaaaattatatattgataaacactaagttccctaagtatgaaataaaataaattgaagtttagcttctaagtataccacgccccagtgaaccatgctggttagaagcatgactagtgaagctgcactattttaaagaagccgtctggagatagtcragttctctttcggggcagggatgggagaatatgcatttgagggcaaagggaaggtggaataagaaactgaacattggaagccttgaggcggggacccacgagattcagtgttgtctctctcattgggatcattc

SEQ ID NO: 725580 - DNA, 564 bp, Homo sapiens
ccaggtagctgggaccacaggtgtgcaccaccacacctggctaattttttaatttgttgtagagaaggggtctcactatgtctcaggctggtctcaaatgcctgggctcaagcaattatcctgccttggcctcccaaagtgatgggattacaggtgtgagccactgtgcccagcctataagatttttaaaatcagaaaacacctagatgcacataaaaaagggatggtaaaataaattatgttcagtactatgaacaaatattaagcaaacattataaatcatctttggaatagctactatcacgaggaaatatgctttaatcttaagaggaaaggcagatataaaatctacccttagattcacaagcacacacacaaaacacacacatgaaaattataaaaggaaattcacaatcagtgaagagtggttcattctggatggtgggataatgctgggatttttattttctgatctttttctgtagtttttctattttctacactgtatatctaattaggaaaatggttttttttttgttttttttktttgtttgtttgttttgt

SEQ ID NO: 725581 - DNA, 1148 bp, Homo sapiens
tgccaccaaccttgaagccagagtctcaacaaggaaaagggtgctgttagtgatcacactgtgacgacagccataaagatagtcctggctaaagggggccctcctggcagccagtctcaacctgtcttccagaccagctagccaagaagctcacacagtcagcgactttgtccatttcattcatagcctagaatggtggctgggtccacagtaggtgtttcgtaaacacttgttgaagaagtgaatgagccagagttcraatgcaagatgaaacgttttgccagtcctgctacaagcagtggtgagtttttctttaaagtcaccatcacctctaataagctctatatttcttctctttgggtttgtctatgtgtgcctttaaatatatttatggaaatgggtgttttgaaaagttcttcttattcttgttcttctagccaaaatgggagtaagagtaagaacccttaaggtatttgtggtatctgaacgaattacctaattcccctggcattttgggaaacctccacccctgcccaggatgccctcaggctgctccctcttccctaggaagtgcttctcatcattcaaaatatgaaacaggctgggctgcctttaatcccagcagtttgggaggctgaggcaggcagctcacttgaggttaggagttcgagaccagtctggccaacatgatgaaaccctgtcgctactaaaaaaaaaaaaaaaaaaaatacaaaaattagccagatgtggtagcatgcccctgtagtcccagcaactcgggaggctgaagcacgagaatcacttgaacccaggaggcagaggttgcagtgagctgtgatcatgccactgcactccaacccgggtgacagagtgagactctgtctcaaaaaaaaaaaaaaaagaaaagaaaagaaactatgaatggaaaatgaatctccaatgtctatctccagttctgacctccccagaagaccccactgctcctgtccatgtgacttctctgggtttccttccattcttgaatgagccccgtggctcccaccttgaggccttccctcctgccgttccctttcaggcaatgctctgcctcttccccatctgagaaagatggagcctcccaccagccctctccagtgctggaagccctc

SEQ ID NO: 725582 - DNA, 1148 bp, Homo sapiens
tgccaccaaccttgaagccagagtctcaacaaggaaaagggtgctgttagtgatcacactgtgacgacagccataaagatagtcctggctaaagggggccctcctggcagccagtctcaacctgtcttccagaccagctagccaagaagctcacacagtcagcgactttgtccatttcattcatagcctagaatggtggctgggtccacagtaggtgtttcgtaaacacttgttgaagaagtgaatgagccagagttcaaatgcaagatgaaacgttttgccagtcctgctacaagcagtggtgagtttttctttaaagtcaccatcacctctaataagctctatatttcttctctttgggtttgtctatgtgtgcctttaaatatatttatggaaatgggtgttttgaaaagttcttcttattcttgttcttctagccaaaatgggagtaagagtaagaacccttaaggtatttgtggtatctgaacgaattacctaattcccctggcattttgggaaacctccacccctgcccaggatgccctcaggctgctccctcttccctaggaagtgcttctcatcattcaaaatatgaaacaggctgggctgcctttaatcccagcagtttgggaggctgaggcaggcagctcacttgaggttaggagttcgagaccagtctggccaacatgatgaaaccctgtcgctactaaaaaaaaaaaaaaaaaaaatacaaaaattagccagatgtggtagcatgcccctgtagtcccagcaactcgggaggctgaagcacgagaatcacttgaacccaggaggcagaggttgcagtgagctgtgatcatgccactgcactccaacccgggtgacagagtgagactctgtctcaaaaaaaaaaaaaaaagaaaagaaaagaaactatgaatrgaaaatgaatctccaatgtctatctccagttctgacctccccagaagaccccactgctcctgtccatgtgacttctctgggtttccttccattcttgaatgagccccgtggctcccaccttgaggccttccctcctgccgttccctttcaggcaatgctctgcctcttccccatctgagaaagatggagcctcccaccagccctctccagtgctggaagccctc

SEQ ID NO: 725583 - DNA, 1487 bp, Homo sapiens
gatattcattaggggaaagcgatatgtttacagtattgtagttttccaatccgtgaacatggtatatacctctatttgtttagatctttgttaatttatctcaatggcattttgcagtttttagtgtaggttgcacgtcttcattagacttctttctactctcaaacctacagctaatttgcaagaatggaacaatgaagactcctagacctactcacctgccttaaagatatgctattgtcccccagagaggtggcaaaatggtttgtatttttgtcttaagccttggacttttaaaatcctggattttgatgtgtgtgcagaagagaactaagatagcgtgcktgagaccgctctcctttaaaaggcctgcttgcaagagtagcctctgactggcatctgggaacttggatcttgagagagttgccaccattctctaactttgctgtgctgctttgctgtgcctgaactgtttgcacacaaaatggggtttatgcagaacacctgcttgccctctggaggtctggaattttgtttcatgctagatagagaatgctatgtgaccagatctccataaaaaccccaggcactgagtctctaatgagcttccctggtagacgacacttcgactgtgctgctacaacacgttgcaggaggaattgctcccatgagactgccctgggaaggaacccttggaaactggcaccttcttgcctgggactttgtccaatgcacctttccctttgctgattttattttgtgtccttttgctgtaataagtcatagttgtgatacaaagagtatgctaagtcctgtgagtcccagtgaatcactgaacaggaggtaggggtggtgttatggacccttgacacagtgtgaaagctccagatgttttatgttgattcaaaatgaaaacttctgaagctcacatgaatcgtgtctgtaggccagacatggcctacgagcaggcactttggggcttcagagtgagctcgagcccctcactggacagggatcaagtgaggcctaaggtgggacttgccccctcccaggtgcccaagctggaaagagggtctgggcttcccaggccagagctgctttcaggagaatgtacctggtggaagaagtggtggaaggaaggaaatcatgtcttggtttctgatgggagaaggttttcaatctatgttgtgtgaaaaagcagttggtacagagactctgtacccataacatgattttatttcatagataggatctctatatctcagccttagaaacagggaaattctgacgcatgctacaacctggacgaagcttgaggacatgatgctgagtgaaataaggcagtcacaaaagacaaatgctgcagaattccacttctatgtggtccctagagttgtcaaatccatagaggcagaatggaggttgctaggggatggggagggggaatgaggagtgagtgcttgataggacagagtttcagtttagaa

SEQ ID NO: 725584 - DNA, 595 bp, Homo sapiens
agcaggtatttgaacttaaagcaagcaaaacaaacctcaacaaacaaacaaatgaaaataaactacatgtatttgttgaacctccagcaaaccaaatccaaatactttttaaagtttacctgaaaactaaatgaatcccaagcaaaacaacaaaataagccaaagactcagtgagttatttctaactagtctggtattttttggtccatcctctttggtgcctgaccacagtttcagatcccagcccagattctctgtagtcatcacagggcttctctaaaacacaaaaaacatggctcttggcgggggaagacagaaggaagatgcagagaggcacgagacaaacaatcatkgtgtgtttccttatgatgtcaatgcaaagacaatgaggcttgaatgtttattttacagaatgtgcgaaagggaatcatttacaatgaacttccaagctgccaggacagggcagtctgtccccagtcaagcatcacaacatgcccacgtactctgattgagaacttgcttaaagaaaattgccctgagaatccattcaggaacctgttccactgtgtcccgcttggaatcagatgtttttccc

SEQ ID NO: 725585 - DNA, 1749 bp, Homo sapiens
ggcaacctaccctgatttcatggtatatgatattaacagtggcaaccaccacaaacattggctgactctatgtttaattgcttcttttttaaacatcataaaaaccagcaaaataggtattgattgtcactgctgtctcacagatgaggaaactaagacttacaggggtccacactttgcccaagttcactcagccagttggaggcaggatctgagcccagctctgcctgctctgggacctacatgcttgcccactgttttctgtcctgtcactggaaccgccagggaaaatttaggtgatggggaggggagagcatagggtatcttggcttctaaattcattggaattttttttttttttttttttgagatggagtcttgctctgtcaccaggctggagtgcagtggcgtgatctcggctcctgcaatctccgcttcccgggttcaagcgattcttctgctcagcctcctaagtagctgggattacaggcacgtgccatcacacccagctaatttttgtatttttagtggagacggggttttgccacgttgaccaggctggtctcaatctcctgactttgtgatctgcctgcctcagcctcccaaagtgctgggattacaggcatgagccaccacacatggcccaatccattggaattttatgtggccagggagtgagtctggtggaggacctacattaagtttggtgatcaagacacacacagtgtgtatttagatctctgtcattaggaaattagtatgtattaaggtagctaaaaggatggtctacaaacagcaggcaagtagggtcaatctgggcaggtgatgtgtttgtgcatgcatcagtgtcttgttccccctgcttttttttttcttaagctcagcatgaaaaagttaaaaacatttatcaagcacctcctatgtaccctgaagcttactgcaagatacatatttattatctccattttaaagcagaggaaatggaggctagagatatacagtgacttggccaagctcgcatggctggaaggggcagaactaggatttacacccaggtctctttggtactgagacactccacctgctatctttatctgccttttcattcagcctatggctacttttcttttaagtagcccctgctgccatatttctaagctgacttttccccaaacacagctctgaggaagtccatgctgggcccaggcacaagaaaactcaattcccagaggctaagatgctgctcttggttataagctctgcttgggtgagcgagctcctgctttctagttctctttcccttaccagcatcttgtatgaccagagtaggctttctccaagaagactagtgttagtaatggctaaaaaatgagcagtgcttcatactcacattcatcctccatctggmctgcaaaggctcaaacacttcatagctgttgccctcttccaggtgggttcctgggttctggtgtaagctctgccaactatctttgtaggcccttggctctgcagcttcccttttctggatctcagctttcccattcgcagatggacgggatcattggagagcttctaagggaacaggctgaggcctctttggcttctgtgtaaacttctaagatcttacttagtcttttacattttgctctgttaaaagactagtttcataaaaacacccaaaacaaacaacaactccttctctctcaaaccttttttggcagagggcatatttccttgttacagtgtgaa

SEQ ID NO: 725586 - DNA, 632 bp, Homo sapiens
tcagctagcacatgcactgccagcccctacatgcgctccctccttcccctgggcagtaatttttttttctttgagatggagtctcgttctgttgcacakgctggagtgcagtggtgcaatcttggctcactgcaagctctgcctcctgggttcatgccattctcctgccttagcctcccgagtagctgggactgcaggtgcctgccaccatacctagctaatttttttgtattttttagtagagacggggtttcaccatgttatcaggatggtcttgatctcctgacctcgtgatctgcctgcctcggcctcccaaagtgctgggattacaggcgtgagccaccacgccctaccccctgggcagtaattcttgctgggtttccctgacaggtgactgctcagcccagatgtctccaatggaaggcatggccaaaacactgctcttggaacaagaagtggaccttcaggttctccatctgttaagttcagggaaaaccacctctctctccccacagaactgttttgaaggtgaaatgagacaatgaacttgaaagtgcttgagaaggtggagtgggtagagtgagggtgaggctgtcattgtctttggaggtagcacatcctgttattggaca

SEQ ID NO: 725587 - DNA, 3282 bp, Homo sapiens
cttgaacccaggagttcaaggttgcagtgagctatggaaaaaagaaaaagattaaacacaaccatctctgcctgacttttctgtaaaactgtgatctcttcaggaggtctttctgaactcttgatgttgaagtccttgtagacacctgctagccaagcacagaacagcagtgatgctcccagccttctagaaatgaggaggacccagtccatttcaaaagcagcccagaggctgattttagaggccttgctcctaacacagccagcattgctgggaaggttcagccgccagtgctcagggcctgggactgtggggatttcaggtgccggacagtgatcacaaggctcgtctggcacaagggactcatggggctgctccgggcaagaggggctggggaccctcacgatgtcagtgcatcccaaatgatgaggacacgtcgtgacattgggactgagcgtgcatgaactcaggccagcgttagccacgcggccagggtgatgattctttccttctttccctcaaagcaattttgaggcattttccacaaggtcacctgagggtcccctcggggagtgaacagcagactggggacaaggatgaggctcagggtgcctaagtttggggctctttcacagggtacggagaagaccaacccctgcacaggggtcaatactgtaaactggatgggatctcaaggaaggagggctgaatctcttcctcctcggcttgggaggaagtgtaacaggcttgtacaactcaggccaggctctcagtcccagatctgtgccccacttgcttgttgatcttgggcaatactcagttcttctgagctccagtttctctacctatgaaattggaggtaatagagcctgccttgcaggtggctgtcaggactaccttccatagggcatgtgaagctttagctcagggcacaccatggctgtagctcaggagttttttagaggtttgcaggctccagtgctggagacagtgatgaattggttaaagcctcaaaatggtggcctaaattaatagggattttcagccacttgagactgtttgaaaggaaacaatggctacccctccctttccttctccccctctatagaccctgcatgaggaccgccrcccacacttgttctaggagctggaagggtaaggctctctggcatctgctgcagcttgcaaggatgccatcctgcccagtgtctgagctcagaggacccctcccctagggaaggaaagggggtgaacctgaatggcacgcagcccaagataacaggggtggagggggaggccaacagctctttaaacacttgtccatgcagagggaggggaagagaaggaaatgcttctggcagtgccattgcacacccctctgcgggagccctggtttctgatgagcaaatatacacgacagatggggatgacatcattagtcccacagagccagctctccctctagctgggggaccacactgctgaggccatcacacaagctgggcaacacccactgaggagctggggatacatgacatcatcgcagccgccgccttctgtggaccacgcagccagccctcagggcgacccttgctggactgaaccaagccaggtcttcccttctttgagaatggggcccagctctaagctgggctcagaagctctcatttgggaatttggagtagagattccatttctaggtcatagaagttctctgctggatgtgtcaactgaggccagggaagcctggggctgtgtggctaatgtgaccacacacattgaaacggtgacagctgtgctgccaagaaaatcgaagcagaactatgctagtgaagcagggagagggcggggacagagggggccaggcaagtcccagaagtgtggagcagttaggggagctaggagaaaaccgaatttccaggagaactctccttattacttttatgacagatttaccgttggaaaatattcaaaacttcagctccaaccctgggctccaataacatcatatattaaaatgtctggtccaagaagtgtgctgaattactcctgctgggcaaccccagcttccaagtcattctgggagcatgaacagagacagtgtgctctagacagggatccttagacaatcactctgtggaaactaggcaagttctgctgaaattcacgtatccacctcgctctacacagatgttgctgcaatgctgtcctgcgtgccaggacactcgttcccctctgtcactgtgatcaggccagaaggtcaactgctgccatctaaagaggagaatccctcaggctacatggagaccggacctgagattgtatagaaactgtaaaggagaggtcagctgatgaggctttaaaaatgatcacgtgtaatgacaaaacctggctcccagaagtgtccacatacctggctggcctatcttttatgaaataatgaggccactgatttgattctggtctaatgctgaaataaaacatactgccatttcaggttataaaatgcacttcctgacaacagtgcaacaaaggcttactgtgtttgtttttcttctctggtagaggaggtggtttttctgggtcaccggttgactcaggagcagtaaaatcacccacaaattcgacaggggctgaggaacctccatgctgaaagggcagaatagcagcaaagggcgcgtaggggacggatgggatcggggctgtgctctgcaggtcctccccagagatgttgtcatactgcgagggatgccgctcgtaggacaccctgcagccagagccgtccgccgtctgggaggctgcgctcctgcgcttcttctcggggagagcaggtggcgtatctgtctgctgccctggggccagaggtccgtctggctggggatggccgccaagaggcagctggaaaggagggccaagaaatggagacccagactcccccaaagactctggcaacgggctaaggttccaggccgtctgctgaggtatctggtctgcgttagagaggtcttgctggaggaattcatagtcgggatcatagtggtctgcagttacaacaggggaaaaagagacccgttagccacaggccctgcaggagcagccagctccccccgcccgcctctcgccggctcgctcatgggtgtgtgacaaagacctgtctccagggcttattttatattcacatgttatattcttcattcttctccctgattataaaagcaaaccagatgggaatatggctgtttgctatacttttattttttacatttcttatttaaaaaaaaa

SEQ ID NO: 725588 - DNA, 517 bp, Homo sapiens
tcatttttcatgaacctcgtggtgaataccattccatgtcatttggccatcttctctagccctgtgttagtggctgtggactttcccattgtatatctttaaacagctcgcataatcaacccaggttgttggacatttagattatctctggttgttcaccagtataagcagtgatgcggtgaaattcttgaaaaccttttatcttgcttgtttgcaacctttagttaaattcttagaagtgtaatttgctgggtcaaaggttttgccaaactgccgtccagatggcttatttttttaagcttctgggttcaatttgggttatttaaatacaagatctggaacagtaattctcatctcccattttatttaccacttttcctatgtttggggaaagagaaaagaacctcaaatcaactcatatatcagcagggtcttctggttttcataaaattatgtataaagctatggccataaactcatactgcygtttttttatttgtttgtgtttgtttgtttg

SEQ ID NO: 725589 - DNA, 1097 bp, Homo sapiens
tagaaaatacagatactacccaaamctcaatttcaggcttcccaggaaatgttttttaagaacagggaattgaatatgagttttgtctttttgcccactcatgattatcctgctggtcatcagaatgcctttcggctgaagctagacggaatgagggtaaggagcagacattccctgtaattgaaggcctgagattcatgggaatggatgctgtgttccatgtcctaggtctgtggacctgctttgcgtcacatgcactgatcctagggacagagtgaatattgaacaagcttatttaggaaaatttgaaatgtgagctttgagatcattcacatctcttggatctgataactcatcgagatgacccccttcaccaccttcccacaaatggaacagagagaatcgtaaggttgggtggtagaaaggccttggagctcatctatgcagcctctcctccttaaagtaaccccttctgtggtgttcaggttgagggacctattccatccatggactgagaacaaatcagactttacaaaaagaggttgaccatttatatgattacatttttaggtacacagctaagtaaataaactataaagttgactaatttgtcttgtaaaaacaaaccaaataagtaaataaactataaagcttgactgattttcacaaatacctgtggcatttgtgaaagatgagtccaaacatatctttagcaataactgatttattaaaataagtgaatgggctggatgaagtggctcacacctgtaatcccagcactttgggaggccaaggcgggcagatcacttgaggccaggagttcaagaccagcctggccaacatggagaaaccccgtctctactaaaaatagaaaaattagccgggcatggtggcgtgagcctgtaattccagctactagggaggctgaggcaggagaatcgcttgaacccaggaggtggaggttgcagtgagctgagattatgccactgcactccagcctaggtgacagagtgagattctgcctcaaaaaaaaaaaaaaaaaaaaaaagaacacttgactgcgttcagtattcatattttataaatgtgccctaaac

SEQ ID NO: 725590 - DNA, 982 bp, Homo sapiens
cggaagatttgtgagccccactggaataattctaaaatgcttttattatagtttttgattatgaaagtaatttattttcaaatgtaccagatttttgaaatactgaaaagattaagaaaaaaagtactagtattgccattagccagatatcctattgttaatattatgtatgtattctgaatgaatcagtagattttgaacaggtatcattcgttcatactgcctgcctgttttctcttctaatatatgaggaacatattttctcactatagaatgttcttctaaaacagtattctsgtagttgcctaacaccacatggaacaattttaaataaaaattctctggctaggcagtgtgtctcacgcctgtaatcccagcaccttgggaggttgaggtgggtggatcacctgaggtaggtagttggataccagcctgtccatcatggcaaaaccacatctgtactataaatacagcaattagccaggcgtggtgttgtgtacctgtaaatcccagctactcttaggaggctgaggcaggagaattgcttgaacccagacaggcagaggttgcagtgagccaagatcacgccactgcactccagcctgggcaacagagcaagacgtcgtctcaaaaaaaaaaaaaaaaaaaaagttagttacttccaggataaaggtactttatttttttttccaatttgtgtagtagaggaaatcaagctttaattaagagtggtctcacatgaatgtgcatactagagatttatatcattatagaaagagaagacacttttgagtttatccagtctgactcttgtaaatatgggagaattgtgacccatattattcctgtgactactgaaagtcaaacattttaatcgcagaaaagggactaacattcccagtgttcttgcccgtgtcatgttacatttgcaaatctgttacaacatatttttccttttctcaagacacgtcgaacatgtgtc

SEQ ID NO: 725591 - DNA, 723 bp, Homo sapiens
ccaagaggaaaactcttcccttacaatcttgccagtgccttgtccaatgcctggtgaagaggagatacgtatcaaatgtttactgaaaaaaaaaaatggacaaatctttttgtttccataaatgaaaattttaagtgtccttgtctgtggtttaaatttagcaattcttaccataaaatgtgtcttgagtatgcaatgtgattaaaagaggattttctatgttgtcttttctttattaaatgtgttatggcaaattaacttttcctcttgcaaggtagtccctggagaccaaggatttgagaaaaaaastgtgtgattgtgcagacttggaataacttatgctctcttctgccaggcctgactctcactttgggagttagcaaggcaacttgggaggctcactcaggcattgagatccctcgagaactgtgcagttcaggtctgtcaaactcggggctggttgctgggctgaacgttttttgaaaaatctgcttacctgaactcatttcattaaaaactcttagtctttggaatttaagatatttttaaagagctggtgttatagttacagaaatatttcttgcactaaatagtattttgttatgcaagcctgatttgtagatttagcaattggttttaacacatttagtagggagggcctgggttactctgtgctaaccagttcccacgagtttgaagactgaggaagtcagaaggatctgg

SEQ ID NO: 725592 - DNA, 1036 bp, Homo sapiens
tcctggcatcagacttcatggtggtatatcttcctagctactgagcctggtggcatatcttcctagctactgagcctggtggcatctcccagagcagtggaaagaccactggagggatgaggaatcatgatgtcaacagaagataagcaacgcaaccgctcccaaagttatgtttttgaggagtataaaagtagacgctttcctttcttcgtgcctttctgaattgggaccgcagaggaatgatgagcttggaggctgcagactgctgggaaccactacatggaaaatgggggtagagtatcagaggaccacggtgtaggtcctccagctggacatcaaagttcttacacaactatctgatcactgagaattagctcttaatgaccaggtcttattgaagaaattaccagtccttgcagaacttatagataatgagctaaatttgcagtactaattatcagaaaaagaagagcagtcttgccatggcaggcatggaaggagttcttttttacttccttactctccttactgctcaaacacctagtacagctggtaaggccagaattatgtaaccctcagtataaaaatgagagtatatacccagatgaataaaatccttcacctatagcaggaaaaaagtgtatttaaaattctcaaatgtaaagtacgactataaaattttgatgcaggtgccataaatgacatggaaatcagcatcgttagtatagagcagggaatagcaaactatagcttgcaggccaaatctagcccattttctgtttttctatggcctgtgagctaagaatagtttctccattttaaatgtaaaattgcaaaatattaagggattttatgtctggagtcatggcaygagaatctctatggatctgttcctcagcaaaacaactataactggtgaaaaacattaacaccaaaatcaaacaaaaacatttaaagctgctggaaagtgtcttaattgtatacaccaaaatgaaggaacatttaacgaagaacatttactaaatcttggtaaaaa

SEQ ID NO: 725593 - DNA, 1426 bp, Homo sapiens
atttaaccattcagagtatacatatatcaaatcatgctgaacactataaaaaatatagtatacaacttttagttgcgaaaaaaacatgatttattaaatatttctcccttcttcatcaactccctcttccttttgctacctcacagtctttggaattctcaatctgaaatgyacccatccctcaaaactcaatttaaatcccactggccacaccaacgctatgaaattcccctctctgaatcctaaagcacatatcctcattccctttatgctgttactttttctatgtttgccttgtctttccccaaaagctgtaagatccttaagggcaggagccacatatcactccctatcacctccaggacactcagcagagaaccttggatatatttaggaagaatccggttatactcaattgtgttaggcctcaatttacaaatcagatatgacaaataatatatcacaccaaaaagatcaagaaacttctccaggcattaactaaggcttagaaaaacacctattcagcttttcaaattatccctttgaagtaaggacttaaaggtgagaagaaaagatataatcaattggggaagtttagactgtcttctcactcttttttttttttttttttttttgagacagggtctggctctattgcccaggctggagtgcaatggtgcgatctcagctcactgcaacctctgcttcctggggtcaggcaatcctcctacctcagcctcctgaatagctgggactacaggtgcatgccaccacacacacggcaaatttttttattttttggtagagacggggtttctccatgttgcccaggctagtctcgaactcctgagctcaagcgatctgcctgccttggactcccaaagtattgggattacaggcctgagccaccacgcctggccaacttctcactcttaaaggcaaaatagtgaacagcaacttaaagatcaaaaaagctaaggatggaatattcaacaaggcatcacattcaacaacacaccactggtcacacacatactggctgaattccagactccctctctatggtaaaagagttctgcaggctctgatgttggctggaaaaaaactagacacctgctcttcccagcactgaaatatggccaaaaaaaaaaacataaacacacagcaaaatcagcaaacaaagctaagtagcatttaggcggggagcagtggctcacgcctgtaatcccagcactctgggagcccgagtcgggtggatcacttgaggtcaagagttcgagaccagcctggccaacatggtgaaactgcatctctactaaaaacacaaaaattagccagggtgcggtggtcgtgcacctatagtcccagctacccggaggccgaggcaggagactctcttgaacccggcaggtggaggttgcagtca

SEQ ID NO: 725594 - DNA, 1426 bp, Homo sapiens
atttaaccattcagagtatacatatatcaaatcatgctgaacactataaaaaatatagtatacaacttttagttgcgaaaaaaacatgatttattaaatatttctcccttcttcatcaactccctcttccttttgctacctcacagtctttggaattctcaatctgaaatgcacccatccctcaaaactcaatttaaatcccactggccacaccaaygctatgaaattcccctctctgaatcctaaagcacatatcctcattccctttatgctgttactttttctatgtttgccttgtctttccccaaaagctgtaagatccttaagggcaggagccacatatcactccctatcacctccaggacactcagcagagaaccttggatatatttaggaagaatccggttatactcaattgtgttaggcctcaatttacaaatcagatatgacaaataatatatcacaccaaaaagatcaagaaacttctccaggcattaactaaggcttagaaaaacacctattcagcttttcaaattatccctttgaagtaaggacttaaaggtgagaagaaaagatataatcaattggggaagtttagactgtcttctcactcttttttttttttttttttttttgagacagggtctggctctattgcccaggctggagtgcaatggtgcgatctcagctcactgcaacctctgcttcctggggtcaggcaatcctcctacctcagcctcctgaatagctgggactacaggtgcatgccaccacacacacggcaaatttttttattttttggtagagacggggtttctccatgttgcccaggctagtctcgaactcctgagctcaagcgatctgcctgccttggactcccaaagtattgggattacaggcctgagccaccacgcctggccaacttctcactcttaaaggcaaaatagtgaacagcaacttaaagatcaaaaaagctaaggatggaatattcaacaaggcatcacattcaacaacacaccactggtcacacacatactggctgaattccagactccctctctatggtaaaagagttctgcaggctctgatgttggctggaaaaaaactagacacctgctcttcccagcactgaaatatggccaaaaaaaaaaacataaacacacagcaaaatcagcaaacaaagctaagtagcatttaggcggggagcagtggctcacgcctgtaatcccagcactctgggagcccgagtcgggtggatcacttgaggtcaagagttcgagaccagcctggccaacatggtgaaactgcatctctactaaaaacacaaaaattagccagggtgcggtggtcgtgcacctatagtcccagctacccggaggccgaggcaggagactctcttgaacccggcaggtggaggttgcagtca

SEQ ID NO: 725595 - DNA, 405 bp, Homo sapiens
cccccccccccccccccgccaagcttctctcctcccgagccggcgctgtgcccggggcgctccgggaggagggaccaggatccggcgccggggcgcagatactgacaccaagggaatccgggtgccccccccccccamgccatgcgggcccccaggaaactggctccgccacctcggctgccccgtggccacggccccaatcctggccaggcggagattctgcggacattcaggtatctatctgggcacacagcctgggaggggaaagagcaaggagtgatggggaacatcgcaggggcaatagaaccccccaattctccctccacccgttttaggtctcaaatgcaggctgcttccctccccccactcaatttttggggttgtggcaagctaaaacaggttagg

SEQ ID NO: 725596 - DNA, 2498 bp, Homo sapiens
tgctagtccttgctgtgcagtttccagcataaggatggaccagcatggttgaagttttgacactgagctgcttggtaacaaaggaataggtaaagtaaaaatgagtttgcaacgaagtggatgctttaacaggtgggtgaaaggccccaagaacacgcgttagctctaaaattttcaagtcagtttagcaggtgaagtttatatcttcagctggatttgttctgagaatccacatctggtccaatcatccatcaacattcattcactcactcaacaaatatttattgagcatctaacacattccagacgctggtaggcaccaggtgggataaaaaaaaaaactcacatggtctctgccccttaaaaacttacattccattattaatttcatagttagttatttaattaaagttataagcactatgaaagagtatacaggagctaaggcaatatgtaatggggggttcttagtgtggagcatctgaaaggatgtctctgaggaagtgatatttaggttgaaatgtgaggtcaaagcagaaatgggatgtttagcaaagaacaagagaacattcttggcataagggaataatatctataatgtctctttaaagtggcaattagcctatgtttacacatctcctaagaaggaaaattctcttcctccagaggcaacacttggatcactctgttcttaagatcttctttatttccaaccaaaatctgtctctctgaagcttctgacaattggtctcaaatatatacttcttggggtcttgtaaaacaagccaagaccctcttcttgtgacagtagtgggtttcttcattaattaatgctcaattaatgtgttttctttatccattagggtcccacagagatttgctcagtatatagttgcttacttgtgcatttatgattcaacatccatctatgtccagaaagtattaggtctgttgagtagtagctattaaatatgtgtgaattaatggaatcaacagatgtatgaaatttaccttcttaacaatctttcttatgtaggaactggtgaagatttccccagcaaaaagtagaagctcagtgtttcatagatgaagactggggagattgcaaaagacccatccaggtactgatgcggtcttctgggaccaggaaccctactcatgcctcaagctacctgtgatgaaaagtccattgtctgccacctgtctggtagatctgtcctgaggattaatgagataatgtctggagagccatgtgaagcctttggaaggagattacagataaaagtctagttccagtgaattaggctactgataagagtactgaataacaaagctgtgatcaggcttttaaaacgttattttgttgatatttggttacagctacttttagacactgaactagccagtggaacaagttctttctgaggtccctgaactttaaacagtcactctagaacagtctttctcaaagtctcaacccgaggagaattgtctatatcaccagtgtgtttgttaaaaatataatttcctggccttcaacttcagaactacaaatttgcaaaacttcaggaagcaccatttatatgcaataccatgtgaatgatgccccctggtgttgttcaatgtggcagcagtgcttacctctgactgaatggggaattctgactgtgaggcctgggaatttacatttttagcaagcacttcaggtacattagcatcgagaaccaatgtcaacattgaaaaaagtgtgactgtcatttcctttgtaagttggaaggataggagattgctgggggagaagggagcacagctgaatgataatgagctcttcacactttcaccctctcactgagtaataataaactaattaggaaaataatagctaacatttattttgtaaatttattaatgtcaggcaaggtgcaaggcactttacaggcattatctcatttcatccttacaataacttcatgagatcagtgttaacattattatctccattttgtaaatgagcaaaatgaagtttggagaacatagttttggtataggataaatattcaataaatgttaactattataagcttatctgtgaaagtacttttaaaaatacaaatcctctactttagcattcagataagaatggcagcattttyttctccactccgactgcttcacttgactagccttaaaaaaaaaactaacaaaaaggatggcaacattgatgagagtaatgattgggaaatggaaactaggataagcttgcgtgagacgtttggcatagtatgaaggggataggcacctcaggaaagcagagtaacaaagtaataaggtgttgaattaaaatacttgctttttaaggtcaacctttttgtttccccatgagtaggggaggaaatttcattcttctatactgtgtccaaaactcagcaggtttcatagtgtttgtctacataagataaattacttagtataaataatttatcttatgaagtgagttg

SEQ ID NO: 725597 - DNA, 2498 bp, Homo sapiens
tgctagtccttgctgtgcagtttccagcataaggatggaccagcatggttgaagttttgacactgagctgcttggtaacaaaggaataggtaaagtaaaaatgagtttgcaacgaagtggatgctttaacaggtgggtgaaaggccccaagaacacgcgttagctctaaaattttcaagtcagtttagcaggtgaagtttatatcttcagctggatttgttctgagaatccacatctggtccaatcatccatcaacattcattcactcactcaacaaatatttattgagcatctaacacattccagacgctggtaggcaccaggtgggataaaaaaaaaaactcacatggtctctgccccttaaaaacttacattccattattaatttcatagttagttatttaattaaagttataagcactatgaaagagtatacaggagctaaggcaatatgtaatggggggttcttagtgtggagcatctgaaaggatgtctctgaggaagtgatatttaggttgaaatgtgaggtcaaagcagaaatgggatgtttagcaaagaacaagagaacattcttggcataagggaataatatctataatgtctctttaaagtggcaattagcctatgtttacacatctcctaagaaggaaaattctcttcctccagaggcaacacttggatcactctgttcttaagatcttctttatttccaaccaaaatctgtctctctgaagcttctgacaattggtctcaaatatatacttcttggggtcttgtaaaacaagccaagaccctcttcttgtgacagtagtgggtttcttcattaattaatgctcaattaatgtgttttctttatccattagggtcccacagagatttgctcagtatatagttgcttacttgtgcatttatgattcaacatccatctatgtccagaaagtattaggtctgttgagtagtagctattaaatatgtgtgaattaatggaatcaacagatgtatgaaatttaccttcttaacaatctttcttatgtaggaactggtgaagatttccccagcaaaaagtagaagctcagtgtttcatagatgaagactggggagattgcaaaagacccatccaggtactgatgcggtcttctgggaccaggaaccctactcatgcctcaagctacctgtgatgaaaagtccattgtctgccacctgtctggtagatctgtcctgaggattaatgagataatgtctggagagccatgtgaagcctttggaaggagattacagataaaagtctagttccagtgaattaggctactgataagagtactgaataacaaagctgtgatcaggcttttaaaacgttattttgttgatatttggttacagctacttttagacactgaactagccagtggaacaagttctttctgaggtccctgaactttaaacagtcactctagaacagtctttctcaaagtctcaacccgaggagaattgtctatatcaccagtgtgtttgttaaaaatataatttcctggccttcaacttcagaactacaaatttgcaaaacttcaggaagcaccatttatatgcaataccatgtgaatgatgccccctggtgttgttcaatgtggcagcagtgcttacctctgactgaatggggaattctgactgtgaggcctgggaatttacatttttagcaagcacttcaggtacattagcatcgagaaccaatgtcaacattgaaaaaagtgtgactgtcatttcctttgtaagttggaaggataggagattgctgggggagaagggagcacagctgaatgataatgagctcttcacactttcaccctctcactgagtaataataaactaattaggaaaataatagctaacatttattttgtaaatttattaatgtcaggcaaggtgcaaggcactttacaggcattatctcatttcatccttacaataacttcatgagatcagtgttaacattattatctccattttgtaaatgagcaaaatgaagtttggagaacatagttttggtataggataaatattcaataaatgttaactattataagcttatctgtgaaagtacttttaaaaatacaaatcctctactttagcattcagataagaatggcagcattttcttctccactccgactgcttcacttgactagccttaaaaaaaaaactaacaaaaaggatggcaacattgatgagagtaatgattgggaaatggaaactaggataagcttgcgtgagacgtttggcatagtatgaaggggataggcacctcaggaaagcagagtaacaaagtaataagktgttgaattaaaatacttgctttttaaggtcaacctttttgtttccccatgagtaggggaggaaatttcattcttctatactgtgtccaaaactcagcaggtttcatagtgtttgtctacataagataaattacttagtataaataatttatcttatgaagtgagttg

SEQ ID NO: 725598 - DNA, 640 bp, Homo sapiens
aaacctggagctgttgatgtacagctttaagctgataaaagaaaaaaaatctgtaaacattcatgtctctaaataattaaagaaactagaaaaaaatcaagccactccaaagtcaagaatgtcttttgtgaaattcatttcttattacatttccttcaagtttttatttaatttcacaaatgcattgaatttttaaaaggcatatattaaattacaaaaactatcatgtgctgaacccataaacttaaatattcaactaccaacagatcaagaataaataacatttccaggtggtcttaagttttttgttttttgagccagggtcttgctctgtcasccaggtgggagtgcggtggtgtgatcctggctcactgcagcctcaacctcctaagctcaagtgatcctcctgcctcgtttttttgatttttttgtagagacatggtctcactatgttgcccaagctggtctcaaactcctgagctcaagcaatcctcccaccttggactcccaaagtgttggggttacaggcgtgagccacggtgcctggttggtcttaagtttttaatcattgatttttcagacttgagctccagaacagtttaacattttatcataaaaagcagttaatgttgaataagac

SEQ ID NO: 725599 - DNA, 640 bp, Homo sapiens
aaacctggagctgttgatgtacagctttaagctgataaaagaaaaaaaatctgtaaacattcatgtctctaaataattaaagaaactagaaaaaaatcaagccactccaaagtcaagaatgtcttttgtgaaattcatttcttattacatttccttcaagtttttatttaatttcacaaatgcattgaatttttaaaaggcatatattaaattacaaaaactatcatgtgctgaacccataaacttaaatattcaactaccaacagatcaagaataaataacatttccaggtggtcttaagttttttgttttttgagccagggtcttgctctgtcacmcaggtgggagtgcggtggtgtgatcctggctcactgcagcctcaacctcctaagctcaagtgatcctcctgcctcgtttttttgatttttttgtagagacatggtctcactatgttgcccaagctggtctcaaactcctgagctcaagcaatcctcccaccttggactcccaaagtgttggggttacaggcgtgagccacggtgcctggttggtcttaagtttttaatcattgatttttcagacttgagctccagaacagtttaacattttatcataaaaagcagttaatgttgaataagac

SEQ ID NO: 725600 - DNA, 640 bp, Homo sapiens
aaacctggagctgttgatgtacagctttaagctgataaaagaaaaaaaatctgtaaacattcatgtctctaaataattaaagaaactagaaaaaaatcaagccactccaaagtcaagaatgtcttttgtgaaattcatttcttattacatttccttcaagtttttatttaatttcacaaatgcattgaatttttaaaaggcatatattaaattacaaaaactatcatgtgctgaacccataaacttaaatattcaactaccaacagatcaagaataaataacatttccaggtggtcttaagttttttgttttttgagccagggtcttgctctgtcaccyaggtgggagtgcggtggtgtgatcctggctcactgcagcctcaacctcctaagctcaagtgatcctcctgcctcgtttttttgatttttttgtagagacatggtctcactatgttgcccaagctggtctcaaactcctgagctcaagcaatcctcccaccttggactcccaaagtgttggggttacaggcgtgagccacggtgcctggttggtcttaagtttttaatcattgatttttcagacttgagctccagaacagtttaacattttatcataaaaagcagttaatgttgaataagac

SEQ ID NO: 725601 - DNA, 640 bp, Homo sapiens
aaacctggagctgttgatgtacagctttaagctgataaaagaaaaaaaatctgtaaacattcatgtctctaaataattaaagaaactagaaaaaaatcaagccactccaaagtcaagaatgtcttttgtgaaattcatttcttattacatttccttcaagtttttatttaatttcacaaatgcattgaatttttaaaaggcatatattaaattacaaaaactatcatgtgctgaacccataaacttaaatattcaactaccaacagatcaagaataaataacatttccaggtggtcttaagttttttgttttttgagccagggtcttgctctgtcacccmggtgggagtgcggtggtgtgatcctggctcactgcagcctcaacctcctaagctcaagtgatcctcctgcctcgtttttttgatttttttgtagagacatggtctcactatgttgcccaagctggtctcaaactcctgagctcaagcaatcctcccaccttggactcccaaagtgttggggttacaggcgtgagccacggtgcctggttggtcttaagtttttaatcattgatttttcagacttgagctccagaacagtttaacattttatcataaaaagcagttaatgttgaataagac

SEQ ID NO: 725602 - DNA, 640 bp, Homo sapiens
aaacctggagctgttgatgtacagctttaagctgataaaagaaaaaaaatctgtaaacattcatgtctctaaataattaaagaaactagaaaaaaatcaagccactccaaagtcaagaatgtcttttgtgaaattcatttcttattacatttccttcaagtttttatttaatttcacaaatgcattgaatttttaaaaggcatatattaaattacaaaaactatcatgtgctgaacccataaacttaaatattcaactaccaacagatcaagaataaataacatttccaggtggtcttaagttttttgttttttgagccagggtcttgctctgtcacccakgtgggagtgcggtggtgtgatcctggctcactgcagcctcaacctcctaagctcaagtgatcctcctgcctcgtttttttgatttttttgtagagacatggtctcactatgttgcccaagctggtctcaaactcctgagctcaagcaatcctcccaccttggactcccaaagtgttggggttacaggcgtgagccacggtgcctggttggtcttaagtttttaatcattgatttttcagacttgagctccagaacagtttaacattttatcataaaaagcagttaatgttgaataagac

SEQ ID NO: 725603 - DNA, 672 bp, Homo sapiens
agagtgagaacttgcctcaaaaaaaaaaaaaaaaaaaaaaaaaatgccgagcaccgtggctcgcacctaaaatctcagcactttgggaggccaaggcaaatggattacctgaagtcaggagtttaagaccagcctgagcaacatggtgaaaccctgtctctactaaaaatacaaaaatttgccaggtgtggtgtcacatgcctgtagtcccagctacttgggaggctgaggcaggagaattgcttgaatcccggagggggaggttgcagtgagctgagatcatgccactgtactctagcctgggcaacagagggagactctgtctcaaaaaacaaaacaaaacaaacaaaaaaaacaggtaggagaagaaaatgstaagtaaaaaaaaaaatgtatcatgagcagatgaaatctaatgtcaagaattcaatgttacatagtaaccactcattacaactgttcaaaaacaatgtatcataaatgataatgaaaagttcagttcactttgttgaagacaatcacacaatagtgtagcatccccttgttacatcagtctatggttgaatgaataaattgcctgaaaaccacgtctcttgcccactcaataactctcaaaataaccttgggaactctgaaaagaatctttttcttgctgtcacccaggctggaatg

SEQ ID NO: 725604 - DNA, 672 bp, Homo sapiens
agagtgagaacttgcctcaaaaaaaaaaaaaaaaaaaaaaaaaatgccgagcaccgtggctcgcacctaaaatctcagcactttgggaggccaaggcaaatggattacctgaagtcaggagtttaagaccagcctgagcaacatggtgaaaccctgtctctactaaaaatacaaaaatttgccaggtgtggtgtcacatgcctgtagtcccagctacttgggaggctgaggcaggagaattgcttgaatcccggagggggaggttgcagtgagctgagatcatgccactgtactctagcctgggcaacagagggagactctgtctcaaaaaacaaaacaaaacaaacaaaaaaaacaggtaggagaagaaaatgctaagtaaaaaaaaaaatgtatcatgagcagatgaaatctaatgtcaagaattcaatgttacatagtaaccactcattacaactgttcaaaaacaatgtatcataaatgataatgaaaagttcarttcactttgttgaagacaatcacacaatagtgtagcatccccttgttacatcagtctatggttgaatgaataaattgcctgaaaaccacgtctcttgcccactcaataactctcaaaataaccttgggaactctgaaaagaatctttttcttgctgtcacccaggctggaatg

SEQ ID NO: 725605 - DNA, 672 bp, Homo sapiens
agagtgagaacttgcctcaaaaaaaaaaaaaaaaaaaaaaaaaatgccgagcaccgtggctcgcacctaaaatctcagcactttgggaggccaaggcaaatggattacctgaagtcaggagtttaagaccagcctgagcaacatggtgaaaccctgtctctactaaaaatacaaaaatttgccaggtgtggtgtcacatgcctgtagtcccagctacttgggaggctgaggcaggagaattgcttgaatcccggagggggaggttgcagtgagctgagatcatgccactgtactctagcctgggcaacagagggagactctgtctcaaaaaacaaaacaaaacaaacaaaaaaaacaggtaggagaagaaaatgctaagtaaaaaaaaaaatgtatcatgagcagatgaaatctaatgtcaagaattcaatgttacatagtaaccactcattacaactgttcaaaaacaatgtatcataaatgataatgaaaagttcagttcactttgttgaagacaatcacacaatagtgtagcatccccttgttacatcagtctatggttgaatgaataaattgcctgaaaaccacgtctcttgcccactcrataactctcaaaataaccttgggaactctgaaaagaatctttttcttgctgtcacccaggctggaatg

SEQ ID NO: 725606 - DNA, 1507 bp, Homo sapiens
attcaagcaacaaatatcttttagctcctactgtgtgccaagtactgtcctaagagatgggactataacagtaagcaaaacaaagtttctgtttttctggacattaccaaagacaagcattaagcagataaaatatataatatatgatgtcaaataatgataaaggatcttgcaaaaaayaaaccaggataagacagtgagaatggggctgctgtaaatggagtatttagaaaacacttttgtttaacttgtatcatactggctctcaaagtgtggttccagaccaacagcatcacctgggaactggctagaaatgcacattatcaggcctcactcgacctgctgaatcagaaaataggggtcgggggatgagtccagcaatctatgccttaacaggccctccaagtgattctgatgcatgctgtagaggagtttcccacctctgttgcctcaaatagatgacaggtgtgcagtctaatactaattttcttagcccatagggatagctttagggttgggggttagagagatgccaggaacctccggaccaaagtagcgtacacccagacttttcagaaggcaaccaagtgggatcggctggcatgccacaggcctccaggtggcatggtaaaagtcatccattgatctgctgcaagaagctaagcgctgtcaaggacctgcttccgccctcacttccaggtgaagtttgtggtcccttgcacatggagactgcacagcacagagcgagacaggtgtagaagctactctagctgcaccacgacagctcttcataatgcatgtgttgggctccctagagcttctttcctttcctttccctttcccattcattcacatccattctttcactcactcgttcattcaattcattcatttataaatagagacagaggtctctctaggttgcccaggctggtctcaaactcctgggctcaagagatcctcttgccttggcttcccaaagtgctgggattacaggcatgaaccactgtgcccagcctcattattatttgaaatacatttatttttataaatttatttatttatttttgagacggattctcactctgtcacccaggctggagtgcagtggcgcaatcgcggctcactgcaacctccacctcctgggttcaagccattctcctgcctcagcctcccaagtagctgagactacaggtgcgtgccaccatgcccagctaatttttttatatttttagtagagacagggtttcaccatgttagctaggatgatctcgatctcctgacctcctgatccacccacctcgacctcccaaagtgctagggttacgggtgtgagccaccgcgcctggccattttgaaataagtttaaagaaaaagttgattagatttgaaacccattcacattatcacaagaaatatcaaaattacatttgttgatgacagaaattagattctttaagttcaactgctgtaaatttttaagtgattgtaaaaatgatttttaaag

SEQ ID NO: 725607 - DNA, 1507 bp, Homo sapiens
attcaagcaacaaatatcttttagctcctactgtgtgccaagtactgtcctaagagatgggactataacagtaagcaaaacaaagtttctgtttttctggacattaccaaagacaagcattaagcagataaaatatataatatatgatgtcaaataatgataaaggatcttgcaaaaaataaaccaggataagacagtgagaatggggctgctgtaaatggagtatttagaaaacacttttgtttaacttgtatcatactggctctcaaagtgtggttccagaccaacagcatcacctgggaactggctagaaatgcacattatcaggcctcactcgacctgctgaatcagaaaataggggtcgggggatgagtccagcaatctatgccttaacaggccctccaagtgattctgatgcatgctgtagaggagtttcccacctctgttgccycaaatagatgacaggtgtgcagtctaatactaattttcttagcccatagggatagctttagggttgggggttagagagatgccaggaacctccggaccaaagtagcgtacacccagacttttcagaaggcaaccaagtgggatcggctggcatgccacaggcctccaggtggcatggtaaaagtcatccattgatctgctgcaagaagctaagcgctgtcaaggacctgcttccgccctcacttccaggtgaagtttgtggtcccttgcacatggagactgcacagcacagagcgagacaggtgtagaagctactctagctgcaccacgacagctcttcataatgcatgtgttgggctccctagagcttctttcctttcctttccctttcccattcattcacatccattctttcactcactcgttcattcaattcattcatttataaatagagacagaggtctctctaggttgcccaggctggtctcaaactcctgggctcaagagatcctcttgccttggcttcccaaagtgctgggattacaggcatgaaccactgtgcccagcctcattattatttgaaatacatttatttttataaatttatttatttatttttgagacggattctcactctgtcacccaggctggagtgcagtggcgcaatcgcggctcactgcaacctccacctcctgggttcaagccattctcctgcctcagcctcccaagtagctgagactacaggtgcgtgccaccatgcccagctaatttttttatatttttagtagagacagggtttcaccatgttagctaggatgatctcgatctcctgacctcctgatccacccacctcgacctcccaaagtgctagggttacgggtgtgagccaccgcgcctggccattttgaaataagtttaaagaaaaagttgattagatttgaaacccattcacattatcacaagaaatatcaaaattacatttgttgatgacagaaattagattctttaagttcaactgctgtaaatttttaagtgattgtaaaaatgatttttaaag

SEQ ID NO: 725608 - DNA, 575 bp, Homo sapiens
aaactacataaatataatactaaaacaaataaaaaaccaatagtaataccatgaatggaaaaacacttaaactttataattaacctaacaaaatagrtgaggatgcttgatatcaacatttttattttttttttggtggttctagaaaataaaataatagaataaagtaaaataacagatatgaatattgaaaaagagaagataaaatatttctttgtgctgatattatagttatatacttagaaaatctggaactataggaaaaaaagattaaaatcagtaagacagtttggtgaggagactgaatcagaattaaataaataaaagtaaattgtttttctctacttaagcaataaaggacctaaaaatgagaatgggaaaaatacttccaagccattagtttttatcacctcaagaatacattctttaaaggaagtacttacctataatgtccaggccgaataatggccttgaactcctgggttcaaacaatcctcctgcctcagcctcctgagtagctgggactacaggtgcatgccactatgcctggctagaatacatttagttgtttaaaa

SEQ ID NO: 725609 - DNA, 575 bp, Homo sapiens
aaactacataaatataatactaaaacaaataaaaaaccaatagtaataccatgaatggaaaaacacttaaactttataattaacctaacaaaatagatgaggatgcttgatatcaacatttttattttttttttggtggttctagaaaataaaataatagaataaagtaaaataacagatatgaatattgaaaaagagaagataaaatatttctttgtgctgatattatagttatatacttagaaaatctggaactataggaaaaaaagattaaaatcagtaagacagtttggtgaggagactgaatcagaattaaataaataaaagtaaattgtttttctctacttaagcaataaaggacctaaaaatgagaatgggaaaaatacytccaagccattagtttttatcacctcaagaatacattctttaaaggaagtacttacctataatgtccaggccgaataatggccttgaactcctgggttcaaacaatcctcctgcctcagcctcctgagtagctgggactacaggtgcatgccactatgcctggctagaatacatttagttgtttaaaa

SEQ ID NO: 725610 - DNA, 2470 bp, Homo sapiens
cactcttacattgcacttgcctactggggatgacttttgcctgaagacctcccaagccctacagatctgtcttgattatagttttctccatctctccaggcagtgattttctattttattaaataaaataaaataaaaactagttttttttagagacagggtttgctatggtgcctaggctggtcttgaactcctggactcaagggatccttctgcctcagcctcatgagtagctggggttataggcacaggccacccaagcagtgactgctgagatgtaaatgtcttgggaaggtgggggaatctgctatcagacactagtggtcctggtaaagtagttggtgggaactactttaccagggccatttcctcccatggtgggaagagcttcgggtgggtgcttttaggtcttccaagcagaacaggaatctaatgcaggggattggaggttcttacggtcagcagaagcgctgggaagcagctgcttggtaggtgattcagtgtctccctcaacaagtgcccatcctgggtctctgtaacctcagcagggctgcctttgcgcttgcttgtagctccaaagcgggtgacttaatctcagtccctagatttgatctctgtccacctatctgcctgcatctgccaccagagatcaataaggacttctcccttctttcctccttccagatcttacacagcaagttcattggttgaccctaacccagaggcacacgggaacaggggttctgggaaatgtggcttttccctgcagggcagaggcgtggaaggtgaggctgggatgctcaggggccagtgagagcccagggcatttccttatctctgtccagggactgtggccttcctctccttcccccaatgccaccagcccatgagggcctggttatgggtgcagggtagaagatctgtgctgggtatggccatgctcaaatttccactctcctaccccagccttctccagtttccggggtctggttttctttcctctcttaaagtcctggagtgctctggtgtcagcgttggtgtcactcttaggggaatctgacccctgagactgggcaggccccattgtttgctcttatgggaccccgtgtgtctccttcatggcatgcatcccatctgcagctcagtgcttatctgtggaaggacttgtttactgttctgggtccctgctcggctaaattccacgaggtcaggaattgtgtctttcttgttcacatctctattcccagaattcctcacagcgtggccctcaaaaaatattgtttgagtggaggggtaaagtcacgttgtccattttttttcaaagctagatcactgcttaggaagcttggtaggacagttaatgatgaaatttaataagaatggttcatcatttctccctagtggtaaagaactccaccatttacaaatcgctttctctgtattcattcgttcggtcattcatgcattcatctaggaagtctttttgaaatgtctaccatgtacctgacagagtaggtctgctgtttactgagtgattttacaaacttaagataggctcagcaccatggagggatrgcttatttctaagtggctgagaatcaacatatacctaccttattactttgccaaaggccccagcactgggcctttgggtgcctcaaggaatatgtaaatgtaaacaaaataagtgacggtagtaattattatcagttgtcctggttataccctctaagtggtagattcagagaaaatgagttttaggaatagagtcatcagtaaaaactgatgattgaaagcaggtataattatgatttttagcgtcttcactcctcttggtgcaaatgcagtgtatttagaattgattctgtgcttttgaaaatatcagcctgctgaaatcccttattagcaggaactcactgtggattaaatgaaattctatagcctaaggaaatgtatctgtggctcaatagtctggacacatgagaagtgttacacaagggaatgtgatttatgaaaaagttttctgacttggctgcagttttccttgagtccataaatgccaaaacgtttaggcaatagtctaaatatttacctgctgggcgtgaactgtcatagtaagggctgggtgttggaaagccacaagcggtgggggtgaaggggcgtccttgacccatgctgccccacggctctctctcgggcctcccttcccgacccctctccctcccaccccttcatcgggctgctttctggagatctcaggcctgtgccagccccacctctgctgggcaaagcaagtgaggagatgctgcctctcaaaagagagacccagcagagccctgaatcttgcagctagcttggcatgtttttagttccagggtccaatcaacactaggtctcccagctgtaagagaactccctgagacacttttttgtggctttgttgcaaggctaaaaggacagttgtgtgatc

SEQ ID NO: 725611 - DNA, 1170 bp, Homo sapiens
taagtcaagacttttcaatggctgccctgattctgccaatcaacttttaaatattagaacagaggggtagccaggagtggaaaggattgacaatgttcagcttataatgggcacagcagtctaagcataatcaccacaggctggaaacaaccctgcgtccatcaccaatggagagagaaacacagtgttgtctacccatgcagtggaatatggctcagcaacaaacaggaacaactatcaatgtgcacagtaccattcaggaatccagggatgagactgacacggcggaccacaggcctccttcatataaccttccagaataggcaaaaccatgctatggggatagatattaacgcagcggttgcctaaggggtgggctgactggagaattcactagggtgaaggaaataccttaatttagggggtggttgatgggcatatatacaagtcaaaacctactaagctatacacttaacatctgtccattttactatgtggtcattatgcctccactttaaaaaatctgtgaaagctgggtacagtggctcacccctgtaatcccagcactttgggaggccgaggcgatggatcacctggggtcaggagttcgagaccagcctgaccaacatggtgaaaccccatctctactaaaaatacaaaattagccaggtgtggtggtgcatgcctgtaatcccagctacctgggaggctgaggcaggagaatcacttgaacccgggatgcggagattgcagtgagcygagatcacgccactgtactccaccctgggcgacagagcgaaactctgtaaataaataaataaataaataaagagctgggtgcggtggcttatgcctgcaatcctagcactttgggagggcgggtggatcacaaggtcaggagatcgagaccagcctggccaacatggtgaaatcccatatctactaaaaatacaaaaataagcggggcatggtggtacccgcctgtagtcccagctactcaggaggctgaggcaggagaatcgcttgaatctgggaggtggaggttgcagcaagcagagatcgcgccactgcactccagcctgggcaacagagcaagactccatctcaaaaaaaaaaaaatctgtgaaattatttaaaatgggtccaaagacagggcagaaatatctgatg

SEQ ID NO: 725612 - DNA, 578 bp, Homo sapiens
taaaaattggcactagtgtccattgtgaaaaagattctggtgaattgaataggctttcctttctgcttagaaaagcatggtacatcaaaatgctccccttccacagaaaagaataaccacacagcatgaggaatttaagcattctgtcctctgtgttgggaataatgacaaatcatcagcaccttttgctgccagggctcaccctaacctyatactctaagattcagaatctcctggctcatgggcatagggtaaaactgctttagccaaatgattttactcagggttgactcagacagaagaatgccagattggcatagtatggtaccatttaaaattcaggcaattgaaggttaatttccccagtgttaactgcaaagcatggaaattaaatgaacttaatgtactttacaactttaaagtagcacaccactgttaaattgttccgtatgcctctgctcacttataaaatgtttgagagtgcttcataccactactagtgatacggtggttatgaattgataaaaataggattttcaggagaaacagggacctgattcccttcaatatcattgaaa

SEQ ID NO: 725613 - DNA, 1354 bp, Homo sapiens
ttagaaatgcaatagcgtaataaaaacatgactgaaagtttcttcctgagcggggatcacttctctcatttagaggcttttttcactgcagacaagtttctgtaacaaccttaaatatgtagacttgaacgtagtacaagcacagctttctagatcatttgaacacaaaattttcacacaattactcttgttattacgccacatgtggtggaaattgaagtaagcttcttcagttatttctgtccagattaatcatgtaagaatatactgatcagactgagtactgggatagaaactcagttctgctgctagtagtataaacttacataatttaaacaacatcgacaataaaatgggactctttagtggttaagatgaagctctgcaatttactagctgtgtctatgtgcctttgggtgtgttactttttgcaactcagtctcctcatctgttaaatggggaaaataacccctgcctcatagagtatatgaaaatataatgtgtataaagcacactttagagtatctaacatatagcaagcattcactcaacagtggctgctcttctgagaagccagcctgaacagattaggttgtttttgaaggtctctaactgtcaatcaagaatccatgattccaccatccaagacatgaaggtcataaaaagagatgagatcattgaaatgaatatgatattgaggatttaattaaaaaaaaatttaataaaaaatttaaaaaacaagtgaatacccttattttttcttatttaattattttatgtgtaaagcccagtttaattcatatagctctttataagagatcgtataggtttagaagaaatgacaatagtgtcttattatgaatttagaaattatccattccaatctacatattaacaaataagttattctaaacatattcttagaagttacwtatgtttcactggcaaaactgagtgggtgtttttctggttcaaaggccactcctagagaaacagaaatgttaacttatgttataaaagcagaatgttggctactgtccaaagcagaaaagaactattaacaaattaattactttgggttttcaaattatatttctaatataaagtactgttttagcttaagcaaatatagattgaaatttgtactccattccaaagtgtgattgaaggaaatttttggaagctatagaggtttgaataattttagttcacagaaaagtagtgaggacagtgaagaacagtccccagtgaagaagaaataatcaaaattaactaaagaaacattaagcaggaaactaattggtcgacttgacaaccaatcctcctaattgtaaaaatcatttcagcttatttg

SEQ ID NO: 725614 - DNA, 611 bp, Homo sapiens
atatagtatccttagggcttagcaaaattcttggtcacataatgggcatttaagaagatacatacttcttatttgttgagatagataaaaggcaagttacggaaagtagaaaggcagaaaccagaccaaaataaagtaatacatctaaattttttcttacatgaaagatgtttaaagcaaaatatagttggtcctttgtaatatgggttctactttcttgaatcctaccatccaaagttaaaaaacaattaggaaacaattccacaaaattgcaaaaagcaaaatttgaattttcagacaccaagaactatgttaaatccatgcaaataagtaatttgtaggcattgcattggtactataagtaatcagagatgattaaagtatacaggagggtgttcataagttatatgcaaatactacacaccattttatgtaagagacttgagcatctgcagattttagtatttgttggggtcctagaaacaatcccccaagtacactgaatgatgactagtcaaagttaagaataaaacaccagacaaacttatctgcctaatacttayattgccaccattgttctcccacttccatgtttaaatcagtaaaattta

SEQ ID NO: 725615 - DNA, 1847 bp, Homo sapiens
  misc_feature 1747, 1748, 1749, 1750, 1751, 1752, 1753, 1754, 1755, 1756,1757, 1758, 1759, 1760, 1761, 1762, 1763, 1764, 1765, 1766,1767, 1768, 1769, 1770, 1771, 1772, 1773, 1774, 1775, 1776,1777, 1778, 1779, 1780, 1781, 1782, 1783, 1784, 1785: n = A,T,C or G
  misc_feature 1786, 1787, 1788, 1789, 1790, 1791, 1792, 1793, 1794, 1795,1796, 1797, 1798, 1799, 1800, 1801, 1802, 1803, 1804, 1805,1806, 1807, 1808, 1809, 1810, 1811, 1812, 1813, 1814, 1815,1816, 1817, 1818, 1819, 1820, 1821, 1822, 1823, 1824: n = A,T,C or G
  misc_feature 1825, 1826, 1827, 1828, 1829, 1830, 1831, 1832, 1833, 1834,1835, 1836, 1837, 1838, 1839, 1840, 1841, 1842, 1843, 1844,1845, 1846: n = A,T,C or G
ggatccagagagcagtgaggacccccattcccctccttgggaacagaatccaaagtggagagggaagaaggtggctgcatggcaagcccaccacaacgggatagagccttggagtcaaagtgaagaaaacaaaatcatgtgacattatccacacacttgagtttgtccacctggagccctacatcttaaataattcttttcttcttttttttttttttgagatggagtctccctgtgtctcccaggctggagtgcagtggcgcaatctcggctcaccacaacctccgcctcctgggttcaggtgattctcctgcctcagcctcccgagtagctgagattagaggtatatgccatgacgcccagctaatttttgtatttttagtagagacagggtttcaccatgttggccaggatgatcttgaactcctgactttgtgatccacccgcctcagtctcccaaagtgctaggattacaggtgtgagccactgcgcccggctaataattctttttttttttttttctttgtttgagatggagtcttgctctgttgcccaggctggagtgcaatggagcgatcttggctcactgcaacctccgcctcccaggttcaagcaattctcccacctcagcctcccaagtagctaggattacaggcatgcgccaccatgcccggctaatttttgtatttttagtagagatggggttttcaccatgttggcctggctagtcttgaactcctgacctcaggtgatccacccgcctcagcctcccaaagtgctgggattacaagcctgagccaccacgcccggccaataattcttataatgacaatcaactcactcccaagccatctatttacatttatatttttatggtgccccaaatgatggcgatctgttgttttacatgtatatcttcaatctacagaaccataccctctgcctcacgagggtgagctaaaacattattgtggcctggtggcctttggagaaccaacttgtggtttgttgggaaaggacacactgtgttttccatgagtcactaggagagcagagaaataacaggatccaacacagtcttatggacccagcctcacactctccactttcctctgttggcgtcatctgcaggcagctgctggtggcagagatggctgccaaccctaagcttatataacatcctctcctcaaccttggagggatgggagtctccacagcagctcacctacagagctggctctgtctggatgtcacatctgtccttgaaacagtcgccatggccaagatggtggagggttctaattagctgggttaaattcccacctctgctaggaggggtggaactggcctgtccagaacagcatgagaatagggaagaagcaatttcccaagaaaatgagagttcagttactggaagatgaaggatgaatgctggagggatgggaaaacaccagatatcttcctcaggtaaacttcaagctggtagacccttcctttcccacccttccccagaaacaattgtgcccagagcatgcagagctcgttggtgtggagaagacactgatatcttgttcttggaaaattccaagtgtgtttacagactgaggagcctcaggcaarggggtcccccacctggcatgactgggggccctgatggacatgctgccagtttctgctaaactcagaatgcacattcttagaatcctgtgtattggcttgggcgtggcggcacatgtgttttaatccnnnnnnnnnnnnnnnnnnnnnnnnnnnnnnnnnnnnnnnnnnnnnnnnnnnnnnnnnnnnnnnnnnnnnnnnnnnnnnnnnnnnnnnnnnnnnnnnnnnna

SEQ ID NO: 725616 - DNA, 267 bp, Homo sapiens
ctcattttcaatatatgatattgtcaactttttttcccctatgggttcattggaatgtaaacccgggagtggaattgctagatcataagsaaattccatatctaactttttaaggaactgccctcctgttttccacagagggtgtatcattttacattcccaccagcaaggcacaagggttctaatttctagatatccttgctgatatggtttaggtctgtgtccctgcccaaatctcatgtctaattgtaatccccagtgttggag

SEQ ID NO: 725617 - DNA, 267 bp, Homo sapiens
ctcattttcaatatatgatattgtcaactttttttcccctatgggttcattggaatgtaaacccgggagtggaattgctagatcataaggaaattccatatctaactttttaaggaactgccctcctgttttccacaragggtgtatcattttacattcccaccagcaaggcacaagggttctaatttctagatatccttgctgatatggtttaggtctgtgtccctgcccaaatctcatgtctaattgtaatccccagtgttggag

SEQ ID NO: 725618 - DNA, 663 bp, Homo sapiens
tttgctaaggcttttttctatatagaattattacatttgtaaagtaaaagataaaagcagcattttcctcttactatacctaatacttctgcatcatttctctcaaagcgaaaagaggatgctttgaagaaaacatgtgctcctccctagattctgagagaatggctcaaatttcaggtgctaatatatttttcgcttgacttaaaaattaagagcaagttataattttttccaaatataaaattctaaataaaaatcataatttaatctcaaataggtaacattatacgtatcttaaattgaaagaaaaaagaaattttttcaccaaattgccatggtgttataaagatcaaagacagctgttagaagcgaaccccctgcaaggttctaatgcatgcggttctgtgcctgtcagcggggtgagcgccaccacgtggtgccctcgtctagaccctcacccctagctactagccaacacacaccagcagaggctgctccacgtgcacgtgtgtcaacgaatgttagcagcgtggcatgcactctgatgtgtgcagagagaagtctgttggagagtggagttatgtactgtccagtcctcggaggcagagttcatgcctcccacgtgtgtccctcttgcagtrcaaagcagggtcacatgcactg

SEQ ID NO: 725619 - DNA, 644 bp, Homo sapiens
tgtgtgagagacatattgggcaagcatccaattatgtcattgccatacttacagtcctcacagcttttgataaggaaaaatgttctacccagtttccagtggaactatgttgtgatcctgtgacactgtcgtctgcagccatggccgaaggaatctgagtcaagggcagcaaaacaaaggctgcctgcttatggtataggaggtcaatctaggggctagaagcattgcccaaatagaaatgagctggggccatcagactatcactcttggyggtgtgaactgggaaaatctggacaaatcaggctattaccaggaacagaagctgaaaggcattcaggtagagagaatgagagtctggaaggatcactatggacaaggagatgacagttaggaatcagcagaggctatactagacaaaggtaaacaaggagaagggtcctaagagatctggaagtctggaggaaattcccatttccacatgccctcatattcttacaattaccttccttcttgttggtttttattcattatatcagaagcatctaattaaatcagggccacattttataagtagacttgatctattttgtgtataccaaatttgttgacctgagtaaagattgagaaattccttttgagttcat

SEQ ID NO: 725620 - DNA, 602 bp, Homo sapiens
aagcagcagagacagcaaaaccaaatcatgtcagcttggcatgtacttccctctgaaatagctaagaatccatttctgtaaaagcactgattatcagaaaaccttattggcctggccacctttggttcaaaccctcacattaataatgtggacagtagtatgaggtgtgccaaaggtggatgactcagcacctaagtgatgacacctaattacgaataggttcattaaagcagaccccctggggacctttgcttgaggatccttacagtcagaattcctgaatatatttgaaaataataattgcatctttattttcatatgttctgtatggtttggctgacttccccctcaaagtctgagttagagttttccttaatttatgtgatgggtttggtctttttggattccagaaagagctgggtgtggtttggagctrcactcagagtcacacaaaaccacagcctttagagaacccacaggaaggctttggggcacgtcctgattcttgacatttctcatcagtgctgactttgtatcccttaggagttcacaattcataaccactgaaatattaaaatacaaaaagttttggaaggatgaga

SEQ ID NO: 725621 - DNA, 625 bp, Homo sapiens
ttcagaaccatgagaaaaaaaaattcttttgttttaaaccagtttaggttcttcgttacatccaccctgggaatctcacagtagggccttagagctattctaggagtctgtccttttacttcaattgtcacactgatttataaagaatattaaaactaagaataaagggaaatttatatcttccaaatgtcctccaggaagcaaagctttgaacatttcttggttaagagatttaaaattatatatactagtaaaattatgaaacttcatctattatcatttttccctcacayctggactaatgccagggagaaggaaaggctgaaaaggttagtgatcagtgtgtgtgttaggataatttcttgagatgttatcctggcttggcatgatactgtattattccgtctcacatttccattccccagcccagttcaagcaggctgcctgggccttggtttttgcccgtctagcttacttttgaagggctatgctagaaaggagatgcctaaagctgcacttccaattgtttataaatgcccaaagacatataaaaagttatacaagtaaccctgataggacttgagccagagagagagtgaaatacagagacagacacagaaaaaga

SEQ ID NO: 725622 - DNA, 630 bp, Homo sapiens
tccatccctcaaacactaaaagaaaaaaatcagatataaatctttattgttttcattgaaaattggtttccaayattggttaggcacttatgactcttactggttgtattagtctgttctcacgctgcaaataaagacatacccgagactgggtaatttataaaggaaagaggtttaattgactgacagttacccatggctggggaggcctcaggaaacttacagtcatggcagaaggcacctcttcacagggcagcaggagagagaatgagtgccagcaggagaaatgccagatgcttacaaaaccatcagatctcatgagaactatcacgagaacagcatggaggaaaccacccgcatgattcagttgcctcccaccaggtccttccaatgacatgtggggattatggggtttacaattcaagatgagatttgggtgaggacaatgccaaaccatatcactcccttacttgatttctttcctggtcctatctcaaacccttctggttttctatcttaaatctttcttttcgctgtatttttcttcatctccttcttccataagaaaaatagaggcattccgaattaaaagtgagactgatttttgcctatcaaagtgacaaggattta

SEQ ID NO: 725623 - DNA, 630 bp, Homo sapiens
tccatccctcaaacactaaaagaaaaaaatcagatataaatctttattgttttcattgaaaattggtttccaacattggttaggcacttatgactcttactggttgtattagtctgttctcacgctgcaaataaagacatacccgagactgggtaatttataaaggaaagaggtttaattgactgacagttacccatggctggggaggcctcaggaaacttacartcatggcagaaggcacctcttcacagggcagcaggagagagaatgagtgccagcaggagaaatgccagatgcttacaaaaccatcagatctcatgagaactatcacgagaacagcatggaggaaaccacccgcatgattcagttgcctcccaccaggtccttccaatgacatgtggggattatggggtttacaattcaagatgagatttgggtgaggacaatgccaaaccatatcactcccttacttgatttctttcctggtcctatctcaaacccttctggttttctatcttaaatctttcttttcgctgtatttttcttcatctccttcttccataagaaaaatagaggcattccgaattaaaagtgagactgatttttgcctatcaaagtgacaaggattta

SEQ ID NO: 725624 - DNA, 630 bp, Homo sapiens
tccatccctcaaacactaaaagaaaaaaatcagatataaatctttattgttttcattgaaaattggtttccaacattggttaggcacttatgactcttactggttgtattagtctgttctcacgctgcaaataaagacatacccgagactgggtaatttataaaggaaagaggtttaattgactgacagttacccatggctggggaggcctcaggaaacttacagtcatggcagaaggcacctcttcacagggcagcaggagagagaatgagtgccagcaggagaaatgccagatgcttacaaaaccatcagatctcatgagaactatcacgagaacagcatggaggaaaccacccgcatgattcagttgcctcccaccaggtccttccaatgacatgtggggattatggggtttacaattcaagatgagatttgggtgaggacaatgccaaaccatatcactcccttacttgatttctttyctggtcctatctcaaacccttctggttttctatcttaaatctttcttttcgctgtatttttcttcatctccttcttccataagaaaaatagaggcattccgaattaaaagtgagactgatttttgcctatcaaagtgacaaggattta

SEQ ID NO: 725625 - DNA, 630 bp, Homo sapiens
tccatccctcaaacactaaaagaaaaaaatcagatataaatctttattgttttcattgaaaattggtttccaacattggttaggcacttatgactcttactggttgtattagtctgttctcacgctgcaaataaagacatacccgagactgggtaatttataaaggaaagaggtttaattgactgacagttacccatggctggggaggcctcaggaaacttacagtcatggcagaaggcacctcttcacagggcagcaggagagagaatgagtgccagcaggagaaatgccagatgcttacaaaaccatcagatctcatgagaactatcacgagaacagcatggaggaaaccacccgcatgattcagttgcctcccaccaggtccttccaatgacatgtggggattatggggtttacaattcaagatgagatttgggtgaggacaatgccaaaccatatcactcccttacttgatttctttcctggtcctatctcaaacccttctggttttctatcttaaatctttcttttcgctgtatttttcttcatctccttcttccataagaaaaatagaggcattccraattaaaagtgagactgatttttgcctatcaaagtgacaaggattta

SEQ ID NO: 725626 - DNA, 646 bp, Homo sapiens
ttgctgaattttttccagatttgaaaaaagacaggagtcttataaaagtagcaccttaagcaggatgaatacttaggagtgagactacaaaacaagaaagacaaagacaaaatctaagaggctgctacagagcaaaacagagatcaccctccatgaaattacaattacaatttcaaacagtagcagttatctaaaacagtagcagttatcagaatgataaaataacattttcaaatgctgaggaaaaaggtcaacctaaaattgtataagcaactaaatattactccagcaataaagacaaagtaaagatattctggaatgttaaaatattgaaagggtttactactcacagatatttactgaaaattcttcctacatatgaaggagaagaatattgaaaaacatgtaaagaraaaacatttagccaaaaaattacaaatttattaaaaattcagagtaaatactgactataaatactaataattctctgtgataataactgctttagaaggtacatgtgaaatactagacaacaatcacctgaaagatggagagggggatcttggagttcaaatattctaaggttcaggaggggggattaaggttctggtttagatatttttttaaacatctgtgttaaatttta

SEQ ID NO: 725627 - DNA, 917 bp, Homo sapiens
ctctagtcacagctctttcctgaagaaatgcattttagcaggtcagcatgctccatggctctagaatttaaaaagtgtgagcgcaaggaggagtgttgaatctggcctatgtcattcaaagtcagagggttatatttattatacctgaaaggataggagttgagaatttattacacaatgtgaaaaaataactacttacagcaagtgattaaaaacaatggtgcacacatcgacctgtttaacattaaagaatgatttaccatccaggcgcggtggctcacgcctataatcccagtactttgggaggccaaggcgggcggatcacgaggtcaggagatagataccatcctggccaacatggtgaaaccccgtctctactaaaaatacaaaaattagccgggtgtggtggcgcatgcctgtagtcccagcctwctcaggaggctgaggcaggagaatcacttgaacctgggaggcagaggctgcagtgggctgagattgtgccactgcactccagcctggtgacagagtgagactgtctcaaaaaaaaaaggagaatgatttacctttcctaaaattatggactagatttccaagttgttccagccagatttctctacagttaccgacagcagactttgagggtgactgcatccacccttagttgtcatgaagcctcctagctcccttttggtgtagacaagtatgtttgtcttgggagagattgtgggcctccttctgaatttgatgagggtgcttgtctgtcttatttatctgcctagagcacgtgggtccctgagatatcgcagataccccttgtctttcgccatcggttctccacttgaaggtcctgtggcactttcccagaactgtgtaggaggtgcctttgtaggaatggcctgtggacattgattgagagc

SEQ ID NO: 725628 - DNA, 603 bp, Homo sapiens
tgagaccagaacccagtaagctgatggggagtgtgttgaagagcttccaatttaactcaatttgcctgtttagctgatttcactactgtgaactttgaaacagcaagattcctcctatgatcatatccccacctccaaatttacttctctttatttcatctrtagaaataacctctgggttctgatacacttaggagcttctagggcttcccttatctttactgtctactgtctagatatgtatggaatctagttgaactatcccctgtgtcagtaaaagaagctaactaaatggtatctctgggtctgaagatttcttgattcctacggctttcatttacgcaaaaggaaagaacttgattttttttctgtatattatgaataaaatctcatttttggcgcttttatgagatactctaatacatatttaaattgcttttcatttattcttggattctagaataatacgttagtaagtacaaaaccaaaccaacaaagaacctcaaaactactagccctacactgattacacataaagactggactctaacattgctctgtgttctaaggggcctgggcttcatttttaagattcaagaaaaa

SEQ ID NO: 725629 - DNA, 2428 bp, Homo sapiens
taacggcaaaagatgacagccctttgttattttaatttgtattttttagtaatttattagtcctttatgtttcctcttccgtaaattctgtattcatgtcctttgccattttgttattgagatgtcaccatttttcctactgttgaataaaagatttttatgtattagggatactagtactttttcggtcatattagtagcaaatctttttccttctttgtagtttgtcttttaattttgctggtgataattttacctataatctatacgatgtaaatttttgataatttccttaagcccccaaatcagtaaatttattgataattcccttacgcccccaaatcagttaaatagttacctatattttctatttttaaaaaattattttcttttataaattaagatacaatttatattctatttttaatggtttcctttcactttttatacttattaatagctagaaataattttgtgatataatatggagtcaggcccatttgttatgcaatttattccttcccccatcaacttgtgtggatattttgtcacatggagtagatctatgatattctaagaagtatagttgttcagagtttagactctgtgatcaaccacatctgggttcagatcctagctctgccatctttttggtcctgggcaagttacttagcccatctaattctcagtttccccatctgtaaaagactgattgttgggaggattccattatcctgagtatgcagaacagtcagcatgggctgtgctacctaggaaacatttagtacagtatgcattcactactagaattatgactatgatatcgatgaagttattcataacttttttttttgagatggagtctcgttcccattgcgcaggctggagggcagtggcgcaatctcggcgccctacagcctccgcctcctgggtttaagcgattctcctgcctcaccctctggagttgtagtagctgggactacaggcacgcgccaccacgcccagctaatttttgtatttttagtagagtcagggtttcaccatgttggccaggatggtctcgatctcctgacctcgtgatccgcctgccttagcctcccagagtgctgggattacaggcatgagccaccacacccggccggttattcataactttaataaattcggatattcttgaatggtgcaggaatactcacttcaaacttttaatgagttactgggcatatggtcaaaaaataaaacaaagctgcattcacatctccacagtggctgtttccttgtctcactcacaggtaagtgatacgcttccacatccacagggcacacaattcgtatcttgccttaaaaggaagaactgaaaggatataaaaccagattatctcaaaggttagagtgatttaggagtagggcttttctgtattactttaatctttttggtttgttttcgtttttgttttgagacgaggtctggctctgtcatccaggctggagtgcagtggcacgatcacagctcaccgcaacctccgccttcttggctcaagccatcctcccacctcagcctcccgagtagctgggactacaagtatgtgccaccgtgcctggctaatttttgaattttctgtagagacaaggttttgccatgttgtgcaggctgctctcaaactcctgggctcaagctatcctcctgcgttgacctctcaaagtgctgagattataggcatgcaccacaacacctggcccttctgtattaccttaatttttgacagtaattatgcctactgaggggaaaacaataaagatgtacccttggaaaaagtgcttacctcaatgaagttacagattaatcatcatccaagatttagaatttattgcaaatagtaaaaacattaacacttaaatcttcaaatacggagaagccttttaggaaccatttcaaggtatgcagaaatttggtgtgatctcaattttatttaaatcttctttcatatttctttatgcatgtgtataccttaattataggktgtaaaattacaagtatatatatatattttgagacagggtctcattttgttgctcaggctggagtgcagtggcatgattacagctcaccacagctttgacccttccaggctcctcctgcctcagtgatcctcctgcctcagccccctgagtagctgggactacaggcatgtgccgccaatgcccggcgaatttttaaattttttgtagagacatggtccctctatgtctccagctccttggctcaagcaatcctcttcccttggcttccccgtgcctgaattacaggcatgagccaccacgcctggcctaattatagttcttatgatgtggagctcaatcatctattactaaattatttcatagttattttctttctcttttttaaaaaattaagatatcattaaca

SEQ ID NO: 725630 - DNA, 1456 bp, Homo sapiens
tacaaaatatataatctctttaagatacaagcaaatatagatgatagatactgcagttttcttttttatcctataataaagagtggtttgtttccactatagagttggttacttctgacttgttcctctggaggtttatattaaattatctggcttcccatcacttcagcagaagatggaaaaaaagccgtttatttttctgtgatcatgacccatttcctcttatagcaatggcctacaggatctgctggcaagcaagaagggcaaaccagaaactaaaaagattgggtatctatggaagatgagtgaaaacagagtatgcgtctgtccaattctgtagcatatactatgctaccataacataggaatcaatcagtcaccggctcagaaaggtggtggcacaaagatgttataaggtcctggattataataatgtgttgcctctttttgcagatcccaagttgcctaccttcatttacctagagctataaatgttgggcccaataaagaaagtgacagagcctattaggcagatatttaaagataacagtaatttaagatggtgtcagaaaagaaataacaatcttagaacactggcttctctgaatatctgttccacctctgctgaagcctaatctgacacagcaggaattagagcacactaaggtacacacagccacctaagaggccaggatttcatctggacttgtatcctgtagctggctcagctgcagcctatcttggggatggtcaacttagagaaaactaatggatccttataaatcatgaaatccttataagtcatagtcttacccagagtagagatcctctggacttggtaagaaggcagcttcaatgagaaagttatgagtctttattctcttctctttagttctgaatttggctgcactgatttctcccactttttttcttgctggaactttggacttttaccttacctctccaatgtcatggggctttccagactttctagagacctgtatttatacatgtaaaaaacaatgcaacctctgcaaataaatagagtaatatgacagtccatgatttagcaacaataaaagaaattgctgacagctgtgctagtgagaggatttgacataatttctcaaacagaatcttccaattttattattggaagagatcttagagacagcttgcgattattaaaaaaacttcaatgaatcgtttaaaataatgacattcatctcatgtttgtgggccacattgagaagtacaggaataagaaagcttaatataatattatttaggttcaattggcttgaatattagactcttaaaatggaactcattatttgtgtttaataatgaggactctaartgccctgaaggaatgtccacgtcttatacatgtttgaattattagcacctaactcaggtcttggcacttaacatttaataaataataatgaagata

SEQ ID NO: 725631 - DNA, 1175 bp, Homo sapiens
ttgctttcactttagatcatggtctgttgctccatttattctaaaccctttttttagtattggcagttcttctatgtttgtattcaaattcacattttatgatcaatttatagatgtatttaaacattttaaatttatatttgattgaaactttccagtgaattttttaaactagatattgttgttctataatggaatgacttcaaccgggagcctaaggcagattctgtcatgtagagttccatgagcatatgtagtatttttaaatgaattaaatttgcataatttttgacatggcattaccgttcagttcaattctctgttatcttacagatagtccacgcttttggacttacagatagtgtattggacttttctggcctcacagagtggtgagttttcagtcctcatggaactggcatccattaggacaaattttgctatgggtcagtcaccaataaaaccagatgagcgtcttcttccatttaaatttttgtcctcagagcccaggcttcatccatagaacattttttttttctaatgttcttcctgctggatagtgaagattactgggtctacatttggagagggtcagctttcaggttggaggcaccagacatgaggtgcacaggcattaccttcttacagactgtcaccagtctcatgaagtcatcttgttactgcagcttggaccctgatttcttggctcgtgtgtaaatagaaattaacactggaccaaacagaaatttttatcaggcaacatttaataggcttgcagcctgagcaagtcaagggagcaacatacaggaaagggatccccgytgctagctctccaaagggcttagctcttgtcatttaaggaagttgaggagaaaaataactgatatgtaggcatgtagaggtggggagtttttagcaccaaagatgactcggtccttcagaagtcactctgaggaacatttgtcttgaataaaacttcattttagaggcaccttcaaaaagaaagagtataaaatttctctggcccagtgggtagcacttttggttgatatgcagaagtctccaaatgcaattctgaataaaaaactgcttcactaacaaattcattggtcaaagccaatgagcaatttgaaaaaattaagtagtaacaaatgactaattttattagtaaatcc

SEQ ID NO: 725632 - DNA, 1175 bp, Homo sapiens
ttgctttcactttagatcatggtctgttgctccatttattctaaaccctttttttagtattggcagttcttctatgtttgtattcaaattcacattttatgatcaatttatagatgtatttaaacattttaaatttatatttgattgaaactttccagtgaattttttaaactagatattgttgttctataatggaatgacttcaaccgggagcctaaggcagattctgtcatgtagagttccatgagcatatgtagtatttttaaatgaattaaatttgcataatttttgacatggcattaccgttcagttcaattctctgttatcttacagatagtccacgcttttggacttacagatagtgtattggacttttctggcctcacagagtggtgagttttcagtcctcatggaactggcatccattaggacaaattttgctatgggtcagtcaccaataaaaccagatgagcgtcttcttccatttaaatttttgtcctcagagcccaggcttcatccatagaacattttttttttctaatgttcttcctgctggatagtgaagattactgggtctacatttggagagggtcagctttcaggttggaggcaccagacatgaggtgcacaggcattaccttcttacagactgtcaccagtctcatgaagtcatcttgttactgcagcttggaccctgatttcttggctcgtgtgtaaatagaaattaacactggaccaaacagaaatttttatcaggcaacatttaataggcttgcagcctgagcaagtcaagggagcaacatacaggaaagggatccccgctgctagctctccaaagggcttagctcttgtcatttaaggaagttgaggagaaaaataactgatatgtaggcatgtagaggtggggagtttttagcaccaaagatgactcggtccttcagaagtcactctgaggaacatttgtcttgaataaaacttcattttagaggcaccttcaaaaagaaagagkataaaatttctctggcccagtgggtagcacttttggttgatatgcagaagtctccaaatgcaattctgaataaaaaactgcttcactaacaaattcattggtcaaagccaatgagcaatttgaaaaaattaagtagtaacaaatgactaattttattagtaaatcc

SEQ ID NO: 725633 - DNA, 1175 bp, Homo sapiens
ttgctttcactttagatcatggtctgttgctccatttattctaaaccctttttttagtattggcagttcttctatgtttgtattcaaattcacattttatgatcaatttatagatgtatttaaacattttaaatttatatttgattgaaactttccagtgaattttttaaactagatattgttgttctataatggaatgacttcaaccgggagcctaaggcagattctgtcatgtagagttccatgagcatatgtagtatttttaaatgaattaaatttgcataatttttgacatggcattaccgttcagttcaattctctgttatcttacagatagtccacgcttttggacttacagatagtgtattggacttttctggcctcacagagtggtgagttttcagtcctcatggaactggcatccattaggacaaattttgctatgggtcagtcaccaataaaaccagatgagcgtcttcttccatttaaatttttgtcctcagagcccaggcttcatccatagaacattttttttttctaatgttcttcctgctggatagtgaagattactgggtctacatttggagagggtcagctttcaggttggaggcaccagacatgaggtgcacaggcattaccttcttacagactgtcaccagtctcatgaagtcatcttgttactgcagcttggaccctgatttcttggctcgtgtgtaaatagaaattaacactggaccaaacagaaatttttatcaggcaacatttaataggcttgcagcctgagcaagtcaagggagcaacatacaggaaagggatccccgctgctagctctccaaagggcttagctcttgtcatttaaggaagttgaggagaaaaataactgatatgtaggcatgtagaggtggggagtttttagcaccaaagatgactcggtccttcagaagtcactctgaggaacatttgtcttgaataaaacttcattttagaggcaccttcaaaaagaaagagtataaaatttmtctggcccagtgggtagcacttttggttgatatgcagaagtctccaaatgcaattctgaataaaaaactgcttcactaacaaattcattggtcaaagccaatgagcaatttgaaaaaattaagtagtaacaaatgactaattttattagtaaatcc

SEQ ID NO: 725634 - DNA, 1175 bp, Homo sapiens
ttgctttcactttagatcatggtctgttgctccatttattctaaaccctttttttagtattggcagttcttctatgtttgtattcaaattcacattttatgatcaatttatagatgtatttaaacattttaaatttatatttgattgaaactttccagtgaattttttaaactagatattgttgttctataatggaatgacttcaaccgggagcctaaggcagattctgtcatgtagagttccatgagcatatgtagtatttttaaatgaattaaatttgcataatttttgacatggcattaccgttcagttcaattctctgttatcttacagatagtccacgcttttggacttacagatagtgtattggacttttctggcctcacagagtggtgagttttcagtcctcatggaactggcatccattaggacaaattttgctatgggtcagtcaccaataaaaccagatgagcgtcttcttccatttaaatttttgtcctcagagcccaggcttcatccatagaacattttttttttctaatgttcttcctgctggatagtgaagattactgggtctacatttggagagggtcagctttcaggttggaggcaccagacatgaggtgcacaggcattaccttcttacagactgtcaccagtctcatgaagtcatcttgttactgcagcttggaccctgatttcttggctcgtgtgtaaatagaaattaacactggaccaaacagaaatttttatcaggcaacatttaataggcttgcagcctgagcaagtcaagggagcaacatacaggaaagggatccccgctgctagctctccaaagggcttagctcttgtcatttaaggaagttgaggagaaaaataactgatatgtaggcatgtagaggtggggagtttttagcaccaaagatgactcggtccttcagaagtcactctgaggaacatttgtcttgaataaaacttcattttagaggcaccttcaaaaagaaagagtataaaatttctctggcccartgggtagcacttttggttgatatgcagaagtctccaaatgcaattctgaataaaaaactgcttcactaacaaattcattggtcaaagccaatgagcaatttgaaaaaattaagtagtaacaaatgactaattttattagtaaatcc

SEQ ID NO: 725635 - DNA, 1065 bp, Homo sapiens
tgacgcacctaccaccctctttaataacgatcgtctcacggccagccttgcttagtgtatcctatgtagccttccctgttcccttcttgctaaatggttttgaagcacatccctagatatcctatcattttatctgtgaatatttcagcacatttctttaaaagataaggactcgtcgatagggtttcaatgatgacatagtctgtggttttaataattgctctttttttttgtttttgagatgtggagtcttgcaatctgttgcccaggctggagtgcagtgggatgatctcggctcactgcaacctctgcttcccgggttcaggcaatttttttgcctcggcctcccaagcagctgagattacaggcatgcgccaccacacctggctaatttttgtatttttrgtagagacggggttttgccacgttggccaggctggtctcaaactcctaacctcaggtgatccacctgcctcagcctcccaaagtgctgggattacaggtgtgagccaccgtgcctggccaataatcactctttggtatgaatatatctttttaactggtttccattcttattctcttagtatatcttttccagtgtttcttaagttttcagttattgttctgtatcttgtacttcttaggaagagaaaattccgggatataatttcaaatgtgtttataagcccttgatcactatattatgagagctttttaggagatacacaatgaagctggagcttcctaaatgtattttataaaattaagtttaatgaaatagctaaatgcagcccaatagtgttttggcctgtgttcatatgaatgataaaatgccacattattgtgtttacacatgagaattaacctaggtaaatggtttttagtgcctactctagataattacagtttaatagtttgaccccttaggaattgagctttattcagctgattgctgtagttgttttctgatacactgggatttttcacagaccataagcatctgtagttgcacctggggctagaatttaattgaatcttgttgtgacttcacttattcatttacca

SEQ ID NO: 725636 - DNA, 1065 bp, Homo sapiens
tgacgcacctaccaccctctttaataacgatcgtctcacggccagccttgcttagtgtatcctatgtagccttccctgttcccttcttgctaaatggttttgaagcacatccctagatatcctatcattttatctgtgaatatttcagcacatttctttaaaagataaggactcgtcgatagggtttcaatgatgacatagtctgtggttttaataattgctctttttttttgtttttgagatgtggagtcttgcaatctgttgcccaggctggagtgcagtgggatgatctcggctcactgcaacctctgcttcccgggttcaggcaatttttttgcctcggcctcccaagcagctgagattacaggcatgcgccaccacacctggctaatttttgtatttttagtagagacggggttttgccaygttggccaggctggtctcaaactcctaacctcaggtgatccacctgcctcagcctcccaaagtgctgggattacaggtgtgagccaccgtgcctggccaataatcactctttggtatgaatatatctttttaactggtttccattcttattctcttagtatatcttttccagtgtttcttaagttttcagttattgttctgtatcttgtacttcttaggaagagaaaattccgggatataatttcaaatgtgtttataagcccttgatcactatattatgagagctttttaggagatacacaatgaagctggagcttcctaaatgtattttataaaattaagtttaatgaaatagctaaatgcagcccaatagtgttttggcctgtgttcatatgaatgataaaatgccacattattgtgtttacacatgagaattaacctaggtaaatggtttttagtgcctactctagataattacagtttaatagtttgaccccttaggaattgagctttattcagctgattgctgtagttgttttctgatacactgggatttttcacagaccataagcatctgtagttgcacctggggctagaatttaattgaatcttgttgtgacttcacttattcatttacca

SEQ ID NO: 725637 - DNA, 1065 bp, Homo sapiens
tgacgcacctaccaccctctttaataacgatcgtctcacggccagccttgcttagtgtatcctatgtagccttccctgttcccttcttgctaaatggttttgaagcacatccctagatatcctatcattttatctgtgaatatttcagcacatttctttaaaagataaggactcgtcgatagggtttcaatgatgacatagtctgtggttttaataattgctctttttttttgtttttgagatgtggagtcttgcaatctgttgcccaggctggagtgcagtgggatgatctcggctcactgcaacctctgcttcccgggttcaggcaatttttttgcctcggcctcccaagcagctgagattacaggcatgcgccaccacacctggctaatttttgtatttttagtagagacggggttttgccacgttggccaggctggtctcaaactcctaacctcaggtgatccacctgcctcagcctcccaaagtgctgggattacaggygtgagccaccgtgcctggccaataatcactctttggtatgaatatatctttttaactggtttccattcttattctcttagtatatcttttccagtgtttcttaagttttcagttattgttctgtatcttgtacttcttaggaagagaaaattccgggatataatttcaaatgtgtttataagcccttgatcactatattatgagagctttttaggagatacacaatgaagctggagcttcctaaatgtattttataaaattaagtttaatgaaatagctaaatgcagcccaatagtgttttggcctgtgttcatatgaatgataaaatgccacattattgtgtttacacatgagaattaacctaggtaaatggtttttagtgcctactctagataattacagtttaatagtttgaccccttaggaattgagctttattcagctgattgctgtagttgttttctgatacactgggatttttcacagaccataagcatctgtagttgcacctggggctagaatttaattgaatcttgttgtgacttcacttattcatttacca

SEQ ID NO: 725638 - DNA, 671 bp, Homo sapiens
gtggtcagggaagctgctcccgcctttatatgtgggggcctggggcacagatgctatgtgtgtagatattaaaaaataaacaaagaaaataaactgctaagtatgttccatccttccatcttgacaaatattcttttatcacaaaaggtacaaaatatgtgtaaagctgtgatataatggatgtaaaatatgacaagaattagcaaaatctcaaggagaaaagagtctgatcatttgtgagcctgtctgggatgttattcagctagcaatgtctggatgagtaataagaataaacacatataaattcattaaatctcatatatttattaatacaatttattttcttgccttcctttcagaaaaatcatggattatattcttataatcaaaattttcacacaatctgtgttccattgatagcaataatttaacagattgaaaataaatgtaattatattaaaatatacacaatttgagtgcattttcatcaatatgtaaatcaatgttaatataaaaaactaaagatttaattattttggatgtttcaaaatgttctttttcctctcaaatattcaaaattatccattataaccaaaatgcaaattaataagtatcaaaaattaaaakaaaattatttaaacagatctgaagagtttttaatctttaaatga

SEQ ID NO: 725639 - DNA, 611 bp, Homo sapiens
attcattaagattttaatttgcctaattttatcttttaatagtctgtaaagctgtttccagtgtctgtaaattgctacagcaaattcttaaccatggggggatgtcctgggaaccccttactttgtagttggccaagcataaaggtaggtagtctaggcaccccattagcaactggagtctgaagtgtggtcagtcttgtgggactgaagctttcaaacctatagagtctcatgcaaactctcggtagttagtgtcataatggaatttaattgtaggacctctggttggtgtaaaaaatcagagaattggaaaattggttgttggtgttagaaaacacccaggtcttccttgtgctatgacctggaagctttctccaggcagtaaatagagcaatcaaaaggctcatgctttttgtcartggatcattgtctttcattttttaatggtcaatgtattgagaacttttattttaaatattttgtccacttttttagttgcttcatgtgggagagtaagtccagtctctgttactccctcttggcaggaagtgaaaatccctttatctctcgaatctgcaaccccacaactttccatccgcagtcatcataga

SEQ ID NO: 725640 - DNA, 870 bp, Homo sapiens
cattctgagcatgttttcagccccatccgtactctcctcccttcttatccagagccttttgggtgcccagaagagtaatattcttctgcctcgtagctctgtggtccaagggtttatggctactgattatcctcctagagcacttctgagatgttttatgctttctacttgtgagtgtgaagggaggagaggcaagtttgctgtcagtctgacaacatgtttttgccacgtgatctgccactgaagagaagttggctatggagggaggtcaagtagcccagggaggtgggcattccaagtgtacctcctcgtgcagcccaccctctccacataaaattgggtcctgattttatgtggaagatgttgtgtgtctaggagcaggaatccatggaagacaagatatgatatagaagaaacaggcgaagggactggtacagcatatatttgagggcaaataatcactcgataggtggctgaaaatgtgaatgccttagataaaaattaatttrtaaaacagaagtatatttgaacaaatttaaaactaatattctaaaactaaaattcctgagatttggggtagagtgtatattgcaagagaagtagagaagaacagtatgctaaggtcccttcttgtttagatcagaagatattgacaaattattcaagtgaataaaaaaactataggtctatatgtgttttcagattcaagggtaaccaccggtagaataacaacaggagtccaaatcatcaagcaaaaagaacaaacaaaaaatgatcaatccgaacatagggaaaggaaacacacatacacacatacatatacatacatacacacatgcacacacacacatgcacacacatacacacgca

SEQ ID NO: 725641 - DNA, 870 bp, Homo sapiens
cattctgagcatgttttcagccccatccgtactctcctcccttcttatccagagccttttgggtgcccagaagagtaatattcttctgcctcgtagctctgtggtccaagggtttatggctactgattatcctcctagagcacttctgagatgttttatgctttctacttgtgagtgtgaagggaggagaggcaagtttgctgtcagtctgacaacatgtttttgccacgtgatctgccactgaagagaagttggctatggagggaggtcaagtagcccagggaggtgggcattccaagtgtacctcctcgtgcagcccaccctctccacataaaattgggtcctgattttatgtggaagatgttgtgtgtctaggagcaggaatccatggaagacaagatatgatatagaagaaacaggcgaagggactggtacagcatatatttgagggcaaataatcactcgataggtggctgaaaatgtgaatgccttagataaaaattaatttataaaacagaagtatatttgaacaaatttaaaactaatattctaaaactaaaattcctgagatttggggtagagtgtatattgcaagagaagtagagaagaacagtatgctaaggtcccttcttgttyagatcagaagatattgacaaattattcaagtgaataaaaaaactataggtctatatgtgttttcagattcaagggtaaccaccggtagaataacaacaggagtccaaatcatcaagcaaaaagaacaaacaaaaaatgatcaatccgaacatagggaaaggaaacacacatacacacatacatatacatacatacacacatgcacacacacacatgcacacacatacacacgca

SEQ ID NO: 725642 - DNA, 975 bp, Homo sapiens
caatgacttgcttatgtggctaataaattgtcaagtagaaaaactgggttagaatgcaatatatagtatgtagtctcatttttgtataaatacaagtatagaatggcataactcaaaatccacaagtgatttggctggattgtaaatgacttttattttcttcatttctcatcatattttctattatacataaagattcattgttaatataaaagtayaaaattgcaacctatgaattaagaacttctatatattgccagttagaagacagaatgaaaaacattctcttcattctaaccacacacacaaaaaagctccacaaaatacctatggactaccttcatagaaggtggaagagggtctgtatgaagaaaataattaatacatgaaagaagaagctagtcaatgtggagctctattgtgtcccgggatcaacaaagacaagatatctttaaaatcgtcttctaaatttaccctaatgtaaaacaaatccaataaaactctaatgtaattttttaagaatttaaatttggaataattccaaagaacaatttttcttaattttctacagccagaatatatacctttaaaaaaaatgaaaacagagattaactttctcagaattggttgactcactctttccttttatttttcttccatggaattttccagttaacttgagaaagtggaatcgaattccgatgttgaattttccttctggccccattcatgtggcaggtggtgattcaggtactactgggggctgctcagacaaacctcctcatcagacatcaagaggctgttgcaccaggagggccggtaccgtgtctagaggtggtcggcatggggttggagttgtattacataaaccctactccaaacaaatgcatggggatgtggctggagttccccgttgtctaaccagtgccaaagggcaggacggtacctcaccccacgttcttaactatgggttgg

SEQ ID NO: 725643 - DNA, 975 bp, Homo sapiens
caatgacttgcttatgtggctaataaattgtcaagtagaaaaactgggttagaatgcaatatatagtatgtagtctcatttttgtataaatacaagtatagaatggcataactcaaaatccacaagtgatttggctggattgtaaatgacttttattttcttcatttctcatcatattttctattatacataaagattcattgttaatataaaagtacaaaattgcaacctatgaattaagaactyctatatattgccagttagaagacagaatgaaaaacattctcttcattctaaccacacacacaaaaaagctccacaaaatacctatggactaccttcatagaaggtggaagagggtctgtatgaagaaaataattaatacatgaaagaagaagctagtcaatgtggagctctattgtgtcccgggatcaacaaagacaagatatctttaaaatcgtcttctaaatttaccctaatgtaaaacaaatccaataaaactctaatgtaattttttaagaatttaaatttggaataattccaaagaacaatttttcttaattttctacagccagaatatatacctttaaaaaaaatgaaaacagagattaactttctcagaattggttgactcactctttccttttatttttcttccatggaattttccagttaacttgagaaagtggaatcgaattccgatgttgaattttccttctggccccattcatgtggcaggtggtgattcaggtactactgggggctgctcagacaaacctcctcatcagacatcaagaggctgttgcaccaggagggccggtaccgtgtctagaggtggtcggcatggggttggagttgtattacataaaccctactccaaacaaatgcatggggatgtggctggagttccccgttgtctaaccagtgccaaagggcaggacggtacctcaccccacgttcttaactatgggttgg

SEQ ID NO: 725644 - DNA, 975 bp, Homo sapiens
caatgacttgcttatgtggctaataaattgtcaagtagaaaaactgggttagaatgcaatatatagtatgtagtctcatttttgtataaatacaagtatagaatggcataactcaaaatccacaagtgatttggctggattgtaaatgacttttattttcttcatttctcatcatattttctattatacataaagattcattgttaatataaaagtacaaaattgcaacctatgaattaagaacttctatatattgccagttagaagacagaatgaaaaacattctcttcattctaaccacacacacaaaaaagctccacaaaatacctatggactaccttcatagaaggtggaagagggtctgtatgaagaaaataattaatacatgaaagaagaagctagtcaatgtggagctctattgtgtcccgggatcaacaaagacaagatatctttaaaatcgtcttcyaaatttaccctaatgtaaaacaaatccaataaaactctaatgtaattttttaagaatttaaatttggaataattccaaagaacaatttttcttaattttctacagccagaatatatacctttaaaaaaaatgaaaacagagattaactttctcagaattggttgactcactctttccttttatttttcttccatggaattttccagttaacttgagaaagtggaatcgaattccgatgttgaattttccttctggccccattcatgtggcaggtggtgattcaggtactactgggggctgctcagacaaacctcctcatcagacatcaagaggctgttgcaccaggagggccggtaccgtgtctagaggtggtcggcatggggttggagttgtattacataaaccctactccaaacaaatgcatggggatgtggctggagttccccgttgtctaaccagtgccaaagggcaggacggtacctcaccccacgttcttaactatgggttgg

SEQ ID NO: 725645 - DNA, 1238 bp, Homo sapiens
tccaccattaacaaagattataaggaccactttggtcattgcttatacatctcgttgaacacaaattataatactaattatagcaataaatagcattgtactaaatagtctatgcttcatttaatcatcgcaaaaaccctatgtaattaatttgtattgcaaatgaagaaccgaggttcagagagatcaaaggacttgcctggggttgtacaggtagtcagtgggagagacaagcacagaattcaagcacagccactaagccctcactcacccttaccaatagtctattaaatacagccttaagtttctgttatatgtccacttggtttattccttctaggagactgcaagctcttagaaaccaagaatcaagtcttacactgttccctaaaaatatctgtcacaatactcttcaggaatatatcctaaaatagcaggatggccaaaacctgaggtttagcaaattgagagaggtagaacagacagacaggcagacaggcagacacacagatggaaacatacaactatttgaagatgggacaatcagaggagggtgagaatcaatggactatcagggaraagaaaaatggagcatctcaaatttaatacttgagctctgatttgtttcagccaactctagtaataagatatgtccttgcagagaaatggctaacatctctcctgatttacacataaaaggatttattgttcttctcacctctgtaaagcaatgttaagatcaacaggattagtggcattatatggtgctctccacagagtttaatgccatttcaggctgttaaaaatttatagaaacaaataagagagtccaatatcagctgaagctctaatccccttgaagtgaagaatagctttcaggctgacatttcttttggaaatataaacccaggtgcttgcagtttgcagatgacactaaccttcctcttgagccataactgtagaaatgctggccagacaaatgtggaagagtgtctgaagatactgggatgcacagatcagttccatttcttcattaagtctttaagcacacagggcaaagagtacaagggtgacagtgagatgatccttcctccccaagggtgaaagaggctcggagataaaaaaggtaaacctgccctataaatattaagggacaaaatcatcccacaagagtggataggcaaaggcccttgaaaaaggcacagtggtttctaggccatcaatagttattcattcac

SEQ ID NO: 725646 - DNA, 709 bp, Homo sapiens
tgatgaaatatcatgcagtcattaaaagtaatggcataccatcaatgatagactggataaaaaaatgtggtacatatacaccatggaatactatgcagctataaaaaggaacaagatcatgttctttgcagggacacagatggagtttggaaatcattattcctagcaaactaacacaggaacagaaaaccaaatgccacatgttctcacttataagtgggagctaaatctaaattatgagaacatatggacacatggtggggaacaacacacactgttggctgtcagagggtggagggttggaggagggagaggatcaggaagaatasctagtggatgctgggcttaacacctgggtgatgggatgatctgtgcagcaaaccaccatggcaaacatttacctatgtaataaacctgcgcatcctgcacatgtaactctaaacttaaaataaacattggaaaaaataataataagtgaaaatagatgtagggtatataggagctctgtattatctcttcaatttttctattaagtctagaaatatttttaaattaaattttaaaaaatggcatagaatattgaataacatggaaaatatttatgacaattttgagtaaaaggagaagtaaaaaattttaaaacattataatctcaactatgagaaaatataaagactaaaaatataaaatgctattgaatgtttttaaa

SEQ ID NO: 725647 - DNA, 709 bp, Homo sapiens
tgatgaaatatcatgcagtcattaaaagtaatggcataccatcaatgatagactggataaaaaaatgtggtacatatacaccatggaatactatgcagctataaaaaggaacaagatcatgttctttgcagggacacagatggagtttggaaatcattattcctagcaaactaacacaggaacagaaaaccaaatgccacatgttctcacttataagtgggagctaaatctaaattatgagaacatatggacacatggtggggaacaacacacactgttggctgtcagagggtggagggttggaggagggagaggatcaggaagaatagctagtggatgctgggcttaacacctgggtgatgggatgatctgtgcagcaaaccaccatggcaaacatttacctatgtaataaacctkcgcatcctgcacatgtaactctaaacttaaaataaacattggaaaaaataataataagtgaaaatagatgtagggtatataggagctctgtattatctcttcaatttttctattaagtctagaaatatttttaaattaaattttaaaaaatggcatagaatattgaataacatggaaaatatttatgacaattttgagtaaaaggagaagtaaaaaattttaaaacattataatctcaactatgagaaaatataaagactaaaaatataaaatgctattgaatgtttttaaa

SEQ ID NO: 725648 - DNA, 709 bp, Homo sapiens
tgatgaaatatcatgcagtcattaaaagtaatggcataccatcaatgatagactggataaaaaaatgtggtacatatacaccatggaatactatgcagctataaaaaggaacaagatcatgttctttgcagggacacagatggagtttggaaatcattattcctagcaaactaacacaggaacagaaaaccaaatgccacatgttctcacttataagtgggagctaaatctaaattatgagaacatatggacacatggtggggaacaacacacactgttggctgtcagagggtggagggttggaggagggagaggatcaggaagaatagctagtggatgctgggcttaacacctgggtgatgggatgatctgtgcagcaaaccaccatggcaaacatttacctatgtaataaacctgcgcatcctgcacatgtaactctaaacttaaaataaacrttggaaaaaataataataagtgaaaatagatgtagggtatataggagctctgtattatctcttcaatttttctattaagtctagaaatatttttaaattaaattttaaaaaatggcatagaatattgaataacatggaaaatatttatgacaattttgagtaaaaggagaagtaaaaaattttaaaacattataatctcaactatgagaaaatataaagactaaaaatataaaatgctattgaatgtttttaaa

SEQ ID NO: 725649 - DNA, 709 bp, Homo sapiens
tgatgaaatatcatgcagtcattaaaagtaatggcataccatcaatgatagactggataaaaaaatgtggtacatatacaccatggaatactatgcagctataaaaaggaacaagatcatgttctttgcagggacacagatggagtttggaaatcattattcctagcaaactaacacaggaacagaaaaccaaatgccacatgttctcacttataagtgggagctaaatctaaattatgagaacatatggacacatggtggggaacaacacacactgttggctgtcagagggtggagggttggaggagggagaggatcaggaagaatagctagtggatgctgggcttaacacctgggtgatgggatgatctgtgcagcaaaccaccatggcaaacatttacctatgtaataaacctgcgcatcctgcacatgtaactctaaacttaaaataaacattggaaaaaataataataagtgaaaatagatgtagggtatataggagctctgtattatctcttcaatttttctattaagtctagaaatattttwaaattaaattttaaaaaatggcatagaatattgaataacatggaaaatatttatgacaattttgagtaaaaggagaagtaaaaaattttaaaacattataatctcaactatgagaaaatataaagactaaaaatataaaatgctattgaatgtttttaaa

SEQ ID NO: 725650 - DNA, 633 bp, Homo sapiens
gtgtgtgtgtttaaacagagtctcactctgttgcccagttagagtgcagtggcgcaaactcggcttactgcaaattctcctgcctcagcctccggagtagctaggattrcagacgtgcgccaccacacccagataatttttgcatttttcatagagatggggtttcaccatgttggctaggctggtcttgaactcctgacctcaggtgatccgcccgcctcggcctcccaaagtgttgggattacaggcgtgagccactgcgctcggcctgcaattgttttttgttttaatgttatattcaattcttcctccatctttattaaagtataattgataaaaattgtgtatatttacagtgttcaatgtgatgttttgatatatgcatacattatgaaatgattaaatcaagttaattaacattttcatcacttcacatacttttattattattattattattgtggtaagaatatttaagatctattggcttagaatagtgtttactagaggcgaggaaaggtaagggggagggggtagccaaaggttggctaacaggttaacagatacatgagtacatggctgagtttggtggctcacacctataatcctagcactttaggagactgaggtggg

SEQ ID NO: 725651 - DNA, 633 bp, Homo sapiens
gtgtgtgtgtttaaacagagtctcactctgttgcccagttagagtgcagtggcgcaaactcggcttactgcaaattctcctgcctcagcctccggagtagctaggattacagacgtgcgccaccacacccagataatttttgcatttttcatagagatggggtttcaccatgttggctaggctggtcttgaactcctgacctcaggtgatccgcccgcctcggcctcccaaagtgttgggattacaggcgtgagccactgcgctcggcctgcaattgttttttgttttaatgttatattcaattcttcctccatctttattaaagtataattgataaaaattgtgtatatttacagwgttcaatgtgatgttttgatatatgcatacattatgaaatgattaaatcaagttaattaacattttcatcacttcacatacttttattattattattattattgtggtaagaatatttaagatctattggcttagaatagtgtttactagaggcgaggaaaggtaagggggagggggtagccaaaggttggctaacaggttaacagatacatgagtacatggctgagtttggtggctcacacctataatcctagcactttaggagactgaggtggg

SEQ ID NO: 725652 - DNA, 655 bp, Homo sapiens
ctagtgttagtctaatcataaagccagcacacctttgtctcatataacacaaagttattaatcagctccccagtgtctcttgtagaaagaataagaggaagtattttaaaaatacatattctataaatatattcttattgcccattcttagagttttcatttgttgagcatcagtgtaccaggtaatttacagacttctacaatcttcataattatggtgtaggataaatttttttccctagtttacagaaatgactattttttgtagttgtatgtgaaaattatagaacagttttggggatctgcacaatgttatgttctcacacagagaatttgcctttgtttcttgtatgcaggtaatttgaagaagaacaattcaatctctttgggaattaagttgatttgcagctctatttaagtttctagaagagctgttctatatctagttgccctttctccaatagcatagcccttcatgagtcccagctgaaagctaggagtgtttactaagctccttccctctccaatttttgttwtctcagtctcatgaaccactgaactccctgctgaactctgctcaccttttcagcctttgagttgctgcttcctgtgtggctttttagtctgtcagccagcactttaaaaaaaaatctat

SEQ ID NO: 725653 - DNA, 666 bp, Homo sapiens
tcattctttaaagctatttttccaggatggtaaaaaatgattgctaatacgttatcttgttttagactacattttttcttgtcattgacaatgaaaatgtgcctgttttttatagagagcaagtttaagaagatgttttctatattcttaatttaatttggtgattatataatcatctctcctctaagggaaaccaatggcactgcgggttttttttttttttttcttattctctgaactaaactcctacaatcaaacaaagaggaggcaggacaaaagtgtctattcatttataagtaaaataaattgaacyttgacttattagaaaatgcaatttgagaatgaaaaattactttcttcacataatggcttggcatttctcatccttgcatacatctgtttcttttaaactcttagcttttaggccttggctgttttcattatatttagaaaaattgtcttcaattacatgaccccaaaccaggccctgggctctttacaaatccatttctaatgtgctgatctttatgctgtacctcaaagactcttatcactacgactgaatgatacttcataatgctggagaatcactattcccagcatcttgaacagtaaatgaatagtcaagcaaaacagaatcctagtgctatgtacaactgtccttga

SEQ ID NO: 725654 - DNA, 626 bp, Homo sapiens
ttcccctggcattatgtgctattcaagtccttggtttctacttctctttattggaccccacttcccaccactaagagggacaagagagacttgaaagaagcatgtgctttgctctttgctgattcaatagcaagtcaacatctcaacttgtgggcagaaaatgttgcttccaatggcagaaatcaattaatttgagggaagcatccttcttcttgatttaagtgtagtcttttactacacacactttcatttcctgtcaatgagaagcaaaagtaaaggtgttcttggaatgcatttctatttaaaaaaaattaaatggtcaggcacggtggctcacgcctgtaatcccagcactttgggctgtaatcccagttctttgggaggttgaggcaaacagatcataaagtcaggagtttgagactatcctgaccaacatggtgaaatcccgtctctactgaaaatacaaaaattatccaggcttggtggcgcacacctgtaatcccagctactcaggaggctgaggcaggagaatcgcctgaacctgggaggcagaggttgaagtgatccgagattgtgccactrcactccagcctgggcgacagagtgagactccttctcaaaaaaaa

SEQ ID NO: 725655 - DNA, 916 bp, Homo sapiens
tgttaatcatccgtttataatgtgctttgtgtgtatattatcttctctgtggataaatctgggctatcattattgggtttatttaaagtagaccacaactgtacttttgaaatttgtaagagatataatttgtaagagatattattttcagtgacctgttgaagtattaagcagatgttaaaaatgaagagagtttaaatttacctttcaaattaagaaaatatatttaatcatcacttttaacttgcaaacattgttccaaagatttctgtaagtctctaatcacaatgaaagttaaaaaaaaaaaaaagataatttattattctcttctttctggtccttgttcatctggccttttgtcatgcaactgaaatcatgtgactttgacttcagttttcacttttgctatattactgcaacaggtcaatataaacaaaacaactatgaactgcattcatgtgatgttgatactcttcaaattgttgtctgtacttttcattcttcagttatttatcatggtatatttcatattgaaagtttttattaaatgggaaagttatggcctttgagcccctgagaatttcaaaattcgaagctgctggrtcaaagagataagcctgttggcagaaatctataagtcattatacagtctataatagagacatagaaaaaatcacaatgggaacataaaggaggaaaactcagcttggggaagagaaacgtaatcttaggagatatcagttcaactgattcttcaagcagatacagaattttacgtggtgaaaatcgggaaagaggtgggagtgcatggcagaaggaataacatatgctaaagtagagatgagtaaaagacaatatcataattgcaaacagtagtttgaagtcactgaccacagagcttactatggaggtatag

SEQ ID NO: 725656 - DNA, 916 bp, Homo sapiens
tgttaatcatccgtttataatgtgctttgtgtgtatattatcttctctgtggataaatctgggctatcattattgggtttatttaaagtagaccacaactgtacttttgaaatttgtaagagatataatttgtaagagatattattttcagtgacctgttgaagtattaagcagatgttaaaaatgaagagagtttaaatttacctttcaaattaagaaaatatatttaatcatcacttttaacttgcaaacattgttccaaagatttctgtaagtctctaatcacaatgaaagttaaaaaaaaaaaaaagataatttattattctcttctttctggtccttgttcatctggccttttgtcatgcaactgaaatcatgtgactttgacttcagttttcacttttgctatattactgcaacaggtcaatataaacaaaacaactatgaactgcattcatgtgatgttgatactcttcaaattgttgtctgtacttttcattcttcagttatttatcatggtatatttcatattgaaagtttttattaaatgggaaagttatggcctttgagcccctgagaatttcaaaattcgaagctgctgggtcaaagagataagcctgttggcagaaatctataagtcattatacagtctataatagagacatagaaaaaatcacaatgggaacataaaggaggaaaactcagcttgkggaagagaaacgtaatcttaggagatatcagttcaactgattcttcaagcagatacagaattttacgtggtgaaaatcgggaaagaggtgggagtgcatggcagaaggaataacatatgctaaagtagagatgagtaaaagacaatatcataattgcaaacagtagtttgaagtcactgaccacagagcttactatggaggtatag

SEQ ID NO: 725657 - DNA, 916 bp, Homo sapiens
tgttaatcatccgtttataatgtgctttgtgtgtatattatcttctctgtggataaatctgggctatcattattgggtttatttaaagtagaccacaactgtacttttgaaatttgtaagagatataatttgtaagagatattattttcagtgacctgttgaagtattaagcagatgttaaaaatgaagagagtttaaatttacctttcaaattaagaaaatatatttaatcatcacttttaacttgcaaacattgttccaaagatttctgtaagtctctaatcacaatgaaagttaaaaaaaaaaaaaagataatttattattctcttctttctggtccttgttcatctggccttttgtcatgcaactgaaatcatgtgactttgacttcagttttcacttttgctatattactgcaacaggtcaatataaacaaaacaactatgaactgcattcatgtgatgttgatactcttcaaattgttgtctgtacttttcattcttcagttatttatcatggtatatttcatattgaaagtttttattaaatgggaaagttatggcctttgagcccctgagaatttcaaaattcgaagctgctgggtcaaagagataagcctgttggcagaaatctataagtcattatacagtctataatagagacatagaaaaaatcacaatgggaacataaaggaggaaaactcagcttggggaagagaaacgtaatcttaggagatatcagttcaackgattcttcaagcagatacagaattttacgtggtgaaaatcgggaaagaggtgggagtgcatggcagaaggaataacatatgctaaagtagagatgagtaaaagacaatatcataattgcaaacagtagtttgaagtcactgaccacagagcttactatggaggtatag

SEQ ID NO: 725658 - DNA, 682 bp, Homo sapiens
aggcgtgaccactggagatcgtgtttgggaatcagtcacggtttcccaattgatgggcatggttggtaatttcacgcaaggacttggaattctcatgacctgacgcttctttgtgtggtgtgattctgtgcacgaaggtgactgggtttctgcctttgctgtttaaacacctttgctgtggcccgcagaggagaagtagtttggtgtttatgaccaaagataaatgcagttttaaaagtagcagtgtccaagttagttagaccctactagaggcaaatatacctgagatcatgaggactgggatcaactttgcagggtacaaaaaaattttcctggccaggcacagtggctcacgcctggaatcccagtactttggaaggccaaggtgggtggattacctgaggtcaggagtttgagaccagcttggccaacatggtgaaaccccagtctctactaaaaayacaaaaattagccggcagtggtggcatgcgcctgtaacaccagttactcaggaggctgaggtgggagaatggcttgaacccaggaggcagaggttgcagtgagccgagactgtgccactgcactctagccagggcaacagagtgagactctgtctccaaatttttttttccttagaagacgtggtttaatcttaccagcacatccggcatacactgctgtg

SEQ ID NO: 725659 - DNA, 1589 bp, Homo sapiens
tctaagattagaattaaactacaatatattcaacttaaaagacagaattcaacatttcttagaatcataaagtcaagggactcaagtaaaatatttcttaacagacatctctgagtagcataattatgtagccttatggtggagatttactgacacagagagctcaaccccttaaagcagccttcagttcttctgcgagacaattctaataatatagagaattcctctttatattattacgttaaaatctaccttccttcaacttttatccactggcagtactgctaacctgtgaggtaataaaagagattaagtcttcatttacatattctgcaagtatttaaaaatagctgttaaaatcactttttagacttttcctctccaggccaaatcaattgagttctcccaaccacttgtcatatgatacaccagtaaacttcattcgttcttaccaccacttcctgcaaaagccaaacatttaaaacaaatgggttgcaacacagcacttcattcctgtaggaatatgcagcagaccatcctagcaaatttactacaatagccagtgtccatcctagcaaatttactacaatagccagtcaatcctcaaatatcaaaataccctatttttttcccaaataaaaacccacgcaaacatatgttttattcccaatacaaaagcacgctacttataaaaatggaattggtaacagaacacctttaagttttaagcaatgktattcctacaactggttagtactctttctcctagtgactaatataggctaaagaactgaacccttatccaaaaatatatctggttttaaaagttatacacatatataatataaacagcagtaatctataaaaacagtattgactgcagaagtccctgatgatttgcccaacaatgttgaaaaaaatgtgtacagtagtcccccattatctgaggaggatacattccaggacccacagtgaatgtctgaaatcatggatagtactgaatcctatagctagtatgttttttcctatacatctacagctatgataaagtttaacttataaattaggcacagtaagagattaacaacaccaacaataaaacagaataattacactgtaataaaagttatatgaatataatctctcttcctctttctctttcaaagtatcttattgtactatactgggtaacaaactgcagaaagtgaaaccatgaaaaaggggcaactgctgtttactacagaatgatcccatttatcccagcttttatctttgtttagctttgacatgattttaattagttttgtactagtactattttactctactatgctatatttctttgactattcgcagcaagattgaaaatcgaagactatgtaatacatattttgtgttagtgaaacctcatgaattaaggactagtgggggttatggaagaaaaggtcacttaagaattaaacattcaaaagaagtgtaataactttagaacacgtggtgcctggattcaagtttctatatcttgagaatacaggctcaaacctaggaaaagctactctgataaatggacaggaaaaatttatagttag

SEQ ID NO: 725660 - DNA, 1398 bp, Homo sapiens
aaggtaggaccttaggatctgcttctgaaatctagtaaatgtctttttacactaaacgggtattttctaccagccatgggattaaacgagaaccctcaagaatcaagtaaataaccatgtacactagtaaaaatacagagtatgctctcgacctttgtggatcttcctatattaccactttagactgccttaatttccttttgtcactggcacttttagctggcttttcagagamattttccataaaaattgattttctttgttgctctttagataactttatgtggccagtcaggcacacttctggacagtgacatgaacatcagccctaggggcactgctgccttcaattcctgcctcagcaaaatcacatatgactctgtgccaaaattacgtgtgactctggacatagggggtcactgaagcataaggttcactgcatttccaagaatgtaattttgtacgttaaatatacatattcacaataagaaaaacagaaatttgcatttgacaaaccataaccacaaactgtattccaggacagattcagattgaattaaaacttatggcaatattattttgaggttttaagggtattttctgcctcaggtatagtaagtgtttttaaaagtgagataattccctcttaatttataaaagaaaataaatacccttgaatttgaggttaattttaactttgtacaatttggagaaattatgtttggtaaaaaaaacactgtatttagaaactacactgctaaaatatttaattatgtctcttacaatttagttataaatgccactgctaaaataagttgttttttaaaattagtgacatgtacaacttcatttaaattgtacctatgaattatccactaagcatgtaacaataatcgtattttaccttttgtctttctatttcaatttcttcttctggagatgtgccatcttttgcagattttaccgattttttatttatacctggcacaacaaaccaacataagagtggtaaaaattacaggactatcagcaacattctgtttatactaggaacaaaaatataagatatctaggaataatcttaacaataaatgtgttgaaactaaaagaaaaaaacacgttactgaaagaagactgtgggtatatgaatggaataaatacaatgcttctgcatggagtgactgcatgttacaaaggaagaatttctttcaaagtaatgtataatttacattaccaattaaaaaagaaaaaccatagatcatttccacagatacagaataagcatgtccataaacataagaatactgattaacattcaacatccattcataataaaagtagtatacacatttaatgaaattctaaataaaaaattccattcaaggaaatctttagaaa

SEQ ID NO: 725661 - DNA, 1201 bp, Homo sapiens
cttcattatgaccctacagccaggtggttgtgctaagatgtgaatcagctcatgttaattttatgcttaaaattcttaaataggttccatgattccagatccctccccttagccccagggctctccatgatttgatgctcaccttgtctcaagtcccttcccaaaagacatcttgctttccagacttccttataattccatggatgcatcatgcagtttcacacctagattacctaatacaagttgtttcctctgtacattctcatcttctggggtggctcctctcttattgtgccagcatcaactgtctttctccagaaagccatctctacagactcccttgaacccatcccactcatttgaaggttctcgatttttcctcaaatgacattaggaaattgtctatgccatatcccatgctatcatatactgcactttacacccaagatctcttggagggcagggatctaatgtcattaaatgagtaaatatataagtagaatagctctcatcaaatgtttgaagatcttttattcatttaataaattaataatttatcccaagaccctgaggaaagagtgaatactagacagcaaaatttagatggaggacaaatttgattatttttaagaaggtgctcccttcaaattaagtcaggtgtttatgagacagggagcttccagtcacaggagaagtttagatgaaggttggaactctttgtgggactgtttctgggagactcaaacatcaaatagggcatgggctccatggttgtcattagtttggttaccaatgttctgcttcccccagcatgccctcagtaggatcatactttccacctctttgaagctaaacactgatgtgtgattgatttgggccaaaggaacatgaatagyggtgatgtgtgtcacttccaagcagatgctatgttagtcatcatggggtcaatgtcaaggtgatgcttctgttagtctgagatcctgagtgaacccagggaacagagctgacctgatcagacgtgtagtgtgaatgagacatgagttttgttgtgttaagcccctgagatttagggctcatttgtttctgaagcataccctatcttgactggaactaccactatggtcctatccaagcccgtaattctgtacatctgtgaggggaaatagagggattaggaggaatcattgtctgggaaaggtag

SEQ ID NO: 725662 - DNA, 1105 bp, Homo sapiens
tgacataaattatcagactgtttttctgaagttggacctgatatacttgcaggcaggtttgcataggggaggcgggagaatgctattgaaatctctaatctctggtgcagttctcattttagttacattgtattcccaccacagtagaaaatagcaatattcagactgggatgaatgactttagtatccctctttccagggaatattctcacaagaatacatgcaaaacacattgcttacagtagattattgataaaagttgagcaacttgagtagttcagctaaacattggtgagattagagttagatcggtcaccatgatgaaaagacacatgtagaaaaggctgtagctaagaaatagaattgacaggcttgcaactactcgagtggttgatattaatgaaagaaataactctcctaatgactttataacaaaattttagccctacacaatctcatgagatatgtgctactattcccactttatagttgaggcaagggagagagcttaggtttaagctgatgcagtatgttaagagacggaaaatagtcctgtgacaagagaaaatgaattcagatttgaacatattgagctatatggaaatttccagcaggaaagtcagaaattcagttctggagttcaggagaaaggtcaaggccagagcagtattgttatataaaagttaaaaamtcagtttgtggaataaattcattgacttggaaaaagtatataaaaacagaagagggggcaggatggaattattgggaaaatgtgctcttagggattgggaagaaggcaagacacagagctagagtttagaagcttctggtgctactgcagggaactggccactggatgtttgactgggacatcccaagagaacagtcacagcagtgtaattgggaaggacaccaacttgtaagggctcgggagtcaggaccattctatcgtggtgtttttttgtgcagagttgatgagaagatggtatgttaaagatttcacaatggaggagacaagcatagaccaaaggcacaaggaaaggggggcttttgttgatggaacaaggtactggaagcagcaggaggagaaggggatgaaaggttc

SEQ ID NO: 725663 - DNA, 1510 bp, Homo sapiens
tgaagtaacaacaaagtctgctttagttgcaggcatgctgaatgttggccacaatagacagcctcgttgaatgaacatttaggacatagtgagacaatgggacacatgaaaagatttatctggccaaccacttattcccttgccagtgaatctccagtaaaaaatgtgtcttgtgtgactctaaagtaacatgcagtcttttcatgagtttatagacacttttaaatagaacaatgagagaagagggtattttaccttgtttcaagatgggaagatctgrggttaagggtggtcagaacatacttttgaagtaggtttaccaaagaggacttccattcaattcagaaaggaactgagtatgtgcaggaagagaagcagagtttgagagaggcttcggaattgagagaactggaggtatgccttccatgggaacttcagaaagatagctcacatttttattagggagtattcagacctaagttccaaaaacaattaatatgttctccctgctttttaatttgtcaaagagactctaaaatttaattccttaattattaggtctcaaaaacgtttattcctatagaccataatagttgccaattaaagtggaattaattttcaaatattaaaatgcatttgaaactattcatattaattctgaagcaacaaaagtaaaacaggacaagtcattgaagaaaaaaatgtacgatacctcttactgcatgctaaataaagcaaatttaaaatttgacattaactagacttttattctagatagagggaccacatctgttctctcctaacaccccatgaaaatccatctcaaaatgtacaagtatatattttttaattgcagcagctctgataagcaggataagctctgataagcaggaaagactacgtgctggacttgagaatttccaaatcctgccacatcagtggtgttggattgagaagcacagtcatggattccatttgttccaccctgtggtgtggaaaagtacacatcatctggcagaggatatgaaaaagctctctgttaccaacacagcctgttgctagctctcagattccaaccagaaagtcaggcagccacattcctttctgcatgaggataacattttatagtcagccagatcagagttcttctcctcttttttgccttctcttttcattcttgattagagactacattagagactactcctaattagaaacttgtatgttttagtagaaaccatgccagatgtgtgatgcagttcagtggaatgttagagagcaactgatggtggcactttgaattgggattgtaagcgtgacagatgggggctgaggcaagaagagcctagaagcatgagtcagtgagtatgcatgaatgtgggagggtttgttgggggcatcacatcttgtctttgtcaaagaggtaattgaagactatgcctaagtttttaacaaggtcaagagattctggcagtgagggaaggaggtttatttatttatctagaaaata

SEQ ID NO: 725664 - DNA, 1510 bp, Homo sapiens
tgaagtaacaacaaagtctgctttagttgcaggcatgctgaatgttggccacaatagacagcctcgttgaatgaacatttaggacatagtgagacaatgggacacatgaaaagatttatctggccaaccacttattcccttgccagtgaatctccagtaaaaaatgtgtcttgtgtgactctaaagtaacatgcagtcttttcatgagtttatagacacttttaaatagaacaatgagagaagagggtattttaccttgtttcaagatgggaagatctggggttaagggtggtcagaacatacttttgaagtaggtttaccaaagaggacttccattcaattcagaaaggaactgagtatgtgcaggaagagaagcagagtttgagagaggcttcggaattgagagaactggaggtatgccttccatgggaacttcagaaagatagctcacatttttattagggagtattcagacctaagttccaaaaacaattaatatgttctccctgctttttaatttgtcaaagagactctaaaatttaattccttaattattaggtctcaaaaacgtttattcctatagaccataatagttgccaattaaagtggaattaattttcaaatattaaaatgcatttgaaactattcatattaattctgaagcaacaaaagtaaaacaggacaagtcattgaagaaaaaaatgtacgatacctcttactgcatgctaaataaagcaaatttaaaatttgacattaactagacttttattctagatagagggaccacatctgttctctcctaacaccccatgaaaatccatctcaaaatgtacaagtatatattttttaattgcagcagctctgataagcaggataagctctgataagcaggaaagactacgtgctggacttgagaatttccaaatcctgccacatcagtggtgttggattgagaagcacagtcatggattccatttgttccaccctgtggtgtggaaragtacacatcatctggcagaggatatgaaaaagctctctgttaccaacacagcctgttgctagctctcagattccaaccagaaagtcaggcagccacattcctttctgcatgaggataacattttatagtcagccagatcagagttcttctcctcttttttgccttctcttttcattcttgattagagactacattagagactactcctaattagaaacttgtatgttttagtagaaaccatgccagatgtgtgatgcagttcagtggaatgttagagagcaactgatggtggcactttgaattgggattgtaagcgtgacagatgggggctgaggcaagaagagcctagaagcatgagtcagtgagtatgcatgaatgtgggagggtttgttgggggcatcacatcttgtctttgtcaaagaggtaattgaagactatgcctaagtttttaacaaggtcaagagattctggcagtgagggaaggaggtttatttatttatctagaaaata

SEQ ID NO: 725665 - DNA, 1510 bp, Homo sapiens
tgaagtaacaacaaagtctgctttagttgcaggcatgctgaatgttggccacaatagacagcctcgttgaatgaacatttaggacatagtgagacaatgggacacatgaaaagatttatctggccaaccacttattcccttgccagtgaatctccagtaaaaaatgtgtcttgtgtgactctaaagtaacatgcagtcttttcatgagtttatagacacttttaaatagaacaatgagagaagagggtattttaccttgtttcaagatgggaagatctggggttaagggtggtcagaacatacttttgaagtaggtttaccaaagaggacttccattcaattcagaaaggaactgagtatgtgcaggaagagaagcagagtttgagagaggcttcggaattgagagaactggaggtatgccttccatgggaacttcagaaagatagctcacatttttattagggagtattcagacctaagttccaaaaacaattaatatgttctccctgctttttaatttgtcaaagagactctaaaatttaattccttaattattaggtctcaaaaacgtttattcctatagaccataatagttgccaattaaagtggaattaattttcaaatattaaaatgcatttgaaactattcatattaattctgaagcaacaaaagtaaaacaggacaagtcattgaagaaaaaaatgtacgatacctcttactgcatgctaaataaagcaaatttaaaatttgacattaactagacttttattctagatagagggaccacatctgttctctcctaacaccccatgaaaatccatctcaaaatgtacaagtatatattttttaattgcagcagctctgataagcaggataagctctgataagcaggaaagactacgtgctggacttgagaatttccaaatcctgccacatcagtggtgttggattgagaagcacagtcatggattccatttgttccaccctgtggtgtggaaaagtacacatcatctggcagaggatatgaaaaagctctctgttaccaacacagcctgttgctagctctcagattccaaccagaaagtcaggcagccacattcctttctgcatgaggataacattttatagtcagccagatcagagttcttctcctcttttttgccttctcttttcattcttgattagagactacattagagactactcctaattagaaacttgtatgttttagtagaaaccatgccagatgtgtgatgcagttcagtgkaatgttagagagcaactgatggtggcactttgaattgggattgtaagcgtgacagatgggggctgaggcaagaagagcctagaagcatgagtcagtgagtatgcatgaatgtgggagggtttgttgggggcatcacatcttgtctttgtcaaagaggtaattgaagactatgcctaagtttttaacaaggtcaagagattctggcagtgagggaaggaggtttatttatttatctagaaaata

SEQ ID NO: 725666 - DNA, 1510 bp, Homo sapiens
tgaagtaacaacaaagtctgctttagttgcaggcatgctgaatgttggccacaatagacagcctcgttgaatgaacatttaggacatagtgagacaatgggacacatgaaaagatttatctggccaaccacttattcccttgccagtgaatctccagtaaaaaatgtgtcttgtgtgactctaaagtaacatgcagtcttttcatgagtttatagacacttttaaatagaacaatgagagaagagggtattttaccttgtttcaagatgggaagatctggggttaagggtggtcagaacatacttttgaagtaggtttaccaaagaggacttccattcaattcagaaaggaactgagtatgtgcaggaagagaagcagagtttgagagaggcttcggaattgagagaactggaggtatgccttccatgggaacttcagaaagatagctcacatttttattagggagtattcagacctaagttccaaaaacaattaatatgttctccctgctttttaatttgtcaaagagactctaaaatttaattccttaattattaggtctcaaaaacgtttattcctatagaccataatagttgccaattaaagtggaattaattttcaaatattaaaatgcatttgaaactattcatattaattctgaagcaacaaaagtaaaacaggacaagtcattgaagaaaaaaatgtacgatacctcttactgcatgctaaataaagcaaatttaaaatttgacattaactagacttttattctagatagagggaccacatctgttctctcctaacaccccatgaaaatccatctcaaaatgtacaagtatatattttttaattgcagcagctctgataagcaggataagctctgataagcaggaaagactacgtgctggacttgagaatttccaaatcctgccacatcagtggtgttggattgagaagcacagtcatggattccatttgttccaccctgtggtgtggaaaagtacacatcatctggcagaggatatgaaaaagctctctgttaccaacacagcctgttgctagctctcagattccaaccagaaagtcaggcagccacattcctttctgcatgaggataacattttatagtcagccagatcagagttcttctcctcttttttgccttctcttttcattcttgattagagactacattagagactactcctaattagaaacttgtatgttttagtagaaaccatgccagatgtgtgatgcagttcagtggaatgttagagagcaactgatggtggcactttgaattgggattgtaagcgtgacagatgggggctgaggcaagaagagcctagaagcatgrgtcagtgagtatgcatgaatgtgggagggtttgttgggggcatcacatcttgtctttgtcaaagaggtaattgaagactatgcctaagtttttaacaaggtcaagagattctggcagtgagggaaggaggtttatttatttatctagaaaata

SEQ ID NO: 725667 - DNA, 629 bp, Homo sapiens
ctgagtttaatcaaggctgagtaaaatattttgagttcaataatttatttttgagctggttttggagaaagtgaatgacataaatggaagtaatatatttgaatataattcttggggaaattttatattcaaaaaccagtttcattaagtgtagtgacacaatgaatcttctacatacccctactgcatgagattttccaaagagaattttgtcgcaaycaacagacttgcagccaatatccaagcagtgcttggatcaactgggatattacagtaactagtcctgtaatgctgtaacgttatttaatatgttaaataaccctgtatgctgatgtgggctagaatgatgactatgaccaggggaagagactatgaccaggggaagagatgaatgtaattaacttttattgtttggagatagcttacaggtgttgccagataatatactgcagaacactgagtttataccctttactccacaggtactccacaggttggtatttgtcctctaacttctcctgcccccatgagatttgttccattcactgaacaggccaaacatgggagaactagattgtagagtttataggcaactccttggtcacctcagaaacagaaggtgaggtgag

SEQ ID NO: 725668 - DNA, 629 bp, Homo sapiens
ctgagtttaatcaaggctgagtaaaatattttgagttcaataatttatttttgagctggttttggagaaagtgaatgacataaatggaagtaatatatttgaatataattcttggggaaattttatattcaaaaaccagtttcattaagtgtagtgacacaatgaatcttctacatacccctactgcatgagattttccaaagagaattttgtcgcaatcaacagacttgcagccaatatccaagcagtgcttggatcaactgggatattacagtaactagtcctgtaatgctgtaacgttatttaatatgttaaataaccctgtatgctgatgtgggctagaatgatgactatgaccaggggaagagactatgaccaggggaagagatgaatgtaattaacttttattgtttggagatagcttacaggtgttgccagataatatactgcagaacactgagtttataccytttactccacaggtactccacaggttggtatttgtcctctaacttctcctgcccccatgagatttgttccattcactgaacaggccaaacatgggagaactagattgtagagtttataggcaactccttggtcacctcagaaacagaaggtgaggtgag

SEQ ID NO: 725669 - DNA, 629 bp, Homo sapiens
ctgagtttaatcaaggctgagtaaaatattttgagttcaataatttatttttgagctggttttggagaaagtgaatgacataaatggaagtaatatatttgaatataattcttggggaaattttatattcaaaaaccagtttcattaagtgtagtgacacaatgaatcttctacatacccctactgcatgagattttccaaagagaattttgtcgcaatcaacagacttgcagccaatatccaagcagtgcttggatcaactgggatattacagtaactagtcctgtaatgctgtaacgttatttaatatgttaaataaccctgtatgctgatgtgggctagaatgatgactatgaccaggggaagagactatgaccaggggaagagatgaatgtaattaacttttattgtttggagatagcttacaggtgttgccagataatatactgcagaacactgagtttataccctttactccacaggtactccacaggttggtatttgtcctctaacttctcctgcccccatgagatttgttccattcactgaacaggccmaacatgggagaactagattgtagagtttataggcaactccttggtcacctcagaaacagaaggtgaggtgag

SEQ ID NO: 725670 - DNA, 1696 bp, Homo sapiens
ttttatgatgccttctcagtgagtagctattttgtatgctattagtattagcagtcaaagtaagagaaaatagctatttttgctctttatttgttctggacacatactaactggaagtctgaaaacagtactgctgaatcgtttatgggatattgatattctaacatttcagggttatttgaattatcagaataagcttagatttagtttttaaacaacctagtatatttaaytcaaagtttaagaaatttgcgtatcatagaattttagactttgaagtagaccggatgttagaaatcacttagtttcaaactgtcattttacagatgtgcaaactgaccagttacattaaaattaatcttgtaatgctttaaatttcttattttacattttttcactctaaatttgcatgatttttcggttagttgttctgaaagaaagcctcctgacggagtctcgctctgttgcccaggctggagtgcagtggtgcagtctcggctcactgcaacctctgcctcccaggttcaagcaattctctgcctcagcctcccgagtagctgggattacaggcgcctaccaccacaccagctaattttttaaggatttttagtagagatgtggtttcactgttttggccaagctggtcttgaactcctgacctcaggggatccacccatctcggcctcccaaagtgctgggattacaggcgtgagccactgcgcctggcctaagcctcctttatatgaaagttctgtgtttataaatgtttgactaataatccagtacaaaaaacaagatggctttttaacctttttccttttttttttccctaagagtcggggtctcactatattgcctaggctggtctcgaactcctgggctcaagttatcctccctccttggcctcccaagtgccagcttttccttttttttttttaagacggagtctcgctctgttgcccaggctggagtgctgtggcgcaatctcggctctctgcaatctcctgatctcaatcaggagattgagaccatcctggctaacacagtgaaaccccgtctctactaaaaaatacaaaaaattagccgccccccgctcatcggcctccccaccactggcctcccagagtgctggcattacaggcgtgagccaccgcgcctggcctccttttccttttcctttttttttttttttttttttttttaaagatccttgttatctattgaaaacaaaagtaccttcctttgcttcagctgtttgggtcctctactctgtgaattagtattgtactgcattggaggcttatatagaaagcctttcccctagaaactgggggaagaattaaataatgaaagcctggtgtttttctaataagttttggttggcagtcttgcctatctgctgtgcctcagctgcttatttgggacaggtatggttacttatatatgcctggcgtgctgaaacatctcttgaaactgagttctataccattcctttgtcttggctttactacttcactactacctactacttaatgtttctgccctcattgaaatttgctcaagattcaccacccagagcattttaaattaatcctttctgtttcattattcctcacttacacttaaaatgacagtatatggccaggtgtagtggttcatccctgtacacctagcactttgggaggctgaggcggaa

SEQ ID NO: 725671 - DNA, 1696 bp, Homo sapiens
ttttatgatgccttctcagtgagtagctattttgtatgctattagtattagcagtcaaagtaagagaaaatagctatttttgctctttatttgttctggacacatactaactggaagtctgaaaacagtactgctgaatcgtttatgggatattgatattctaacatttcagggttatttgaattatcagaataagcttagatttagtttttaaacaacctagtatatttaactcaaagtttaagaaatttgcgtatcatagaattttagactttgaagtagaccggatgttagaaatcacttagtttcaaactgtcattttacagatgtgcaaactgaccagttacattaaaattaatcttgtaatgctttaaatttcttattttacattttttcactctaaatttgcatratttttcggttagttgttctgaaagaaagcctcctgacggagtctcgctctgttgcccaggctggagtgcagtggtgcagtctcggctcactgcaacctctgcctcccaggttcaagcaattctctgcctcagcctcccgagtagctgggattacaggcgcctaccaccacaccagctaattttttaaggatttttagtagagatgtggtttcactgttttggccaagctggtcttgaactcctgacctcaggggatccacccatctcggcctcccaaagtgctgggattacaggcgtgagccactgcgcctggcctaagcctcctttatatgaaagttctgtgtttataaatgtttgactaataatccagtacaaaaaacaagatggctttttaacctttttccttttttttttccctaagagtcggggtctcactatattgcctaggctggtctcgaactcctgggctcaagttatcctccctccttggcctcccaagtgccagcttttccttttttttttttaagacggagtctcgctctgttgcccaggctggagtgctgtggcgcaatctcggctctctgcaatctcctgatctcaatcaggagattgagaccatcctggctaacacagtgaaaccccgtctctactaaaaaatacaaaaaattagccgccccccgctcatcggcctccccaccactggcctcccagagtgctggcattacaggcgtgagccaccgcgcctggcctccttttccttttcctttttttttttttttttttttttttaaagatccttgttatctattgaaaacaaaagtaccttcctttgcttcagctgtttgggtcctctactctgtgaattagtattgtactgcattggaggcttatatagaaagcctttcccctagaaactgggggaagaattaaataatgaaagcctggtgtttttctaataagttttggttggcagtcttgcctatctgctgtgcctcagctgcttatttgggacaggtatggttacttatatatgcctggcgtgctgaaacatctcttgaaactgagttctataccattcctttgtcttggctttactacttcactactacctactacttaatgtttctgccctcattgaaatttgctcaagattcaccacccagagcattttaaattaatcctttctgtttcattattcctcacttacacttaaaatgacagtatatggccaggtgtagtggttcatccctgtacacctagcactttgggaggctgaggcggaa

SEQ ID NO: 725672 - DNA, 672 bp, Homo sapiens
ctttaacttgctttctataggaatcttctatcgtaggatcatatttttcaacaaaaattcattgaacaaattgtacagtcaaagcagactttccaacgcctcctgagtcaagaacgactagcttatattcacacatgatgcaaacttgtcaaaacctattacctctcacgctgtcactgggtccccgcagccagcgtcaccccgtgccgctccccgcgggtcgctactctggtcgtcacsgcggtcctgcagctgccgccgccgctcgggctggtttacacgcctgactctgggagaggtttggcaatgtcctgaacactttcactgtagtagatgctgatggaattcatgacgtgctatcccaaaatacaacaccttggcatttgagaagatagcagaaggaggaggctcattctcacctttccccttttttctccagaagcaggtcataaagccgaaaaggacatttctgcctttctctgaagcaggtcataagtccctcattagagaagtattctccctatacctgaagaaaaggaacatccttatctatgaagacacaggaactcagagaagaatctgaacaaacaggccttgcaaaatgccctccagcttcctgccattagatcatacctcctttttccggccatacttctccataactatccactt

SEQ ID NO: 725673 - DNA, 1853 bp, Homo sapiens
tatctgcgtgcatgattattatgtcttccctgctagattccatgaaagcagagaactcatctgttttgttctccagtgtatctctagtgcctaacacagtgactgacatagagtaggtatttaataaatatttaatggccatattcccaattcagcacctttggtcccattatcttttgtcctttcctcttatgctgtttaactatttaaatcttttccacccctcaagactgagctcagttctccctctttgaagtctatcatggttttgcaacagttaatctttcttctctaaaattttatagcatttattgccagtaccaccttgtgttcatggaaaatcacactatcacatatcttattttacctagttgtatcaaaagcttcttattttctcagaaatcttgtagcttgttatgccagtacccctcatatttttggttaacttgaccagcttctattaatatcttaattagctaatttgactggaagcttctcgatcagaagctgttttagctaatgccctcctcagttattttcactggcacatagtaggtctttagtagagtttttgatgaccaatgatatttatgtataggtagcaattttaatttcttaagcttattaacttggattctttttattagaatcctgcttagtattttctctaatctaaaggccgggagtgcaccaactgcttccggcgatatagagactattagggtgtgaaagtacaggagtccagtcctaatgccacaaagcagattctcctttggaacttgtcactggtgtagaattaactatgcagagttccttcttagaaaaaatgctttatcagtgcttgtttaatgttctcagattggaattactaacagaaacaagacactaggtagtactttatttgaattttctgttgactaacattttattttgatgtcaacaaagcaaatcttgagccaattaaatctgcttaaagctgctttgtctgatgggtaagctctctcagtagttactcttcctcttgtgttaaaggcagaagaatgttctataagccaatttaaatgcaaatttaaattagtagcaacttagttgatttaactcagtacatatttcaaattaagtggtaaatttaaattagtttttaggaggtacctactgtgtattttaaatcagtgattattttggcttttctgatgaaactacatcagaatattacagggtaatgtagtaattggtttgtttttgtttttgttttttgagacggaattttacccttgttgcccatgctggagtgcagtggcgtgatcttggctcactgcaacctccacctcttgggttcaagcgattcttctgtctcagcctcccgagtagctggaactacaggcgcatgccaccatgcccagctcatttttgtatttttagtagagacaggggtttcaccatgttggccaggctggtctcgaactcctgacctcaagtaatccgcctgccttggcttcccaaagtgttgggattacaggcatgagccaccgcgtctggcgtgatactgatattattagccattggctatgtgacaggcactatcctaagcatttttcatacattagtttatttactcattcactcaacaaatatttattgagtacctatcatgtttcaagctcataatctcatgtattcttcaccacacccatgaagtaagtatatagtttattattttaaccccattttacagatgaggaactggtacacacagaagctagatatccagtgtcacaagctgttgagggtcagatactgagrttttttaaaagaatgccagttagtgacatctttggcatgaattaattcta

SEQ ID NO: 725674 - DNA, 611 bp, Homo sapiens
gttttctctgcttgcttcattttaggtcttctctgtagtcctggaaattcccagtgttccctccctcgtgcttttaatcttgctgttcaaggttgaattcytctctttttgcctctccaggaatcctaattgttcaaggtcttgcttctggtcctcctgaggcctccctacctcctgtgggtcccttcagtgatctctaaattgtttcagttaaatttaaactgtgtaggaacaaggaccatgtgctgtacttaaaaatgccacatcccttacagagcctggttatagttctgggcatgtagtatgtgtaaatttaatatgagttgactgtttaaaaacttctgttaacttaatcagaaaacaagaaaaatttaccaagtcttttactgctttcaaaacatgtctacgatgtatgtttcttatgttttaaaatgcctctgctcatttcgttcttgtgctaatgccgagcaacaacatagggtgaacatcaggtgtgcttttttacatacggtcgggaaggtggagagatgccattgcaccccctctggaagattgtagacagtacgaacacccccgttgtcaattaagtcgtaatccttcgagagagtttg

SEQ ID NO: 725675 - DNA, 611 bp, Homo sapiens
gttttctctgcttgcttcattttaggtcttctctgtagtcctggaaattcccagtgttccctccctcgtgcttttaatcttgctgttcaaggttgaattcttctctttttgcctctccaggaatcctaattgttcaaggtcttgcttctggtcctcctgaggcctccctacctcctgtgggtcccttcagtgatctctaaattgtttcagttaaatttaaactgtgtaggaacaaggaccatgtgctgtacttaaaaatgccacatcccttacagagcctggttatagttctgggcatgtagtatgtgtaaatttaatatgagttgactgtttaaaaacttytgttaacttaatcagaaaacaagaaaaatttaccaagtcttttactgctttcaaaacatgtctacgatgtatgtttcttatgttttaaaatgcctctgctcatttcgttcttgtgctaatgccgagcaacaacatagggtgaacatcaggtgtgcttttttacatacggtcgggaaggtggagagatgccattgcaccccctctggaagattgtagacagtacgaacacccccgttgtcaattaagtcgtaatccttcgagagagtttg

SEQ ID NO: 725676 - DNA, 1052 bp, Homo sapiens
gatgcaggtagaagtgaattaacaggggctacactaacaggaaggtatagatgttgtgcacgtagccaaaggatacaccaaaggtgagaagtgaggagataagatgagcaggacagataggacaagaatacaggcatgacctgtgtcatagattttagcctatgcaagagtcccaaaatgccaggagaattagaatattgagttacatggactgattagttcatatgttggtaaaataagaacacgtaactgatttatattcctcatgtcctgttgtacagatcaatatttgaaaaaccagaatatttcttctataacatgtctcttataaagatccagtcccagccaaacaaggattaagaaaaacttatygttactgttttttaattacaaaggtaatataatacatggacatgtattcctgaagttcttagcacttattaattacaatgtatcttaaaaaacaaaacctgaataaatacttagaaaacactcattatgtagttagttttagcagggacataaatacattttgcacatattcctcatctacgagtaactcataattgagaggttaggatttatgtgcagaaaaaaattaaacagttccaaaatattatagtcaatatatgactgttttcaagctaaatgatataaaaatgtcagtgactttagaaggagctatttcattgggcaataatgattgcagaaggtttcttttgagagagaggacctaagcaatataagcacaatgtgtggaatccaaacaaacaaacaaaaaatcatccctggcttttttggtgaaaattaaaatttagaacaacagaaaataccttatgagtttcattatctaatgaagcaaatgtggtcctaattttagttggaaaagataaaatctgtctttgaagtttatattatttaaatagtcaaagttttcctgattttttagtgctaaccagtaatttgcttaattcttaatgctgatcgggttttataacattaatctctatatcagaaagagtatgaaaattttacatatttttcttttttaa

SEQ ID NO: 725677 - DNA, 1052 bp, Homo sapiens
gatgcaggtagaagtgaattaacaggggctacactaacaggaaggtatagatgttgtgcacgtagccaaaggatacaccaaaggtgagaagtgaggagataagatgagcaggacagataggacaagaatacaggcatgacctgtgtcatagattttagcctatgcaagagtcccaaaatgccaggagaattagaatattgagttacatggactgattagttcatatgttggtaaaataagaacacgtaactgatttatattcctcatgtcctgttgtacagatcaatatttgaaaaaccagaatatttcttctataacatgtctcttataaagatccagtcccagccaaacaaggattaagaaaaacttatcgttactgttttttaattacaaaggtaatataatacatggacatgtattcctgaagttcttagcacttattaattacaatgtatcttaaaaaacaaaacctgaataaatacttagaaaacactcattatgtagttagttttagcagggacataaatacattttgcacatattcctcatctacgagtaactcataattgagaggttaggatttatgtgcagaaaaaaattaaacagttccaaaatattatagtcaatatatgactgttttcaagctaaatgatataaaaatgtcagkgactttagaaggagctatttcattgggcaataatgattgcagaaggtttcttttgagagagaggacctaagcaatataagcacaatgtgtggaatccaaacaaacaaacaaaaaatcatccctggcttttttggtgaaaattaaaatttagaacaacagaaaataccttatgagtttcattatctaatgaagcaaatgtggtcctaattttagttggaaaagataaaatctgtctttgaagtttatattatttaaatagtcaaagttttcctgattttttagtgctaaccagtaatttgcttaattcttaatgctgatcgggttttataacattaatctctatatcagaaagagtatgaaaattttacatatttttcttttttaa

SEQ ID NO: 725678 - DNA, 1052 bp, Homo sapiens
gatgcaggtagaagtgaattaacaggggctacactaacaggaaggtatagatgttgtgcacgtagccaaaggatacaccaaaggtgagaagtgaggagataagatgagcaggacagataggacaagaatacaggcatgacctgtgtcatagattttagcctatgcaagagtcccaaaatgccaggagaattagaatattgagttacatggactgattagttcatatgttggtaaaataagaacacgtaactgatttatattcctcatgtcctgttgtacagatcaatatttgaaaaaccagaatatttcttctataacatgtctcttataaagatccagtcccagccaaacaaggattaagaaaaacttatcgttactgttttttaattacaaaggtaatataatacatggacatgtattcctgaagttcttagcacttattaattacaatgtatcttaaaaaacaaaacctgaataaatacttagaaaacactcattatgtagttagttttagcagggacataaatacattttgcacatattcctcatctacgagtaactcataattgagaggttaggatttatgtgcagaaaaaaattaaacagttccaaaatattatagtcaatatatgactgttttcaagctaaatgatataaaaatgtcagtgactttagaaggagctatttcattgggcaataatgattgcagaaggtttcttttgagagagaggacctaagcaatataagcacaatgtgtggaatccaaacaaacaaacaaaaaatcatccctggcttttttggtgaaaattaaaatttagaacaacagaaaataccttwtgagtttcattatctaatgaagcaaatgtggtcctaattttagttggaaaagataaaatctgtctttgaagtttatattatttaaatagtcaaagttttcctgattttttagtgctaaccagtaatttgcttaattcttaatgctgatcgggttttataacattaatctctatatcagaaagagtatgaaaattttacatatttttcttttttaa

SEQ ID NO: 725679 - DNA, 651 bp, Homo sapiens
gtgcaatttctagtggaatatttacacttaagatctaattatttatcaaaagactgctgtaggtaggaaattcttaacccccatttgcagaaacagactttgcctgacaccacagagctaggaaaaagtgggcataagatcctcatcaagtctgacttccaaaagaagattcaaaaagaaacctccttgctacccgccaaatctctgtagagccagccatgttcacacatgaaacaggacaatgacaatagcaccaggaatagctactcctggtcagatgccctcatgagstcaactccgcgggatggggacaccgggccctgcttaggggaaaggaagggggtttgtagaggaagcccagccagccaagcaaccagagatgggaaaaacctattgggaagaacttgcttgctctagctgggctttgcaaagaacaggaaaagatgagtctgcacagacagaaatggtctagaatggctgaatgtttcatgtagaaattttattttatgattaatacactcgtgccatttcttggaaccacttgcttgtttaattctagtctatcaagtgataactttgttgatatttagaggctcctcagttaatttctgtgggatttttggttatatttaataaggaaaataatatgaa

SEQ ID NO: 725680 - DNA, 1949 bp, Homo sapiens
tatttctttgacatatttggagatggctagtcagaggagctgtatagctctgaaaatagctctgaaaggctgtcctttcttagggaagatttacacctgtagaaaaaaatctacattagtaaggcgaacgggatgcttggcagaggctttctctgaggcccccttatctgcctaagaagtttgtaaaaaagattcactcacagaaaaaggaggctaaaggtctgataacttttaaatctcttacagagaaacttttgccacaggatacatctattctttcttaggactagtacctaggacactatctgcctaacaagaaagcctttgcttgccatgcttctcttcaaccttacataatttcaaggagcttcaagcccctacccctttctgtatggtataaaaacttcagttacctggcccttctttgaatttcatattttgtgtaacagcagtgctcttgcaccttaatacatttttatgagtttttcctgttaatctgttcattgtcagtttatttcagcagaattaaagactcaaaccttcagaggaggaagaataaatttccttcacccttacctaaagtaatgagaaaattctcagtatactttgattatagtggtcactgaaaataacagcgcagaatggtgcttttgagtgaaatatggtaagcccatactgtagatatttacagggtccttttgacaaataattgtgatgcttgtttgttacatagtaggagaatcacttgaaccttctaggcggaggttgcagtgagccaagatcatgccrcttgttaaaggatactaaatatggtctgaaaaggactccatacttctatatttgagtccttgtggatgaagtgtaacctagcttaatagacaaaactgaaaacctaacttagtagtatgcccctgtaacaaaagctgagtgttggctaatcccagcagccatacttcaaccactcatagactgcagaatgttcaaactgcattcaaataagccaaatgccgagttgtaaccaatctcactgtttctgtaccttacttctgattcctatacgtcactttacctttttgtctataaatttgttctgaccatgaggcatccctggagtctctgtgaatctgctgtgattctgcgggctgcccaattcgtgaatcattcattactcagttaaactcctttacatttaattcgactgaagtttttcttttatcacactgcactccagcctgggcaacagagcaacactctgtctcaaaaaacaaaacaattctaacaatacagataagtcacaatttctacctgtatgatattccctcataattcagatccatcctcagagataatcacaataaatagggtatatcattttaaagctaatgctagggtttctcatacatagaggtgctataaaaatatattgtgattattaatcataatggctagtgaggtgcatattattttgccatattattttgctacttcataacatgaatgcaggatctttctatgataacacatttagatgtacttcacctgtggaactacccagtagcatgtatgtgccatgattaatttagccatctccttccagtgtgcacataattagtttactcatttattgctataacttacagaactgaaatattctgaacataaaatattaagctaaagcctattctgatagcaaagtggaaattaggttaaagtgggtagtgtgtggagattttaaatttgtataaatattacaaaaatttcatcccccaaatgtttacccattcatattctcacaaagcaatgcatgtaaatattataaatatacatattttattttataaaccaaaatgcttaattttagtgcttctcaaattagattcaattagaatgaccaggtgatagggaatggggccagatgagacactcacacttagtattggatgaggatc

SEQ ID NO: 725681 - DNA, 1949 bp, Homo sapiens
tatttctttgacatatttggagatggctagtcagaggagctgtatagctctgaaaatagctctgaaaggctgtcctttcttagggaagatttacacctgtagaaaaaaatctacattagtaaggcgaacgggatgcttggcagaggctttctctgaggcccccttatctgcctaagaagtttgtaaaaaagattcactcacagaaaaaggaggctaaaggtctgataacttttaaatctcttacagagaaacttttgccacaggatacatctattctttcttaggactagtacctaggacactatctgcctaacaagaaagcctttgcttgccatgcttctcttcaaccttacataatttcaaggagcttcaagcccctacccctttctgtatggtataaaaacttcagttacctggcccttctttgaatttcatattttgtgtaacagcagtgctcttgcaccttaatacatttttatgagtttttcctgttaatctgttcattgtcagtttatttcagcagaattaaagactcaaaccttcagaggaggaagaataaatttccttcacccttacctaaagtaatgagaaaattctcagtatactttgattatagtggtcactgaaaataacagcgcagaatggtgcttttgagtgaaatatggtaagcccatactgtagatatttacagggtccttttgacaaataattgtgatgcttgtttgttacatagtaggagaatcacttgaaccttctaggcggaggttgcagtgagccaagatcatgccgcttgttaaaggatactaaatatggtctgaaaaggactccatacttctatatttgagtccttgtggatgaagtgtaacctagcttaatagacaaaactgaaaacctaacttagtagtatgcccctgtaacaaaagctgagtgttggctaatcccagcagccatacttcaaccactcatagactgcagaatgttcaaactgcattcaaataagccaaatgccgagttgtaaccaatctcactgtttctgtaccttacttctgattcctatacgtcactttacctttttgtctataaatttgttctgaccatgaggcatccctggagtctctgtgaatctgctgtgattctgcgggctgcccaattcgtgaatcattcattactcagttaaactcctttamatttaattcgactgaagtttttcttttatcacactgcactccagcctgggcaacagagcaacactctgtctcaaaaaacaaaacaattctaacaatacagataagtcacaatttctacctgtatgatattccctcataattcagatccatcctcagagataatcacaataaatagggtatatcattttaaagctaatgctagggtttctcatacatagaggtgctataaaaatatattgtgattattaatcataatggctagtgaggtgcatattattttgccatattattttgctacttcataacatgaatgcaggatctttctatgataacacatttagatgtacttcacctgtggaactacccagtagcatgtatgtgccatgattaatttagccatctccttccagtgtgcacataattagtttactcatttattgctataacttacagaactgaaatattctgaacataaaatattaagctaaagcctattctgatagcaaagtggaaattaggttaaagtgggtagtgtgtggagattttaaatttgtataaatattacaaaaatttcatcccccaaatgtttacccattcatattctcacaaagcaatgcatgtaaatattataaatatacatattttattttataaaccaaaatgcttaattttagtgcttctcaaattagattcaattagaatgaccaggtgatagggaatggggccagatgagacactcacacttagtattggatgaggatc

SEQ ID NO: 725682 - DNA, 618 bp, Homo sapiens
tccccctttgactgtaaaatggagagtataaagmggttgttgagaggaataaatgctaaatgtatgtaaagttcctggaacataaggaatcaagaaatgttaggcccatctttctttttaacctgttaagagtattttaaattactctgaaagtctttccctagctgcctcttcaaattcaggtggcctctctgtcatagctccaggcttgtccatagcttatgagaccagacagtgacttccctatgtttacgtctcatgttcagtttgttttgacaccgattgaagttgccattgaagacatgaagaagaagaccctgcagttagcagttgccattaaccaggagccgcctgatgcaaagatgcttcagatggtgctgcaaggctctgtgggagctactgtaaatcaggtaagcaaaaccagaggtggcagctcctctggttcttattatttaggttgtcattatacgtctgcacccttcttccttggggttgatgaggactttgatccatagacaaacacagaaatgttcctacacttaacctgaacacctgtaaggtttagaagacttttaggaaacctcttccctttcatgtaacaaccccaggtaaaaaaga

SEQ ID NO: 725683 - DNA, 618 bp, Homo sapiens
tccccctttgactgtaaaatggagagtataaagaggttgttgagaggaataaatgctaaatgtatgtaaagttcctggaacataaggaatcaagaaatgttaggcccatctttctttttaacctgttaagagtattttaaattactctgaaagtctttccctagctgcctcttcaaattcagktggcctctctgtcatagctccaggcttgtccatagcttatgagaccagacagtgacttccctatgtttacgtctcatgttcagtttgttttgacaccgattgaagttgccattgaagacatgaagaagaagaccctgcagttagcagttgccattaaccaggagccgcctgatgcaaagatgcttcagatggtgctgcaaggctctgtgggagctactgtaaatcaggtaagcaaaaccagaggtggcagctcctctggttcttattatttaggttgtcattatacgtctgcacccttcttccttggggttgatgaggactttgatccatagacaaacacagaaatgttcctacacttaacctgaacacctgtaaggtttagaagacttttaggaaacctcttccctttcatgtaacaaccccaggtaaaaaaga

SEQ ID NO: 725684 - DNA, 618 bp, Homo sapiens
gcagaatgcatggagtagttgggtggcaatttttccaaggcaactgggagacagtaggatccagtttgaagacgttcatttaagagaattggcagccactgaaacagatgatgtaaataataaagtggtatttattacagcatataattctgataatttatytagctcgcaataatcaaatgcaactaaacagtgagtagatattgaccagtactctttttggcagtaatttctgtccagttctttgcattttaaatctccgagacctcctgaaatggtaatattgatgatttattgcttttggagctaaagcagtagcatttttctctgtagccaatgtttgtgtgtgtctgaacaacatcaatgtttatttcaccttttatatcttttaaagaaaaaatggtttcttcttgggggacaaagctagttctatacgtgaagcatggatattaaatttggaaatagtgaacactgcaatgctttttaaaaaacagatgagtattcttccaacatctatcacccgctagctttccattcctgaaatttgacatttgctaaggcaaatcatttctgcctcttgctataatgtggcttagcatgttttgctacttctgactg

SEQ ID NO: 725685 - DNA, 619 bp, Homo sapiens
tccaacctgaaactagggaaatgaaatagatctcagaaatagaaactgtctggagtttagaagatggatgttaaatatatttaagaaataaaaataaaacctcttataattttcctaagaacaaatcaatagttcaagacttggctgggcatggtggttcacacctgtaatcccagcactttaggaggctgaagcaggaggactgcttgagcccaggagttcaagaccacctkgggcaacatggtgagactctgtctctacaaaaaattaaaaattagcctggcacagtggcatgcacttgtggtcccagctactcaggaggctgaggaaggggaatcatttgagcccaggaagttgaggctgcagtgagctgtgttcatgccactagactccagtctaggtgacagagcaagactgtctcaaaaaaaaaaggatgactttgttgttctaacatctggaaccaaactttttagtttggtattagattagtgtacttttaatatcaaagctcaatctttgtagacttataaataatttctttctaattatagccaacttgatcatacacaaaatttctttcataaatttccttttcataaatcttatcaccctttactca

SEQ ID NO: 725686 - DNA, 653 bp, Homo sapiens
aattcagttgtatgtaagagtttcatgatttttgctgtatctgcatattattttacataactttttctctatttaacattttcctgtaatattgagaggtgacaaagtgctagcagccctcactcgctctcggcgcctccttggccttggggtccaccctggctgcccttgaggaccccttcagccgccgctgcactgtaggggcccctctctgggctggccgaggccagatctggctccctctgcttgcagggaggtgtggagggagaggcgcgggcaggaactggggctgcacgcagcaattgcggccagcgcgagttccaggtgggygagggctcagcgggccccgcactcagagcctctggccagtgccaccggccccaggcagtgaggggcttagcacccggccagcagctgcggagggtgcgccaggtcccccagcactgctggcctgcccacaccccactcgaattctcactgggcctcagccacctccccgcggggcagggctctgaacatgcacaacatgaccaagccccccctcccccagtgggctcccacggggcacaaccctccccaactggcgccatcccctgctctacggcccccagtcccattgaccacccaaaggctgaggagtacaggggcgtgac

SEQ ID NO: 725687 - DNA, 638 bp, Homo sapiens
catgattctccccccttcatttgcctcttgcaaaaatgtggtgatgaaccaggtttgctcatgcagatgatgatactcttcaaaatggttgcagagaaataaaatgaagggaatatggttcacttaataatctcataaattagaacttattaccccagtgactcttacatagctccagacaaatatttgagagagatgaaatggccttttgctaccaatatcttatgtgatgcttcactttttgrttccttggataactacttacaactcattagcccatttatgccagaggttgcaattttttgaatttttgcatgagtgaaaaatcagaccttgtcaatgaccttgagcagtataagtaactcccacatgcttagcgttccaataatggaacactaggcctaagtgggttaacacaataatgaaatcatagctattcaactaattatacgacttatttgtttcctcatctctaaaacatagtaagggaccagttattttaaaaatacatcacagtgacaagtttatttttcactcagtttgggcttgttgtttaaggtcattgcttggcataaagaaaacaaaaagaggagaaacaagaatagaaacatcaaatagaagcagcagcagcaaaagaa

SEQ ID NO: 725688 - DNA, 930 bp, Homo sapiens
tggaggctcagagaggttaagtaagttgctcaaggtttcaaaggaagtgatgaagcaggtatacaaataacggtttgtcaagtctcaaaagcgtataatacaactgagaattatggtatatcttattcacctaagtctgctttgagatagttatatcctcagaaattgtgcaacaaaatcttctgattcagaaggttagtagacttattagtacaagagaagagttaccaactttgcctgactgattaattcctagggtgaatatgtgatgtatatattaaatataccagacttagtcttgatattattggatagattcaagtacttcctctttaccamgatgattttctctagacacctctatcacagtgtaatcttttttaatacttgtgcaaactcagcaatggctaatggttatttctgtgatgcagatgagatctacctctcatataccacattttattttctcttctttatcctatctttgcattccaaaggtaatcatttattcttgccttcaccatattccagctcaaatctcctttctcttcattcacccatgggtgccttggtgttcttctgcctctgtaggactgatagccctgtgttgctggttatgctctattactttttgacattatcctcttccttatccttcaaaagcacttcttcctcctctaccttttatctttcttccatgaaaccagagttagctgggagagaatacaatagagtatctgggtataggggtatacataaaggttctacttctagctgggtggccttggtaagtaatttaacatctccatgcctcattttcctcatcaataaaaaaaaaaatccacttgtaactttcaatgattatttctttaccatagctcaaaaggccatagatgctgtttttgtgccatgacccccattggaagtaca

SEQ ID NO: 725689 - DNA, 660 bp, Homo sapiens
gacatgctggctctcttccaccataattgtaagcttcgtaaggcctcaccagaagcagatgccagcaccatgcttcctgtacaacctgcagaatcatgagccaattaagcttcttttttttataaattacgcagcctcaggtatttctttatagcaatgcaaggatggagtaatacagcatcttaagaaatacggcaatgaattccctgtgttttgacagttttgcagaagaaacagcataactagcactgctgatataattaaggcaactctatgttctgaatgcctaaatgtgtcaggcacttctctaggtattttggtatgtattatgtcatttaattcccatgtacactccctatttttacatgggaaggaaatagattgagagaagttaagagtcttgctaagtttatgctattgatggatgacagttgggtttgaacttggtttttctgactcatgtcatttccaattgataattaaccatgcttcccatctgagtattctttgttctccrtttgccgaaatagtcacagttatcattgacattccagaggaaaaaaaattatcctgagaatcttaagtgtactgaaaaaaaaaaaaaggagagaggattctttgttacaatttttttacattttgttatgtttattagagtga

SEQ ID NO: 725690 - DNA, 1933 bp, Homo sapiens
taagcaatatttatatttatttgacattgccattaccagtaaaataatagagaattgtttttgaatgatttkattgtttaaataaatgtcatcttactgtacaacaatttgcttttctcactcaactttttgtttttgagtgttatcatgttaatacatgtaactggaaaatgagattttttattatagtttttaagttaagaatagaataactaatttattttacttgaaaaaatctttttacagagtttcttcttaaattttcatcttaaattacacctttctaatttaaatgaacagtttttatatactgattgtattaattgaaataagaacaaaatgaccaacaaagtttatttttttaactaacacacacacacacatacacacaattctctattatgaatattttaacaaatgtagtttcctaaaacaaacatacattgtctcaagtttacaagtcaacattcttgcaatctctactaaacaaacttttacacatggcaggaaagttctttgctctttcaagtaaatagtcttagataagagatcattgggaggccgaggcgggtggatcacgaggtcaggagatcgagaccatcctggctaacaaggtgaaaccccgtctctactaaaaatacaaaaaattagccgggcgcggtggcaggcgcctgtagtcccagctactcgggaggctgaggcaggagaatggcgtgaacccgggaagcagagcttgcagtgagccgagattgcgccactgcagtccgcagtccggcctgggcgacagagcgagactccgtctcaaaaaaaaaaaaaaaaaaaaaaaagagatcatttcatgataagtaaagacaaaagaagcatagataaattttataatcatggcaactggaatgtaaatattctctaagcttctgcattatctttttcatctaaacaaagaataagggctaacccagtgtttgggattctcaaaaacactatgctaataacctcattgaagttttttattacgtattactgaaccatgtggcttagagtttcaactataattttaactgaagctgattctaagtatttgaggtaaataatgttctatgatatagaacattaaagaatctataggcagaatctatggccacatagtagcaattcatgttaattcttcacagtattccattgtataaagatcctacattctaatctactctctggcaataagattagtttatttccagtttttaattatcacagggaaacccccaagaacatttatgcatatgcctctgaactcacatgcaagagtctatgttccacattaagtcgactgctggatcaccgggtaaagagaatgtgcatctttgatatgatacaaagatcatatctttactagaaattgttaaaattgttttgaagaagttgcaccagcgtagcctttcaccactcctgtgtgagacttctggcttgtttttccacatcccaactcagactcggaattacgagacttttaagttttcaccaatctgctgggtataaatccgtgcctttaatctgtatttccctagttactggggagactatgctttgcttttggattttggatatgctatgtggccatgtatgtttcgtcttctgtgaattgtttgatcacatcctttgcaaattttttcaaggtcttgtatttctttaaaggtttgtaggaattcttgatgtattctgcatacaattgctttttcagttttatgtgttgcaaaaaccaccttccagtgtgtggatttagtactaccattttaatttgcacttaccattcttctcctcatcgtcctcctcctcctcactcttatgtttgctccattcttgccttctgttgtacttataacatttataaatatatacatatgtgaaaggaaaataaatcttgggataagccaaa

SEQ ID NO: 725691 - DNA, 1933 bp, Homo sapiens
taagcaatatttatatttatttgacattgccattaccagtaaaataatagagaattgtttttgaatgatttgattgtttaaataaatgtcatcttactgtacaacaatttgcttttctcactcaactttttgtttttgagtgttatcatgttaatacatgtaactggaaaatgagattttttattatagtttttaagttaagaatagaataactaatttattttacttgaaaaaatctttttacagagtttcttcttaaattttcatcttaaattacacctttctaatttaaatgaacagtttttatatactgattgtattaattgaaataagaacaaaatgaccaacaaagtttatttttttaactaacacacacacacacatacacacaattctctattatgaatattttaacaaatgtagtttcctaaaacaaacatacattgtctcaagtttacaagtcaacattcttgcaatctctactaaacaaacttttacacatggcaggaaagttctttgctctttcaagtaaatagtcttagataagagatcattgggaggccgaggcgggtggatcacgaggtcaggagatcgagaccatcctggctaacaaggtgaaaccccgtctctactaaaaatacaaaaaattagccgggcgcggtggcaggcgcctgtagtcccagctactcgggaggctgaggcaggagaatggcgtgaacccgggaagcagagcttgcagtgagccgagattgcgccactgcagtccgcagtccggcctgggcgacagagcgagactccgtctcaaaaaaaaaaaaaaaaaaaaaaaagagatcatttcatgataagtaaagacaaaagaagcatagataaattttataatcatggcaactggaatgtaaatattctctaagcttctgcattatctttttcatctaaacaaagaataarggctaacccagtgtttgggattctcaaaaacactatgctaataacctcattgaagttttttattacgtattactgaaccatgtggcttagagtttcaactataattttaactgaagctgattctaagtatttgaggtaaataatgttctatgatatagaacattaaagaatctataggcagaatctatggccacatagtagcaattcatgttaattcttcacagtattccattgtataaagatcctacattctaatctactctctggcaataagattagtttatttccagtttttaattatcacagggaaacccccaagaacatttatgcatatgcctctgaactcacatgcaagagtctatgttccacattaagtcgactgctggatcaccgggtaaagagaatgtgcatctttgatatgatacaaagatcatatctttactagaaattgttaaaattgttttgaagaagttgcaccagcgtagcctttcaccactcctgtgtgagacttctggcttgtttttccacatcccaactcagactcggaattacgagacttttaagttttcaccaatctgctgggtataaatccgtgcctttaatctgtatttccctagttactggggagactatgctttgcttttggattttggatatgctatgtggccatgtatgtttcgtcttctgtgaattgtttgatcacatcctttgcaaattttttcaaggtcttgtatttctttaaaggtttgtaggaattcttgatgtattctgcatacaattgctttttcagttttatgtgttgcaaaaaccaccttccagtgtgtggatttagtactaccattttaatttgcacttaccattcttctcctcatcgtcctcctcctcctcactcttatgtttgctccattcttgccttctgttgtacttataacatttataaatatatacatatgtgaaaggaaaataaatcttgggataagccaaa

SEQ ID NO: 725692 - DNA, 1933 bp, Homo sapiens
taagcaatatttatatttatttgacattgccattaccagtaaaataatagagaattgtttttgaatgatttgattgtttaaataaatgtcatcttactgtacaacaatttgcttttctcactcaactttttgtttttgagtgttatcatgttaatacatgtaactggaaaatgagattttttattatagtttttaagttaagaatagaataactaatttattttacttgaaaaaatctttttacagagtttcttcttaaattttcatcttaaattacacctttctaatttaaatgaacagtttttatatactgattgtattaattgaaataagaacaaaatgaccaacaaagtttatttttttaactaacacacacacacacatacacacaattctctattatgaatattttaacaaatgtagtttcctaaaacaaacatacattgtctcaagtttacaagtcaacattcttgcaatctctactaaacaaacttttacacatggcaggaaagttctttgctctttcaagtaaatagtcttagataagagatcattgggaggccgaggcgggtggatcacgaggtcaggagatcgagaccatcctggctaacaaggtgaaaccccgtctctactaaaaatacaaaaaattagccgggcgcggtggcaggcgcctgtagtcccagctactcgggaggctgaggcaggagaatggcgtgaacccgggaagcagagcttgcagtgagccgagattgcgccactgcagtccgcagtccggcctgggcgacagagcgagactccgtctcaaaaaaaaaaaaaaaaaaaaaaaagagatcatttcatgataagtaaagacaaaagaagcatagataaattttataatcatggcaactggaatgtaaatattctctaagcttctgcattatctttttcatctaaacaaagaataagggctaacccagtgtttgggattctcaaaaacactatgctaataacctcattgaagttttttattacgtattactgaaccatgtggcttagagtttcaactataattttaactgaagctgattctaagtatttgaggtaaataatgttctatgatatagaacattaaagaatctataggcagaatctatggccacatagtagcaattcatgttaattcttcacagtattccattgtataaagatcctacattctaatctactctctggcaataagattagtttatttccagtttttaattatcacagggaaacccccaagaacatttatgcatatgcctctgaactcacatgcaagagtctatgttccacattaagtcractgctggatcaccgggtaaagagaatgtgcatctttgatatgatacaaagatcatatctttactagaaattgttaaaattgttttgaagaagttgcaccagcgtagcctttcaccactcctgtgtgagacttctggcttgtttttccacatcccaactcagactcggaattacgagacttttaagttttcaccaatctgctgggtataaatccgtgcctttaatctgtatttccctagttactggggagactatgctttgcttttggattttggatatgctatgtggccatgtatgtttcgtcttctgtgaattgtttgatcacatcctttgcaaattttttcaaggtcttgtatttctttaaaggtttgtaggaattcttgatgtattctgcatacaattgctttttcagttttatgtgttgcaaaaaccaccttccagtgtgtggatttagtactaccattttaatttgcacttaccattcttctcctcatcgtcctcctcctcctcactcttatgtttgctccattcttgccttctgttgtacttataacatttataaatatatacatatgtgaaaggaaaataaatcttgggataagccaaa

SEQ ID NO: 725693 - DNA, 580 bp, Homo sapiens
tgagggtggatgcctgcagccctccatcccacaatgccacctgactgagcctcctcctgctgcttcacttgaggggagtaagctgagtgggaggggtctctgcatcgccacactgggacctggaggcagcgcacctgcgccgttgcttctccacgtgcacaggtaggttttgtggctcagccagtggccttcctcctttcccctaaacttcacacayatctcagagagttacaccaaaggccacgcagctgactgcctgagcaccaaggtccagaggatggaaggaaccttggtttccatgctggtggcctcagcacattcagctggagaacagcaaaggaacagagctgtgagccattctcaaacagctttcccctgcagctgcgtgtaaattggttttataatgtttgtctttgggacaaaagctgtatcgccagtgcctacctccttctggtgcccctaacccttcctgccacctgtcctcgtccacacaggcctctggctggcttggctggggccagagccctggaagctgggagccagggtctctggaggccctgtcacccaggggcgtgtctga

SEQ ID NO: 725694 - DNA, 612 bp, Homo sapiens
tatatttttggtctatgttataagctatgtacaaatttagaattattacatcttcctgacagattgaatcttttatatatagctgtaaaattctaatctgataatctttgctttttgttgaatttaattaggtttcatatgtgtgatatattgtgacttatcatttccaatgtttttcttcaagtatctgtttggctactttttccccttctgattctttttgggacattgattctcctctcccgatcatccctgcctgaagactccccatttcacctttgtccctcattggtttggaattcttcaaacacccattgatcrtaatcacacctacctcctttttgctatgagtgtaaacagctttagctttgcttttgaaataaaagttatattgtatttgtatttgtactctccatagttaattataattgatattctatcaactttcatactcatcatttttttccccttccataccacaatttctctttgggtttaattgttttttccccccaccttgctaaaggacatcttacagtgagagtctgtttgggtggaagcaaccttaatctttgcatatctgtgaacatttttatatcactctcactgtta

SEQ ID NO: 725695 - DNA, 420 bp, Homo sapiens
acctgggtttgaatcctgattccaccatttactcattgtatgaccttgggtatgatagttaatctctctgagccttatttccttatctttagaaatagaaataataacagtgtctttcacagagttattgtaagaattaaatgaggtaatgtacgtaaagcccatggtacacaatgtttattaagtggtagatattaataataatattgtacctttgcactcctgtgttacacacacacatgcacacacacacacacacacacacacatgcacacacacacccaacttctactctctaattctccmtctcaaagaaatcttatggcatcacactttcagcactcgtgaactccctgtgtggaaacagaaagttcccacagagtagagcaggcactaggtggctggaagtagtatgtctag

SEQ ID NO: 725696 - DNA, 647 bp, Homo sapiens
aggatcaccattcaaaacagatcttccctcaacacccccacttctatcgtgaatgccacaattcttctaggtcaccagggtagagacactgggtcacctctgaccattatggttctatgctttatccagtcagttatccagtcctatttagtttcttgaataccttctgaatatattcctacttcctttccactcccccmactttttttttttttttttgctcttactttgtgtgtagattaccccaaaaccttcatcctggccttctgttttcctcgtgtctctctccccacctaagaacccagaggacccactaaaatgctgccacatccaatctgaacttctctgcttgctatcaaagagctatcatttggggtctactctacttatttaaccttattttccactgctcttgaaaatagctgtgttctcatatctctactaaagctcttttcacattatactatttacatagctcttttccctgttaaccagggatttttttttttttttttttagacacagggtctcactctgtcacccaggctggtgtgcagcggtgcagtcatagctcactgtaggctccaactcctggagtgaagcgatcttcccacctcctgagaagttaggactacaggcgtgcatca

SEQ ID NO: 725697 - DNA, 647 bp, Homo sapiens
aggatcaccattcaaaacagatcttccctcaacacccccacttctatcgtgaatgccacaattcttctaggtcaccagggtagagacactgggtcacctctgaccattatggttctatgctttatccagtcagttatccagtcctatttagtttcttgaataccttctgaatatattcctacttcctttccactccccccactttttttttttttttttgctcttactttgtgtgtagattaccccaaaaccttcatcctggccttctgttttcctcgtgtctctctccccacctaagaacccagaggacccactaaaatgctgccacatccaatctgaacttctctgcttgctatcaaagagctatcatttggggtctactctacttatttaaccttattttccactgctcttgaaaatagctgtgttctcatatctctactaaagctcttttcacattatactatttacatagctcttttccctgttaaccagggattttttttttttttttttwagacacagggtctcactctgtcacccaggctggtgtgcagcggtgcagtcatagctcactgtaggctccaactcctggagtgaagcgatcttcccacctcctgagaagttaggactacaggcgtgcatca

SEQ ID NO: 725698 - DNA, 2078 bp, Homo sapiens
tggtgatactaataattgttataaaaaacaatttatgtaattttaccttatgctattaagtggagaaactaatttgtcatcctagtaaacattttgttattaaayagtgactacctgacttttaatactttttcgtcttaaagtcaattttgccctatctaattttgttttcaacactaacacgaagaaataatagtaaaaaacttcagggtgagaaagctttccaagtgaaaataaatcactgaaaatacagtgccctgggtcatactatacaactgggtcaaatgtaggaatgggtaacaattatcccagatctatccacttacacatgacttatttattgatattatcttcagaataacagctagggagttcctgcaacatctcagatctgtctgaggagagctcagtcacagttacattgcttgctaccaaaatcattaacatgccttttgattcacatctttgagaaattgcctgtttctagacttggggcacagggcaaaaggaagtatagattgtttcttatagctagaaaggacacttgaagccctgttcacatcagacatactttaaatttatactaaacacctgtttaatatgtcaaaactagcatatatgtatatcttattgtatgttaaaatattatgagtatttcaatagtcaataaataagcacattaatattaagtgaaaatattttctgtgtcacttttataattagataaacgttgacaattaaaaaatcaaaaacttcaagatatttcacctttctcatattagtcaccaagttctgttttatactgcttgtaaacaaactgtgttgtcctcatttttcattcatacaagttggtttactctaacttgtgtgtatgtataacttgtatgtataactcttactaacttgtaacattctcattttcaccacactacatattgttgatgtaatttactttatcaacatccagaataaataaactccaaatacaccatatttattgaaaagcttttatttacaggaattgcttttcttttgtttggcaacatccttcctcttttcatgcgtatgtaatcattggatatactttaaaaatcagtttatggttcactcataattcttgcatttaccttccacatttcccagcaaaacagcaatttcaacacaaaccaagaatcttttaccatggactcttaaactcttttgtcggtttgtcgttttggatctaacccttgcactatattagattactattagcaaataatttaatttctttatttccaactgtgtattgggatgacaatataatctacatcctaatgcattctgatgactgaaatagtgataataggcttaggttactgtcaggaacataacaagaccccaatgactattgttaaaagtattatacatttatgtagcttattaaaataagatctttttttctcgtcttgaatatctgagatactgtgaactcaatgaagagtattgtgacttgttcataccatgttagggggtcaatcttcatgtaacctaaacctaatgcaatgcctagtgcccaaattatgtttactaatctttaaaataaactgaactctacctcaacctatggttttatcaaagattgagataatgtatgtatatttcttggtaaactataaagtgctatgaaaacatatgtcgatattcctaaattgtatataataaaatttacctttgtagttttcctctcctatctctttttctaaaaagtgatattttctcttctttaggaaaactagatgagtaaattctgtcaaatttaagacaaattctgaagaactttagaaagagctctctggagaaaatatgcagaagccaccatatgttctactgtttttacctttcatgattcatgtgtccagagatagttgttatagatataaacttcatatgaaactggacaatatgtttatgctcagtaaaaaaacatggctcacattagcagtttttaagacgctgaggaaatgttgcctgaactttaatctcaccaaatgctttacattcacctgtgatattatttaaaaaataatttaatatca

SEQ ID NO: 725699 - DNA, 1234 bp, Homo sapiens
aacattccggaacaagtgccttaatcaaagtccaaaagcttacctttattttatctttccatccagaaaataattcctatcctgtttcatctaacttctagtggtagtcacacctctacctccctgaatatttttctattaaaattcattatcacagtaggtcatcatacatttttataatgtagccttctgttttgtttaaattgaccttctgtggtacttacttacgtattttaaggtcatattttcagtttattttctgaggacatatttgctttttcttaaacaattttgttggatagaagacaatttcaatgtatttattctttatttctatggcttcagtttattttattaggttgggcaaaagtaatagtgatttttgccgttactttcaatggcaaaaaacccaattacatttccaccaatttaaatagatttaggaaatcagaaaaaaaatttaagattatgtttcttactgaacatataattatattctacaaaaaatgaagagtgtaattattaggggcaaaaagggtgggtgaaagcagacattctgtttcaaggattttaactcactcagattactttaaaacgctatcttgacttattaattggtcaaaaaggatagtttyataattttcttcataggatttctgggagaattaatcatttttgtagatatctagtagaatgtgctacacatagtaatcttggcacttttcattttcttatttgttttccttcatatctcctctttttccttcctcatccttctcttctttctcattatgtgattattattagtattatcattaccattatgaacagtatcatcactgattagcacctcagaagagtcagggatcttatttactggataaaaaatatttagcaactactaaaaccaaagtgtcacgcctgtcctgagttttaagagaagaaaagttacaggatgcaaaactattagtgttttaagaagaagtctgaaacatgtttcttcattacctgtctgtttagagacctggaaatggccttttaagctgaaattattaccagagtttcctatgtaaaaaggtagctgctgggtaggggtggaaagtactttcataagcagatacagtgactttgctgcagacatatctcctacaaagaatgaatgcacattctttttcagttctctgagatgttgttcctccttcttgatcattttcaagtttcagttcttattttt

SEQ ID NO: 725700 - DNA, 1234 bp, Homo sapiens
aacattccggaacaagtgccttaatcaaagtccaaaagcttacctttattttatctttccatccagaaaataattcctatcctgtttcatctaacttctagtggtagtcacacctctacctccctgaatatttttctattaaaattcattatcacagtaggtcatcatacatttttataatgtagccttctgttttgtttaaattgaccttctgtggtacttacttacgtattttaaggtcatattttcagtttattttctgaggacatatttgctttttcttaaacaattttgttggatagaagacaatttcaatgtatttattctttatttctatggcttcagtttattttattaggttgggcaaaagtaatagtgatttttgccgttactttcaatggcaaaaaacccaattacatttccaccaatttaaatagatttaggaaatcagaaaaaaaatttaagattatgtttcttactgaacatataattatattctacaaaaaatgaagagtgtaattattaggggcaaaaagggtgggtgaaagcagacattctgtttcaaggattttaactcactcagattactttaaaacgctatcttgacttattaattggtcaaaaaggatagttttataattttcttcataggatttctgggagaattaatcatttttgtagatatctagtagaatgtgctacacatagtaatcttggcacttttcattttcttatttgttttccttcatatctcctctttttccttcctcatccttctcttctttctcattatgtgattattattagtattatcattaccattatgaacagtatcatcactgattagcacctcagaagagtcagggatcttatttactggataaaaaatatttagcaactactaaaaccaaagtgtcacgcctgtcctgagttttaagagaagaaaagttacaggatgyaaaactattagtgttttaagaagaagtctgaaacatgtttcttcattacctgtctgtttagagacctggaaatggccttttaagctgaaattattaccagagtttcctatgtaaaaaggtagctgctgggtaggggtggaaagtactttcataagcagatacagtgactttgctgcagacatatctcctacaaagaatgaatgcacattctttttcagttctctgagatgttgttcctccttcttgatcattttcaagtttcagttcttattttt

SEQ ID NO: 725701 - DNA, 1224 bp, Homo sapiens
tttaaatacaaatagccaaccattattgcctataagactgtcaattttataatgcatatattcattcatctttattcattatttattctcacaaatataagattgtgtcttacttaaatgttatatttcattgctaatttctctttaaaatttgcaagtattacacaattcttaatttgctacaagtttacaaagtacggaaatgtatttgatgaatggattggcctctgtctcaactccatgtcaaaaccttctcttgagaatgtaatggtgatcacgagagagtcggagtgtacatgtgggggggaatcaaggaaagaggagatgttgctcatagggtacaaagttcaagttagaaatgaggaatgagttttagagatctattgcacatcatggtgaccatcgttaaaaattatatatattaattttatatatatatagtatttccatattgctaaaagagtaaatgttaaatgttctcgccacaaaatgtaagtgaggtagtggatatgttaattagcttgatttaatatttctacaatgtatatgtaacaaaacattatattgtacccaataaatatatacacttattgtcaattaaaaataaaaaagtagtgtaagactgcagaaaaccttctattgaaacctcagatctaaaaagcagtagattcaatggtggaacatgtaaatctatttataaatcttactgaaattttcctgtgaaacaagaattgtttcttcatttagggttaaatatttttaaatgtatgtggtgattattacaaagatgatttagttatcttttattgagtatcttatatttgcaggtcatttttctaggtattatttttcaatatatttaccacacacaccaagttttctggggtgaagaaaagccgtaattgcaagaataaaggtaatagtcaacttaggaaagggtcactctaattaaagtccccaaaacaaactgagggataaaagcagttcaaaattttagaaaattctaaagtaaatatttaatacaataaattcatgaaaggttttttaaagtgtttgtataytatttgtttttcaacataccaattgttttcttgaattatacaatgtcaactacatatttttacattgtaatttaacaaagtcattttaacagggagttaggcagaagagtatctgtatttttcattttggtgacctgacttatgtcaggatgataaatctgcc

SEQ ID NO: 725702 - DNA, 2675 bp, Homo sapiens
gagacttacgtaaattatcaagtgcaatgcctgactcattatagtagttgaatgaatgatctctcccatcatgattaattgccttattcatccattcattcattcattccctcattcattcagtaaatattccttgggtccccattgaatgccaggcattagttttggtgatgggaaagagtgatgaatgcacctgccttgagacacttataagcaactgaggaaactggcaacccgaggacttctgggtgctcycaccctacccccagcagcttccatcccactggccatcttccaatttctctcaaggattactgcttacagatatttatttttagcagattttaggctcccaagacatctcccatataggtcttgagaacatctcctgtctgccctctgctggtgagggattgtaagcgctttgcaataaacagctcaatattcattacacatcaataccaagcattgctgctgtccatcacccctgagatgaactgaagtgccttaatatttaaagaggaatgaatttgtaattagtacctaaagttacatcagagtcattcaagaggttttctatttaaatgcaaatttaatctttccaaagaaagctaaaaggtgatgaaaatagatagcaaaggttgaggaaagaggcaagaaaagggagatggcgctgatgtggagctgtcactattgttggcttgtctgtggcccatgctcaggaccaggctctgaggtggagcgagctgaggtggggcctggatccctaaagcctaagtcccaattgccctgcctgttcatgggggtagcccaaaccagcagccatttgagtgggtcctcgctgggctgctggtggtcatcttagaatcatggtggcctgaagaggatatgggctgtggggttaggcagatctgagtttgaatccagcatcctgttctgcctaactctaatagctttggtgagtttcctaatctctcccattccttccttatgtaaatagacctcttagtgcttgtttctctcaaggttgttgtagagattatgtgataaacagagtaaatgtccctggtatacaacaagggccctcaaaatgtttgtttccttttattgccactagatattgccgtgtcaacttaacattgccacggtggtgtgaagcacgttgtcaagaataaggtggcaagctgggagtggtgcgtgtctatagtcccagctactcaggagactgaggcgggaggattgattgggcccgggaggctgcagtgagccacgatggtgccactgcactccagcctgggtgacagagtgagaccttgtatcacacaaacaagaaaacaaaaaataaaaagaataaggtggcattccccttgttcccttaaaacagcctaaggtgcaggggagggcacaagcattttctgtaaagggccagatagtaaacattttatgctttgcgggccatgcgctctctgttgcaactactccattctgctgttgtagtgggaaagccgccatagacaacacgtaaatgagtgagtgtggctgtgttccaatataactttatttatagatgctgaaatgtgaatttcatatcactttcatgtatcccaaaatatttttcttttgattttttttccccaatcatttaaaaatgtaaaaattgttcttagatttcaggccatacagaaacaggcagcaggccagggttggccctcaggcatagcttgctgacccctgcactgaggtacaacctgtgatttagggaggatttttatcaaggaatctctcagaacataattcccaagactgggaccaaagcagggagatggcatccaaggaagaaaatagtcctttctgggccaggactagagaggaacaaaggacacactggatccctagtggtggttcctcgtggggggcagctgttaggtctgggtgtgaataaaattgtccctctgtttcttgcctagtgatgtgcagggatggactggcagctcctgggtgctaagcaggcagccacattctcctggcgacaggctacaggaggatgctcaagggccaaggccctgccactccctccttcactgggagagaaatgcaggcttcctggggctccttagagatcctcaggtacacacccacctgccccaggagtgccgagtgatgaggacaggcagatcctttgattcacccaaagcttggcctggttctcacctttccagactctcatggcttcttagacacacatatacacaacacactcgcagccagctcatcacgcgtccccgccctctcccgtctccagcacagagagcacaggtcagcacgccagatggcaaccttgctgctgcagcagattgccgtctccctagggagcgggggtgaaagcaaagcactggatgatgcctgggctccagtccccaccccctcctctccagtgtgcctctgtctggtcctttctctgggaacaaggggtgtgtgtatgtgtgtgtgtgtgtgtaatgtaaagtgccagaggagaaggggagaggtgaggagagagcaaaagccactccctacctctgtacaggtcctgccccagtgacctggcacctccttccatctggagagtgagcgggacctccctctctggcacccagggaggctggtgggctcttagaagtgagtagaggcatggg

SEQ ID NO: 725703 - DNA, 2675 bp, Homo sapiens
gagacttacgtaaattatcaagtgcaatgcctgactcattatagtagttgaatgaatgatctctcccatcatgattaattgccttattcatccattcattcattcattccctcattcattcagtaaatattccttgggtccccattgaatgccaggcattagttttggtgatgggaaagagtgatgaatgcacctgccttgagacacttataagcaactgaggaaactggcaacccgaggacttctgggtgctcccaccctacccccagcagcttccatcccactggccatcttccaatttctctcaaggattaytgcttacagatatttatttttagcagattttaggctcccaagacatctcccatataggtcttgagaacatctcctgtctgccctctgctggtgagggattgtaagcgctttgcaataaacagctcaatattcattacacatcaataccaagcattgctgctgtccatcacccctgagatgaactgaagtgccttaatatttaaagaggaatgaatttgtaattagtacctaaagttacatcagagtcattcaagaggttttctatttaaatgcaaatttaatctttccaaagaaagctaaaaggtgatgaaaatagatagcaaaggttgaggaaagaggcaagaaaagggagatggcgctgatgtggagctgtcactattgttggcttgtctgtggcccatgctcaggaccaggctctgaggtggagcgagctgaggtggggcctggatccctaaagcctaagtcccaattgccctgcctgttcatgggggtagcccaaaccagcagccatttgagtgggtcctcgctgggctgctggtggtcatcttagaatcatggtggcctgaagaggatatgggctgtggggttaggcagatctgagtttgaatccagcatcctgttctgcctaactctaatagctttggtgagtttcctaatctctcccattccttccttatgtaaatagacctcttagtgcttgtttctctcaaggttgttgtagagattatgtgataaacagagtaaatgtccctggtatacaacaagggccctcaaaatgtttgtttccttttattgccactagatattgccgtgtcaacttaacattgccacggtggtgtgaagcacgttgtcaagaataaggtggcaagctgggagtggtgcgtgtctatagtcccagctactcaggagactgaggcgggaggattgattgggcccgggaggctgcagtgagccacgatggtgccactgcactccagcctgggtgacagagtgagaccttgtatcacacaaacaagaaaacaaaaaataaaaagaataaggtggcattccccttgttcccttaaaacagcctaaggtgcaggggagggcacaagcattttctgtaaagggccagatagtaaacattttatgctttgcgggccatgcgctctctgttgcaactactccattctgctgttgtagtgggaaagccgccatagacaacacgtaaatgagtgagtgtggctgtgttccaatataactttatttatagatgctgaaatgtgaatttcatatcactttcatgtatcccaaaatatttttcttttgattttttttccccaatcatttaaaaatgtaaaaattgttcttagatttcaggccatacagaaacaggcagcaggccagggttggccctcaggcatagcttgctgacccctgcactgaggtacaacctgtgatttagggaggatttttatcaaggaatctctcagaacataattcccaagactgggaccaaagcagggagatggcatccaaggaagaaaatagtcctttctgggccaggactagagaggaacaaaggacacactggatccctagtggtggttcctcgtggggggcagctgttaggtctgggtgtgaataaaattgtccctctgtttcttgcctagtgatgtgcagggatggactggcagctcctgggtgctaagcaggcagccacattctcctggcgacaggctacaggaggatgctcaagggccaaggccctgccactccctccttcactgggagagaaatgcaggcttcctggggctccttagagatcctcaggtacacacccacctgccccaggagtgccgagtgatgaggacaggcagatcctttgattcacccaaagcttggcctggttctcacctttccagactctcatggcttcttagacacacatatacacaacacactcgcagccagctcatcacgcgtccccgccctctcccgtctccagcacagagagcacaggtcagcacgccagatggcaaccttgctgctgcagcagattgccgtctccctagggagcgggggtgaaagcaaagcactggatgatgcctgggctccagtccccaccccctcctctccagtgtgcctctgtctggtcctttctctgggaacaaggggtgtgtgtatgtgtgtgtgtgtgtgtaatgtaaagtgccagaggagaaggggagaggtgaggagagagcaaaagccactccctacctctgtacaggtcctgccccagtgacctggcacctccttccatctggagagtgagcgggacctccctctctggcacccagggaggctggtgggctcttagaagtgagtagaggcatggg

SEQ ID NO: 725704 - DNA, 1144 bp, Homo sapiens
gggtgccgtgatgcacgtctataatcccagcactttgagaggccgaggcaggtgggtcgcttgagcccaggagttcgagaccagcctggccaacgtggtgaaaccccgtctctactaaaaacagaaaaattagcctggcgtagtggcacacgcctgtaatctcagctactcatgaggctgaggcaggaaaatcgcttgaacctgagaggcagaagttgcagtgagccgagatcgcatcactgcactccagcctgagcgacagagtgagactccgtctcaaaaaaggaaaaaaaagaaagaattttgtcttgccatatcaaggtccctggaccccaaagagagggagccacaggagtgccagagctgaaggaatgaatcctgtgagctctaggaaggcagaacctctgtttatatttgcccctagatccacagcacagagcacagggcaagcattcttgttgagtggatgagtgggtaagtttgccgacctatcaagaggaatgggagtaggaagcatgacccacaccagtaactttttccaaggtttttctttctgccctggtatcaacaaagcagcagaaaagtggagtaataatagtagtagagctctggggaaatggataaacaatttcctacgtctccctgctccttgttagctgaggtaaccatgcccsctcttccctgtttctatttctgctttgtatctaatcagtctgtccaaggagcagtgcagcacctgaggcatttcttctctgtccagttactcccagagatggctgaaagaaagacccctcagacaggggaatgcaggtaacaatgtgtctggctgcaagcttataaaactcacaggatgggtacacgtggacatagagatggaaacaggctggtcatgatggctcacgcctgtaattctagcactttggaaaaccaaggtggaaagattgcttgaggtaaggagtgtggcaacagcctaggcaataaagtgagaccctgtctctacaaaaataaataattagccaggtgtggtggcacacacctatagtcccagctactctggaagctgagacgggaggattgcttgagcctagaagttccaggttgcagtgagctatggtcacaccactcccctccagcatgggcaaca

SEQ ID NO: 725705 - DNA, 1144 bp, Homo sapiens
gggtgccgtgatgcacgtctataatcccagcactttgagaggccgaggcaggtgggtcgcttgagcccaggagttcgagaccagcctggccaacgtggtgaaaccccgtctctactaaaaacagaaaaattagcctggcgtagtggcacacgcctgtaatctcagctactcatgaggctgaggcaggaaaatcgcttgaacctgagaggcagaagttgcagtgagccgagatcgcatcactgcactccagcctgagcgacagagtgagactccgtctcaaaaaaggaaaaaaaagaaagaattttgtcttgccatatcaaggtccctggaccccaaagagagggagccacaggagtgccagagctgaaggaatgaatcctgtgagctctaggaaggcagaacctctgtttatatttgcccctagatccacagcacagagcacagggcaagcattcttgttgagtggatgagtgggtaagtttgccgacctatcaagaggaatgggagtaggaagcatgacccacaccagtaactttttccaaggtttttctttctgccctggtatcaacaaagcagcagaaaagtggagtaataatagtagtagagctctggggaaatggataaacaatttcctacgtctccctgctccttgttagctgaggtaaccatgccccctcttccctgtttctatttctgctttgtatctaatcagtctgtccaaggagcagtgcagcacctgaggcatttcttctctgtccagttactcccagagmtggctgaaagaaagacccctcagacaggggaatgcaggtaacaatgtgtctggctgcaagcttataaaactcacaggatgggtacacgtggacatagagatggaaacaggctggtcatgatggctcacgcctgtaattctagcactttggaaaaccaaggtggaaagattgcttgaggtaaggagtgtggcaacagcctaggcaataaagtgagaccctgtctctacaaaaataaataattagccaggtgtggtggcacacacctatagtcccagctactctggaagctgagacgggaggattgcttgagcctagaagttccaggttgcagtgagctatggtcacaccactcccctccagcatgggcaaca

SEQ ID NO: 725706 - DNA, 3065 bp, Homo sapiens
  misc_feature 2056, 2057, 2058, 2059, 2060, 2061, 2062, 2063, 2064, 2065,2066, 2067, 2068, 2069, 2070, 2071, 2072, 2073, 2074, 2075,2076, 2077, 2078, 2079, 2080, 2081, 2082, 2083, 2084, 2085,2086, 2087, 2088, 2089, 2090, 2091, 2092, 2093, 2094: n = A,T,C or G
  misc_feature 2095, 2096, 2097, 2098, 2099, 2100, 2101, 2102, 2103, 2104,2105, 2106, 2107, 2108, 2109, 2110, 2111, 2112, 2113, 2114,2115, 2116, 2117, 2118, 2119, 2120, 2121, 2122, 2123, 2124,2125, 2126, 2127, 2128, 2129, 2130, 2131, 2132, 2133: n = A,T,C or G
  misc_feature 2134, 2135, 2136, 2137, 2138, 2139, 2140, 2141, 2142, 2143,2144, 2145, 2146, 2147, 2148, 2149, 2150, 2151, 2152, 2153,2154, 2155: n = A,T,C or G
tttggtgcaatatgcatgaaaataaacagatattaaaaggaacaggtcatctctttcattggcaaatttcactgtaatattgaattctatttgtgggggcacaaagaaaataatggtttaatttacaattgagagagagagggagggagggggagacagagagagagagagaaagaccattactgccacctctcgctcacttcttcagaactggagaaaatgttgaagaaagttggcatttgcttgccaaagtttcacacagacagtctgacttttgtttttacttccatgacctttaatggcyttcagtgcagtcagaccaactctgcatatatattgacactatgaaaaccacacagataagcagttttgggttttcatgctttatttactttggagcttaacaatcatacacatatttccctgttagaggtcccaaaagctttgttctgatcttgagttgcttttgtctgttattcagcgtttggattgctttataattactctatgaatgtatgtattttaaacattttttttttctaggaatagttctattttgttattgggtgcactgtatttatgtttccattaacagaagtatgaagagtccagttcaagctgagaaactcacactccactgccatacatctggggagatgcaaacagacaaggaaggaaggaatttctgcaatcactagagggacaggttttgcagcagatcaccctcacatctacagatgctctctatttcttttcacccagaggtttcaaattgcccgttgacatctctgattttgccaagagatcacgtgcttcagttagttcccattcccttgtatcatttaggacagagtaaattcttccagaacactaaagaaatgaaagttttgaaaaattcgatttttttttaatgtttttaattgtaggaaaaggtacataaaatttaccattttaaccatttttatgtgtacaattcaacagcgttacatacattcatgtcgttgtgcaaatatcaccagtattcatctccaaaacctttgttatcatcccaaatagaaactttgtattcagtaaaaaatagctccttgttatcccttccccacacctcctggaagccactattctactttctgtttctatgaatttgactattccaggtacctcagataagaggaatcacatttgtcctttgtgtctggcttatttcacttagcataatgtcctcaaggttcatccatgttgtagtaggtatcagaattttaattttttgaaagccaaaaatattgcattgtatgtatgtatataccacattttgctgattcatttatccattgattgttctttgggtcatttccatttttggctattgtgaatgatactcttataaacattggtgtacaaatatctgttcagtctttacttttaatttttttgtgtatagacatacaagtggaatcgctgaatagtatgagaattccatgttaaattttttgatgaatcgccattttgcattccacaatggcagcaccattttacatttccaatggcagtgcacaagagttcctatgtctccacatccttgtcaacacttgttattttctttgttttttagtagccttcctaatagatgtgaaatgctatttcattgctatattttaattattaataaatcaaatttctggcctaaatttccagatgttcttaaaaaagatttggaagttactacagacagttttatagtaaataaagaatattttataagattcttaatgtggtgccatcttatttgaggaagtgaatagttaaacaactattagctaaatagctaaagagccatgcaggatacacaaataagggaaatagtcttaaagacatactttattgaaatgcacacaacacacaatcctaattggattaggtatttagaaaacgaagacaatagaatcttttccatgtttctacatgggcacttgatagccaggtaccaagctatggaaaacaggggttggggggtagctcagggtaaagggaattatactgcacatccaggtggccnnnnnnnnnnnnnnnnnnnnnnnnnnnnnnnnnnnnnnnnnnnnnnnnnnnnnnnnnnnnnnnnnnnnnnnnnnnnnnnnnnnnnnnnnnnnnnnnnnnnccttggaaatcgatttttagcatctattaagaaaaggcctgttaataaaataatatggttgaatagtgcagttacattgaatgagctaactgttaaaagtataaactaatataattgtccatgcatgaagttatttgagacttaatggagtgattagaaatgaggttggagaaagagaggtggtcatcagtgcttttttctcatattcttctgaaagtcacaagcagtacttccgataaacaaatcccaatagacaatatccatgcaatgggaattgccacatgacatcagtatttaaagctgtctaaaattaggccagccgcagtggctcacgcctgtaatcccagcacttagggaggcccaaacaggcaaatcacctgaggccaggagttcgagaccagcctgggcaacatggtgaaaccctgtctctactaaaaacacaaaaagtagccagatgtgatggtacatgcctgtaatcgcagctacttgggaggctgaagcatgagaatcgcttgaacccagtaggcagaggctgcagtgagcagagatagagccactgcactccagcctgggcaacagagcaagactctgtctcaaaaaacaaacaaaaaaaagcaaaaaaaaaaaaataataaaaaaataatgaactagaacgaagcatatttggagaaataagactctctaaagaccaagttgtgaaattgcaaagagattaatgtatacttttcctacctatttcagtctctggattatctaagtgcctacacacacacacacacacacatacatacacacacacacacacgccatttttatgtgtgtacaaatatacaggggatatacaaattaatttgggtggaagtagggtaaaggcaaaaggagcctgaccaaaaaccccatataaaccaga

SEQ ID NO: 725707 - DNA, 616 bp, Homo sapiens
cgaggtcaggagatggagactatcctggctaacacgatgaaaccccatctctactaaaaatacaaaaaattagcagggcttggtggyggacgcctgtagtcccagctgcttgggaggctgaggcaggagaatggcgtgaacccgggaggcaaagcttgcagtgagccgagatcgcaccactgcactccagcctgggcaacacagtgagactctgtctcaaaaaaaaaaaaaaaaatgcgtttaggcccaaccaaacactactaagctaaatacagccctcaaaatgcaaatttgcctctgctcaagttttgctcctgccatttaagagttaagaacattgagacctatagagatatagtagcttgacctggtcaggttctgtttataaagtcagtatttagaggctggataagaaaagggcaaaataatgttgctgttgttgttgttgttgatgatgatgatgatgatgatgatgatgatgatgatgatttaaatggattttagctttttatctattttaagaattgcttttgcaatggaaagcagaactaaaaatcagaaggtctggtctgaatttccactccatcaccaattagctctatgaccttgagcaatt

SEQ ID NO: 725708 - DNA, 616 bp, Homo sapiens
cgaggtcaggagatggagactatcctggctaacacgatgaaaccccatctctactaaaaatacaaaaaattagcagggcttggtggcggacgcctgtagtcccagctgcttgggaggctgaggcaggagaatggcgtgaacccgggaggcaaagcttgcagtgagccgagatcgcaccactgcactccagcctgggcaacacagtgagactctgtctcaaaaaaaaaaaaaaaaatgcgtttaggcccaaccaaacactactaagctaaatacagccctcaaaatgcaaatttgcctctgctcaagttttgctcctgccatttaagagttaagaacattgagacctatmgagatatagtagcttgacctggtcaggttctgtttataaagtcagtatttagaggctggataagaaaagggcaaaataatgttgctgttgttgttgttgttgatgatgatgatgatgatgatgatgatgatgatgatgatttaaatggattttagctttttatctattttaagaattgcttttgcaatggaaagcagaactaaaaatcagaaggtctggtctgaatttccactccatcaccaattagctctatgaccttgagcaatt

SEQ ID NO: 725709 - DNA, 634 bp, Homo sapiens
ccaacctattcatctttcatccttccctctttccagaaaacctaaaggtggagccctgtctgctccatctgctgccctggttactctcatccagggcattcattctctttttataagtactgtgaggccttttcacaatttgttactactgcatagttatgtacttatttcttgccagtctccctcacaaggctgcaaacttcaggagagtgcagaccgcagcctgttcagtcctcatggtatatgaagcctgttgcattacaggtcctgagcctccatttgttgaataatttcattaattaattaaccaattaattaatttcctctaaagggtttgaaaccccaactattaaggcttatgttgaaaggacaatttaaaggaaaataaactgttagaagagggagagatagaagccccagaaacttggaatgagtcagatcttacagctgagcaggaacscaagctttgaggaaagctttatttatttaaataggagtctcataaggaaggcagaaaaaggaaacccaagcagatgacttggttcctattatctgctgagaggaagctcatctggagtgatgactttttcctggcactaaatttgacctgaaaattataaaatgaatccataca

SEQ ID NO: 725710 - DNA, 1344 bp, Homo sapiens
gtgagatcgttgaggacttccttttcattattggatcccacgcctagcaagctgcctggcatgtaatatatatatactaagagtttattaatgaatacatatgttaaatggactgtgatagagtcaaggcagttgtggttccagggaatagacaggccctgcaatctgtaaggcacgtgctgaagatgagatcatcctactaaaaagtaaaaaaaaaaaaaaaaaaaaaagcctaaatgatgccatgaataacctttctcaaacaactttttttttaacatataaaatgagctaacaaaaggaagaggagttggggagagaatccacacatagtaatgaatcttttcctctcacagtgagatacatgaaagggaaatctgtaatatgycttgattcaagtttaagcttcaaaaatgttctaatattttcacatccttctctatgtcctaacattgatgaaaaagtgtttttacaaaaaggtgatgtaaaaatcatgtttgaaacaggtactgtaaaccaagcatttgagaaaatggctttaaaaatctattcagatatatcttctaaagtacagatcaaaatagtgcatatcaattcaatggtatttcctaaacccacagaaaaagtagactaggaaaccaccaagtttctttaattagccagaaaaaaaatctagatctgccctgtctgatgaaactgccaattgccttgaacacttggtgactgagcaccagaaaggtggctaatccagattgaggtgtgctgtaagtgcaaaattcagactagatttcgaagacttagtacaaaaacgataacttattaataaaaataaaaaataacttattaataagtgtgtatattgattacatgttagaatattttgcatatatagagttagtaaaataaattatcaaaattaatttcacctatttcttttttaaaatgtggctactagaaaatttaaaatatggttcacattgtatttctattgagtatcgtgtgtccagattctcttctcatgtcccctggcccatcatagcagcagataattgctccacaataataattgctcaataggtcccaggtttaaaaagagccagagtggaggagacagctgcataggtatcatggatatagatttttgaggcctcttttggcaggcacatctgattgatattctagttgaaatataaatatgagcagaacttttagataaatttcatcttgtttctttattccagtgacttggtctttaaaagataaaatgccatatgatggagactccaccaggcaactgggcatacatttgtggatggattaaataaatacatgtgaaactctagt

SEQ ID NO: 725711 - DNA, 951 bp, Homo sapiens
tcatttattcaatacttattgaacaaccacagattttacaaacatatargactggctgggggcagtggctcacgcctgtaatcccagcactttgggaggctgaggtgggctgatcacctgaggtcgggagttcaagaccagcctggccaacatggagaaaccctgtctctactaaaaacacaaaaattagccaggtgtagtggctcacatttgtaatcccaactacttgggaggttgaagcaggagaatcgattgaacctgggaagtggaggttgcagtgagctgagatcgtgccactgcactccagcttaggcgacagagcaagactccatctcaaaacaaacaaacaaaataggacttaatgaagtaaggtcaacagtagaccatatagagtttaaagataaatatatcatctcatctagcctccacctctgcctttgaatatgtgtatggaaataatacattgaatggttaatccatgcaaataaaaataatcctttattaagttttcttaagattgtacaaaataacgtgtgcttggccaggcatggtggctcacacctgtaatctcaacactctgtgaggccgaggtgggatcactcgaggtcaggagttttaagaccagcctggccaacatggtgaagctctgtctctactaaaaacacaaaaattacctgggcacggtagcacatgcctgtggtcccagctacctgggaggctgaggtgggagaatcatttgaaactgggaggcagaggttgcagtgagccaagattgcaccactgcactccagcctgggcaacagagtgagaccctgtctcaaaaaacaaacaaaaaacaaaataacatgtgcctaccccaacacttaaagctatgctaaacagtttaaaggaaataataattttctctctgcccatgtcacctcagtaaccaatgttaaccattcccatagt

SEQ ID NO: 725712 - DNA, 640 bp, Homo sapiens
ctgaattcccatatggcaacatgggtcttttatttatttttgcacactgccttggtaaatgttcatagaacaaaaagcctgattcccacttaatatatgtttatatattcatatatgttcatttagtgaagaattaagaacatgttacaactggaattatacaattgaaggaaattagagaaattttagtccaaacacctcattttatgcataaggaaattgagccaaagagaagtgacttgcctaagttcatagagtgagttaatcccagggttggatttagaactcagatcttctgactcttaatctggggctcttttgctgttctagctattatattggaaaatatttaaataatatccaacatttattgactacatattacattccagatgttattaatactctttacatttattaatcattttactctcacaacagccccacgaagtgggtactattattatactattttacaaatgcagaaactaaagcatgcagtgttaaataacttatgcaaggtcaaatggtagaatcggatcttgaaagtrggaattttaacagaaggtactccagatagatggagatttctttggttcttcttattttttccagcctacatcttttgaatacttgagaa

SEQ ID NO: 725713 - DNA, 985 bp, Homo sapiens
caatgcccagcatgctccgcaaatgattttatatattaggttccaggcttaaagggtctgagttgatgtttgggttccctggctaggctaataatttagggacgtttcagatagttactctttaagtctttgttaaatattgtatatcagaggtgatgagaaatcatttttattaataaaattagaattcctcttccttgaagcttataataaaggatttattgtatgcactgaatacagtgtaagtattattatttattttttttatttttgtttttattttttttgagacggagtcttgctctgtcgcccaggctggagtgcagtggcgccatctcggctcactgcaagctccgcctcccggattcacaccattctcctgcctcaacctcccgagtagctgggactacagtcgcccaccatcacgccgggctaattttttgtatttttagtagagacgggttttcaccatgttagccaggatgatctcgatctcctgacctcgtgatccacccgcctcagtctcccaaagtgctgggattataggcgtgagccaccacgcctggcccagtgtaactattattattagaaaattattggaacctgtttttcgctttatagatttccatcactcattattcaattatgtgtattattcatactcactaaggacagatgtagcattgatatagttacaaagtcttgtttccactttcagttttctttctgggcatcatagagggaagacttgcccatgtttcagttgtgctgattttttcaaatttttgtgtgtgtaattttccaaatgagacaactttttgggaggcaaaagtaaaaaggtagaaaattttaataatttaataataatttaataataatattattwaaaaaatttaataataaaatgaataatgggatttattgtatgcactgaatacagtgtaactattattattttaaaatttatttattttaaaatttatta

SEQ ID NO: 725714 - DNA, 1053 bp, Homo sapiens
ctgcagtgggttcaaagtataacttggtaggtttatgttataatttaactatttccctatttagaaacatgtattttcaatagattgcatcttttgaggagatcaaaacaaagaataaccttcatactttactctatgtaagtggtaatggatttgttcatgagaaatgattgtagaccctactctttgcacttataaactatcttggcatttaagagttggtggtttctggctaagcttcctaggctctctgtgcctcagtattttcgatcataaaatgaaaataataatgataatatctaactcagagtatttataagaaatgaatcaatgactatatgtaagatgcatagaaataagtgctgcataatgaagccaggtattgtggtacatctggggcataattagaatttgtttattgcctcccaagccttcgttttccctttccaactcagctgtattatctcagtgggattgtcttactccaaatataaaggtgaaacttgattggctttaaaaaactgaagtgggagttcttagctgcagtgagtggtgatcgaacccctgcactccagcctaagtgacacagcaagatcctgtcattacaaaaacccctcaatcccatgaccccagcattttgtcattgtgtcagtttttttctttttttggtccagttgaggtcaatgagatgtaatatgtgattcttagtggcttcagagaatgatgcttaccacctctctgtgtctctagctagatgtaaactaaaaagcctacggaacaatttgtgaacagcagctttctgggaacactaaaggataatgatacccttactatacatgtcaggagagagagatrgaaagtaaaaccttcatttgttaatattggtaagatacattaatcttttcagtgacatgaataaaaatatatttttcaagacaatggtaatgattttctgttaattgcaaataaagaattgaaacttgtatacattgtgagccaaagcaaatgcagaccttgttcttatgtttcagaatctactgaatggtacgtaaa

SEQ ID NO: 725715 - DNA, 655 bp, Homo sapiens
gcgcttcaagacataaagataccctcatggtcaaggacttcctctccctttcttttagaaaggggtcctgaactatctaagtgtgtcaacgcacaccaggttaaagcctgcttctgaggaagcttctcggagaagagaggcaaagaaagagcttgtatttcattaagaaaatgattcttccttttgttcctatagtaaatttatttcatcagcttgcagcatcatttctctgtacttattcccagtgagtttttgaacttcactctgaaggtaattctgctccacgtcacatcccagaatgcaaaatggtgcagccactayggaaaaacagtacagcagtttctcaaaattacaaaaatagtcttatcctaggatacagcgatctcacttctgagtatacaacgaaaataactgaaagcagagttttgtaaatccacgttcacagaagaattattcacaatagccaaaagctagaagcaacccaggtgtccactgctgaatgaatggataaacagtatgaggaggacgattccacacactggaggatgatgcaaccttcaaaagaaaggagattcaggaacatgctacatcatgaatgaaacttacagacactgttctaagtgaaataagccagtcatcaaaggacaaatattgg

SEQ ID NO: 725716 - DNA, 655 bp, Homo sapiens
gcgcttcaagacataaagataccctcatggtcaaggacttcctctccctttcttttagaaaggggtcctgaactatctaagtgtgtcaacgcacaccaggttaaagcctgcttctgaggaagcttctcggagaagagaggcaaagaaagagcttgtatttcattaagaaaatgattcttccttttgttcctatagtaaatttatttcatcagcttgcagcatcatttctctgtacttattcccagtgagtttttgaacttcactctgaaggtaattctgctccacgtcacatcccagaatgcaaaatggtgcagccactatggaaaaacagtacagcagtttctcaaaattacaaaaatagtcttatcctaggatacagcgatctcacttctgagtatacaacgaaaataactgaaagcagagttttgtaaatccacgttcacagaagaattattcacaatagccaaaagctagaagcaacccaggtgtccactgctgaatgaatggataaacagtatgaggaggacgattmcacacactggaggatgatgcaaccttcaaaagaaaggagattcaggaacatgctacatcatgaatgaaacttacagacactgttctaagtgaaataagccagtcatcaaaggacaaatattgg

SEQ ID NO: 725717 - DNA, 1554 bp, Homo sapiens
caaattaggcatctctcctctgagctgccatgagggagatatgtatagttcctacacatatctgcatattacagtcctgaatacatattcatcattgctttaccaaatgttattaccattgcctgattatgtgtctgttttcyctacctggctgaactcccttaggttaaaagataggtgattttataatcatcagagaaatggcaaatcaaaaccacaatgaggagcagcatctcacattagtcagaatggctattactaaaaagtcaaaaaaaaaaaaagatgctaataaggctgcaaagaatagggaacatttatacagtttgtaggaataaaaattagttcagctactatggcaagcagtttgaaaatttctcaaagaacttagaactaccatccaaccctgcaatcccattaccggatatatatccaaaagaaaacaaatcgctctctacatgtgctctcatgttcattgcaccactattcacaatagcaaagacatggaatcaacctaggtgcccaccatgggctcaatggactcaacaaagaaaatgtggtacatatacaccatggaatactatgtagccataaaactgaatgaaatcatgttctttggaggttattatcctaagtgaattaccacaggaacagaaaaccaaatactacacgttcttttcttataagtgcgcactaaacaatggctactcatggacataaagatgggaacaaaagactctggggactacccgagggaggagggaggaaaggggaggcaagggttgaaaaactaactattgagtactatgctcagtacctgggtaacaggatgattcataccccaaacgtcagcatcacacaatatacccatataataaacttgcatatgtaccctacgactctaaaataaaagttgaaaaaaaaaaacaagaagtaattttcattgttgtatgcacgttgtctagtatagtgtagaatagagaaagcactcaaatacttgttaaattaataaataaatgaatggcaatatatcatagtggttaagagcagttagctttgggtacacagatatgtgggtgcccatctcagctctctgtcctactatgtagctttaggaaaatcatctgagtctcaatttcttcttcaaaaataagaatgacagtgcctacactacaggaccgttggcaagactataggtgatgatgcatgcaaggtatatgaagtgcttgcacattcagaagtaatgggggtgaggtggaagtgtgtatatgtgtgtacacatgtgtatgtgtaatttcatgctctaacgacgaatcaaaggctaaaaatgttatttggggcattgacactttttcttgttatatcacagaatcaattgtcatttcctgggagatatttaagaaagaacctatattgtcttgtgtcctgaccaggaatcaatgtgaaagagcaagaaaaatctgggctttgaaaccagagcaaatagatttcaatcttgaatccactagtttctagctaagaatctagaaaatcactaaacttttctgaacctcagtt

SEQ ID NO: 725718 - DNA, 1554 bp, Homo sapiens
caaattaggcatctctcctctgagctgccatgagggagatatgtatagttcctacacatatctgcatattacagtcctgaatacatattcatcattgctttaccaaatgttattaccattgcctgattatgtgtctgttttccctacctggctgaactcccttaggttaaaagataggtgattttataatcatcagagaaatggcaaatcaaaaccacaatgaggagcagcatctcacattagtcagaatggctattactaaaaagtcaaaaaaaaaaaaagatgctaataaggctgcaaagaatagggaacatttatacagtttgtaggaataaaaattagttcagctactatggcaagcagtttgaaaatttctcaaagaacttagaactaccatccaaccctgcaatcccattaccggatatatatccaaaagaaaacaaatcgctctctacatgtgctctcatgttcattgcaccactattcacaatagcaaagacatggaatcaacctaggtgcccaccatgggctcaatggactcaacaaagaaaatgtggtacatatacaccatggaatactatgtagccataaaactgaatgaaatcatgttctttggaggttattatcctaagtgaattaccacaggaacagaaaaccaaatactacacgttcttttcttataagtgcgcactaaacaatggctactcatggacataaagatgggaacaaaagactctggggactacccgagggaggagggaggaaaggggaggcaagggttgaaaaactaactattgagtactatgctcagtacctgggtaacaggatgattcataccccaaacgtcagcatcacacaatatacccatataataaacttgcatatgtaccctacgactctaaaataaaagttgaaaaaaaaaaacaagaagtaattttcattgttgtatgcacgttgtctagtatartgtagaatagagaaagcactcaaatacttgttaaattaataaataaatgaatggcaatatatcatagtggttaagagcagttagctttgggtacacagatatgtgggtgcccatctcagctctctgtcctactatgtagctttaggaaaatcatctgagtctcaatttcttcttcaaaaataagaatgacagtgcctacactacaggaccgttggcaagactataggtgatgatgcatgcaaggtatatgaagtgcttgcacattcagaagtaatgggggtgaggtggaagtgtgtatatgtgtgtacacatgtgtatgtgtaatttcatgctctaacgacgaatcaaaggctaaaaatgttatttggggcattgacactttttcttgttatatcacagaatcaattgtcatttcctgggagatatttaagaaagaacctatattgtcttgtgtcctgaccaggaatcaatgtgaaagagcaagaaaaatctgggctttgaaaccagagcaaatagatttcaatcttgaatccactagtttctagctaagaatctagaaaatcactaaacttttctgaacctcagtt

SEQ ID NO: 725719 - DNA, 1061 bp, Homo sapiens
cttgctatttaagataagccccaatttctcagtcctctgaagaagctgtttgggtactgactccacagggaggacaagtgctggtttctcacctggactgacttttcttgactgctggatattagctcgccagcctgaaggaactgatagccccttgcctaagtgtttcttcacttcagagctgttgccacgcactgcccagtgtgatcatctaatgattgcctgcaaagccagcctggtcacacctgcatgcatgatgctttccattgaagtgcatcttttttttttttgagacagagtctccctctgtcacccaggctggagtgcagtggcacaagctaggctcactgcaacctctgcctcctggattcacacaattctcctgcctcagcctccccagtagctgggattacaattgcgtgccaccacacccgactaatttttgtatttttagtagagacggtgtttcactgtgttggccaggctaatcttgaactcctgacctcaaatgatccacctgcctaggtctcccaaagtgctgggattacaggcttgagccaccgcgcctgacctaaagtgcattttagaagcagtagaaggaactggtgtgtatgaaagatacagaagatacattttgagaatgagaagaatgttgatatggtttggctgtgtccccatccaaatttcatcttgcattatagctttcataatccccatgtgccatgggagggacctggtgggaggtaactgaatcatgggggtgggtctcttccatactgttctcgtgatagtgaataagtctcatgagatctgatggttttaaaaagaggagttcccctgccccctgtacacattctcttgcctgccaccatgtaagatgtgcctttctcctctttcgcgttttgccatgaytgaggcttccccaaccatgtggaactgtgagtccattaaacccatctttctttataaattactcagttcttgggtatgtctttattagcagcatgagaacagactaatacaaacatataatgttctttcagtccccaaaattcatctca

SEQ ID NO: 725720 - DNA, 601 bp, Homo sapiens
ttcctaacctcttgatagcagagatactggggaaaaggagggaagagttttcttcgtcagaggcttagaatcctctcaaaatattgaactggacatcgtctgtggactgttgtgtttccttcccttttaacttattttcatattaagaacgaagggcgaggataatggggcttttgtcagtatagcaaattttttttaaaaaacattgaataaaatgtgccgttaaattccttggaaatactatgagaaccaataatatttgcaaggatttgtttctcaaatattggsaccagctttcaaagcaggtacatattttgagttgtaaaataggttagtttaattcccgtgaaggcttaaaagaatatctctaaatgcttattctgattaattgatatgattatcagtactaacttgaaagattaaaaagaaccttgaaatcaatcttgaagtttaaaagaaagatcttatctaagacagcttttttccttgaagcacccagatattgttatgctttttaacaaaacaaatgatgtgactacagtaaaaagcaatggataaaaaagaaaacgaaggaaaagaaaaacacaaatgagaatcctaa

SEQ ID NO: 725721 - DNA, 596 bp, Homo sapiens
tgttgaaatatcttaattacttaaatgcgcatatgtaaaaagccttttttccggcaatggaataagtctggaagagatcttgggagagtttaataggctagaggttgctgccgtttgaccatacacgctggcactttcagaggattcacccactgagcaccttctgtgctacgtgaaaaggcgcgctgggggacacctcattgcttcctttttttgggtgaagccttggagactggccrggacagtggcgggccgggtggattggatggaaacccgggccctgccgcaagactggggcgataatgggaaagtaaacaacgccgtggctttgttcctttcattcaggctttcttcaggtgggtggtgaatgtacaaggtacttctgaatttgttatggggaagtttccattctgcgcttgcaggcaggcacttctgccaaggtgagaagctggcgtcttgcgccccccagcggcttcctggcagaggagagctgcaaaagcccggcccttcctggattctaagaatgaagagcttgctctcctagcatttctgaactccagaggtgtctcctaaggacggggggagaggggaggggg

SEQ ID NO: 725722 - DNA, 596 bp, Homo sapiens
tgttgaaatatcttaattacttaaatgcgcatatgtaaaaagccttttttccggcaatggaataagtctggaagagatcttgggagagtttaataggctagaggttgctgccgtttgaccatacacgctggcactttcagaggattcacccactgagcaccttctgtgctacgtgaaaaggcgcgctgggggacacctcattgcttcctttttttgggtgaagccttggagactggccaggacagtggcgggccgggtggattggatggaaacccgggccctgccgcaagactggggcgataatgggaaagtaaacaacgccgtggctttgttcctttcattcaggctttcttcaggtgggtggtgaatgtacaaggtacttctgaatttgttatggggaagtttccattctgcgcttgcaggcaggcacttctgccaaggtgagaagctggcgtcttgcgccccccagcggcttcctggcagaggagagctgcaaaagcccggcccttcctggattctaasaatgaagagcttgctctcctagcatttctgaactccagaggtgtctcctaaggacggggggagaggggaggggg

SEQ ID NO: 725723 - DNA, 810 bp, Homo sapiens
gacttgagctgagccattggccagaacatgtagcctgggcttcctcagaacatggcgactggatcttaggcaagatcctgagagagccaggatgtctcctttacgacctggcctcagagagcaggtggcatcactctcactgcattctcagatgcaagtcatgcgtttaaggggagaggaacttggctccctctttcattggaaaccatgtcaagaaattctggatgtgttttaaagtgaccattaagtcctttagggtctcccaaggttgctgtaacaaagtatctcaaactgggaatgaagggcaatgacccaggaggggccctgtatctgggcacctgcacaggcccacctggactgctggcctcagaactgtggtgagagaaacaaaccctgttgtcttcaggtcactgtgatgttagctcagcttgttccagcagaaagtcctttcctytcactgatggaggcactgatgcaccagtttttgtcatttctttgctacatattcagaagggtccttctacctttaagaatttaagattgactgggtgcagtggctcacgcctgtaatcccaacactttgggaagtcaggagatcgagaccatcctggccaacatggtgaaaacccgtctctactaaaatacaaaaaaattagcagggtgtggtggcatgtgcctgtagtcccaggtacttgggaggctgaggcaggggaatcgcttgaacgcgggaggcggcggtagcagtgagccgagatcgcgccactgcactccagcctggtgacagagcaacactctgtgtcaaaaaaaaaa

SEQ ID NO: 725724 - DNA, 1360 bp, Homo sapiens
ccaagggtcctgtgaaccgcatttgtaaggaaaggtgccgtccagggtgtttggttctgacttgccggctggccttctttcctgcctccagcatgttgcctgggattccatcccagtcatgccagagttaacctccgagtacagttatgacgattttcactcagtcacaggcgcagaccggcgtcagatggcaagaggaggagtgcaggaatcaaaggtcacagtctcaggagcaaagccccacagacgtctggcttctggatctgtgaccatatggtcaaagattgctctgcacaataacctccagagcagtcaggttgaggatgtctggtactgaagttactccatttgagaagttttatatatttttgttaaataaaattgaattgtaaatgtttaattgcagtaaagcatagtgaagaaaattaaaaatcacttataatctcatcactccaagatacaatcaccattcctactttgtgactttatacagtgatagtcgtgtacgctgaaagtttttgcaaaattagaattgcacaatttcgtattttgctttttttcacattatatcatgccgggaactactcttcagaactcctttttatggttgcataatgtttcatttctggttacaccatgatttaacactagccccctataatgttttctaatttttcactattttaagaaacattgcaataaatatttgattatcatatacatttttgaatggcgtttttggagagcttaattaacgggtatttaatgggctaaccagcatgaattctttctactttacactttaaatcatctgctaactcttcrctcaaggtcaaagttagcaagcagctaagtccagctttgagtcctgctccacaaagtttaaactccaatgtcatagtgccttttggaggttgttagtacattttagcttttggaacataaaagaaggaaggctttactgtggaagttctgtggttctattattctattatatgctacatgtaaacatttccagaaatctgttagaaaagaaagtttactgccaacccaaatgcctgcagggaccaggcaaatgccagacagggcttacacgtgccagtggacctaatgtgacatttggaacatacttacagtgacagagaggatgtgtgccaccaactctcccctacacaaatgaacaagtcagatctgaatttgtaagtctttcgggacactgtccaccacactaaacccatctgtgggccaaatgggcacccagagcaatcttataagaccatcataaggttcatgacgcgtaaaaggcacaatttttatttgactagccttggaaactaaggttcagaagactcgtgcatgt

SEQ ID NO: 725725 - DNA, 2027 bp, Homo sapiens
attgaaactttttcatggtgtgttgaaaagaactgaaaatgaatacagcaaacacccgtctgaaggacagagatgaccagtgccgagcagcctcctgcagcccccgccagctcagcctccactcgccctgacaggctaccgcacagaggtgagtgtttcttagactcttgtgttgctgtcatcattgtaatcacacatgtatgcaccttggggcatttccctatctcgttttacagactttatgaacatggttaatatgcctagctcaaggatttcttgggagcccgagggttacaaattagcacacaatctcctagaaagacagcacagccttggaaataggtgttttctctatttcagaattcattttccacactctcttataggagtttcttttttcttcccattctgtgtttaagcctcttctgacctatagtaaatctcactgttttgacattgtcttctctgactgtgtatggcttcttctaattattgctcatcaaatctatttcttagcattatgtcaaaatcagatggttattttttccatctgttgccacaatctgttcaaaccatcacactaggtgaacctgcaggaaatcgtatcagccaaaagagagacgaatgtgcttcagccagacttaatatggacagggttttggtgtggaatacgatatttgaaatcttcttatataatgtcaagttcagaaaaatggctattttctctggtgccagcagtgggtaacacaaaagcaatggtaaggcacaagtgggaaaccctcacaatattcttgctccataatataacaatatttaataaagaagctccccaggcccagcccattcctcttcaactcagagggaaaattgaagtccctatatttcatttcaaaggctctaagtgaatcggaaggaaaaagtcctcttcttgaaagcatttcacgtggacagagtggactcattccatgctacgctgctcctgctaagcagaaagctgtggttccttcttcattaagtaaagtggtttgcaaagctccagcatcgtagccatgtgctaatggtattaggaccgagggaccattggcagctcaaggttggagagtgaagtggagccaggaaaaagtgggccttgacaaagcctactggtattttttttattagggatgcaatggtgtctctattcactgcagcagatacagaatgcagcaaaagattgtgctggaaaaacccagttaagagagaaagacagaatccctcagtcgaaatgtattttccaggagagataaagggtgagcctccgttgtggggttgcatactggccccactccaggatgcccacatattggggtcaggttttcatgctgcccgcccccacaacctgacttcagccctgaggcagagaggatccccatgatgctaccacatgtggtactggtcccctttgtcagtgtcaacttgaagtaatttattgctttgcctttcagagcagaaaatagattcattggtggtttgtaaaaagcatgcttttttgtgaacgtattcatatgttttacacttttattttccttgtgcaattatcgactctcactttcattaaattgtgtgaaacagcagctagcccacgttacaatcatgtctcttggttctccctgcccctccccctcggatatccaaaggcatctgctsttcctaaaaggctggatgaatgacagaccgtgatgaagggccatggctgccctataaatggaccactgcttgtgctgcttgtgactaactctttctttttgtttttgtttttagagacagggtctcattctgtcacccaggctgcagtgcagtggcgtgatcacagctcattacagcctccacctcctgggctcaagtgatcctcctacctcagcctcccaagtagcttggactacaggcacaagccagtatgcccggctgattttttaattttttgtaatgatgacgtcttgctatgttgcccaggctgatcttgaaattctgtgttcaagcgatccatc

SEQ ID NO: 725726 - DNA, 651 bp, Homo sapiens
agagacatgttttaactttgtgtaattatatgcactagtatttagcgtggactacaatgatgaactggatatcttggtgagcggctctgcagacttcactgtgaaagtatgggctttatctgctgggacatgcctgaacacactcaccgggcacacggaatgggtcaccaaggtaggaagacttggaagaagtctcctgcttatcaggctttttgagggagggcgtggaggatggtagacactgccttataagtgttaggtgagtcataagatggaattgctgtacytacaaagcataatggtacacaacagtgaccagcaagtagaaggtacttaatacatggtttaacaaataaatgacttatggacatggaaagttgcccacaatatattaggtggatagagggggcaaataaaacagattacatacaaaaaaatatgtagagtgtgataccggtttctgaatgtgttcatgcatcaaaatgttgaaggtgggtatttctggtgggattgtgggcgtgtttttccctttagaataaacatgtttctttcttaatcagaaaagcaattttcattttgaaaaaataacgcttacaagaagtaggacaaagaaacctgtacaggatctttagtaaaatattgtaatgtttt

SEQ ID NO: 725727 - DNA, 634 bp, Homo sapiens
aggagttgatgaatacatctttttacctagtggtaagagttaactcttgccttctagttctcactggtaactgacaaattgtgaatccttagccaaagcatttactctgcctgagctttggttttcacagcttaaaaatagattgtttagttaaatgttatctgtaagatcctttctagcctggatagatgttttgtacttttataaactttcatcaggccgggtgcggtggctcacgcctgtaatcccagcactttgggaggccgaggtgggcagatcatctgaggtcagtagttcgagaccagcctggccaacatggtgaaacctcgtctctactaaaaatacaaaaattagccaggtgcagtggcrgccgtctgtagtcccagctacttgtgaggctgaagcaggagaatcacttgaacctgggaggtggaggatgcagtgagccgagatcacgcccctgtactccagtgtgggcaacacagtgagaccctgtctcaaaaaaaaaaaaaaaaactttgatcaaacaccacctttcccttccatgccaatattatataatgactgaacgcacctctcccgctcccggcttttttataagtgggctgagcttttctccttatattttactttt

SEQ ID NO: 725728 - DNA, 646 bp, Homo sapiens
tctctaaaagaatttcattgaccttctagggtccatggggctcagatgagctctggagtcaggtttggttatcactgcagtgaagaatgttgtgttggkatgtgacagaaggtgaggccaaaccagaggtaaccaagagatagagaagggcttggagttcgtgaaagtagttggagtttcctcctaaagaaacaattagacctgtgagaagtaaattgaaggatatttacaaaaccaagactaatacatcagaaagtaaaattttcatttatttgatggagaagcttggtataattttccctgagctttaaggggaattttgggtttccatagtcacctctgtgctcagtgaaacgacagcaaggaggaaacttcccatttaattaggctgaattgatttacattgaattgggaggagttaagtattattatctacaaaatataaggcttgcttaggtctaatattttgtctaccagcaatacaaaaccataaaattatgtccagtccagtctcataaatataattgggaaccttagaagtgtcaggcactgtgctagtttctaaaaagaaaataaacaagtgtttaaaagactgtagcttcttggatagctcgagaaagagacacagaaagaactttgttaaatg

SEQ ID NO: 725729 - DNA, 646 bp, Homo sapiens
tctctaaaagaatttcattgaccttctagggtccatggggctcagatgagctctggagtcaggtttggttatcactgcagtgaagaatgttgtgttggtatgtgacagaaggtgaggccaaaccagaggtaaccaagagatagagaagggcttggagttcgtgaaagtagttggagtttcctcctaaagaaacaattagacctgtgagaagtaaattgaaggatatttacaaaaccaagactaatacatcagaaagtaaaattttcatttatttgatggagaagcttggtataattttccctgagctttaaggggaattttgggtttccatagtcacctctgtgctcagtgaaaygacagcaaggaggaaacttcccatttaattaggctgaattgatttacattgaattgggaggagttaagtattattatctacaaaatataaggcttgcttaggtctaatattttgtctaccagcaatacaaaaccataaaattatgtccagtccagtctcataaatataattgggaaccttagaagtgtcaggcactgtgctagtttctaaaaagaaaataaacaagtgtttaaaagactgtagcttcttggatagctcgagaaagagacacagaaagaactttgttaaatg

SEQ ID NO: 725730 - DNA, 1078 bp, Homo sapiens
ataaaaatataaataggcatgctgatattttcctcccatgccctaaaggactggcagtatatgacataaacacaattatcttgcatacttcctttaggccataggctccctgctccacccatcccaggtcattgatgcgaatagcagaagttgatggtgaactggaaatacacacctgaatctctgtaacataattcagttttcactgaggaagcaatgccaccaaagtagagttgagactgctggagagcagcattagaggtagattgtctataccaaggggcagcagtggagatgtggaagagggaattcactaagcaaaggaagagaggaagggctacttccagagggcctgcatagaggccttagaacgtctggaaattagaaccaggagggtgggtgttgcaggaggggagagtgcagagtgacaataagacacatgcaggccatgctgctcttggaatgtcttcatgtcatggaagtgagcatatccagtggaaggctacagagatgattctgaagcttggaagagatctaaggtttggagttcaagaccagcctggccaacatggtaaaaccccatctttactaaaaagacaaagaatagccatgcctgactgtggacgcctgtaatcccagctacttgggaggctgagggaggagaattgcttgcacccaggaggcagagattgcagtgagccaagactgtgccaccacactccagcctgggtgacagagtgagactccatctcaaaaaaaaaaaaaaaaaaaaaaaaatcacagactaaaaaaagagcattccaaaattaaatgttaatatttgcctaactatgaaaacaaaacaaatactctctgaacactactagaaaacaaaatgggccaggtgcggtggctcatgcctgtaatcccagcactttggtaggccaaggcaggaggatcacaaggtcaggagttcaagaccagcatggctaacatggtgaaaccctgtctctactaaaaatacaaaaattagccagacatggtggcaggcrcctgtaatcccagctactcgggaggctgagacaggagaatcacttga

SEQ ID NO: 725731 - DNA, 1326 bp, Homo sapiens
ctgtaaggacctaattgtacctccaagattacaggtcctacctggcaactactgatacttgccactcagaacttgccagcccttgcaagctgccaccagcaccataagctttctttcaaaacaacttgcaaacccttctccttccccagtaagcctcaaccttttactttttttcctggacrttgccagaggccaccctggtctgcatgtatgtcccggattgcaatcctctctcttgcatattatcccaaatgaaacaatttttactttcactctctcttttttcacactgacacttcaaatctccgcttcctcttctgttaccaggcagaaaaactctgcttttatggggctcacatgattagattaagcacacagggacactctccctttcgccatgtcgtgtagcacaatcacagttcctcacgagctcaaagaggggaggattacaacggcaccggggggtcattcttagaattctccctactacagaactgtagtttgccaatccctggtctaaactgtaacccagaatataataaaacatatggcagaaaaacaggccacagcacagtagatgccacctggcagagaacacaccaactcaagagggaccacgcatgcacactggctgggaacacccacggtccaggcctgagactcagggtgagcacgcgccctcccacctcccgcactcacacccacaggcttgtgctgtgcccagtacgaagcatcccagagcagcaccatcttctggagctttctgagaggacggaagtgtctgttatctgtgctgtccattatgctagccatgtggctactgagcacttaaaatgtggctggtgagactgagaaactaaatttttaaaattttaccttgattttaccttaatcttcatcttactttaaaattaaatagcaacatgtgactggtggctactgtactggatagcacagttctacactaagattctggagtaaccatgccttcaaatgtgtgagttctgagcatagagtatgcattaatattcctgtttttaaaatttatttttaaaatgtgtaatactttactgactgaaaatgccatacacacagatatttatgagttgaaagggaacttttcattgtttgtacatgcatgtgtacatgtcttcgctacaatgaaaaggattccttccaattcacctgtgttttcccaaatctccagtgcatccaaaaaaatttattgttattagtttttttgcgtatctttctatggcattttaatgcctacataaacaagtacaaatatagacacccagccaggtgcagtggctcacatctcta

SEQ ID NO: 725732 - DNA, 1326 bp, Homo sapiens
ctgtaaggacctaattgtacctccaagattacaggtcctacctggcaactactgatacttgccactcagaacttgccagcccttgcaagctgccaccagcaccataagctttctttcaaaacaacttgcaaacccttctccttccccagtaagcctcaaccttttactttttttcctggacgttgccagaggccaccctggtctgcatgtatgtcccggattgcaatcctctctcttgcatattatcccaaatgaaacaatttttactttcactctctcttttttcacactgacacttcaaatctccgcttcctcttctgttaccaggcagaaaaactctgcttttatggggctcacatgattagattaagcacacagggacactctccctttcgccatgtcgtgtagcacaatcacagttcctcacgagctcaaagaggggaggattacaacggcaccggggggtcattcttagaattctccctactacagaactgtagtttgccaatccctggtctaaactgtaacccagaatataataaaacatatggcagaaaaacaggccacagcacagtagatgccacctggcagagaacacaccaactcaagagggaccacgcatgcacactggctgggaacacccacggtccaggcctgagactcagggtgagcacgcgccctcccacctcccgcactcacacccacaggcttgtgctgtgcccagtacgaagcatcccagagcagcaccatcttctggagctttctgagaggacggaagtgtctgttatctgtgctgtccattatgctagccatgtggctactgagcacttaaaatgtggctggtgagactgagaaactaaatttttaaaattttaccttgattttaccttaatcttcatcttactttaaaattaaatagcaacatgtgactggtggctactgtactggatagcacagttctacactaagattctggagtaaccatgccttcaaatgtgtsagttctgagcatagagtatgcattaatattcctgtttttaaaatttatttttaaaatgtgtaatactttactgactgaaaatgccatacacacagatatttatgagttgaaagggaacttttcattgtttgtacatgcatgtgtacatgtcttcgctacaatgaaaaggattccttccaattcacctgtgttttcccaaatctccagtgcatccaaaaaaatttattgttattagtttttttgcgtatctttctatggcattttaatgcctacataaacaagtacaaatatagacacccagccaggtgcagtggctcacatctcta

SEQ ID NO: 725733 - DNA, 1326 bp, Homo sapiens
ctgtaaggacctaattgtacctccaagattacaggtcctacctggcaactactgatacttgccactcagaacttgccagcccttgcaagctgccaccagcaccataagctttctttcaaaacaacttgcaaacccttctccttccccagtaagcctcaaccttttactttttttcctggacgttgccagaggccaccctggtctgcatgtatgtcccggattgcaatcctctctcttgcatattatcccaaatgaaacaatttttactttcactctctcttttttcacactgacacttcaaatctccgcttcctcttctgttaccaggcagaaaaactctgcttttatggggctcacatgattagattaagcacacagggacactctccctttcgccatgtcgtgtagcacaatcacagttcctcacgagctcaaagaggggaggattacaacggcaccggggggtcattcttagaattctccctactacagaactgtagtttgccaatccctggtctaaactgtaacccagaatataataaaacatatggcagaaaaacaggccacagcacagtagatgccacctggcagagaacacaccaactcaagagggaccacgcatgcacactggctgggaacacccacggtccaggcctgagactcagggtgagcacgcgccctcccacctcccgcactcacacccacaggcttgtgctgtgcccagtacgaagcatcccagagcagcaccatcttctggagctttctgagaggacggaagtgtctgttatctgtgctgtccattatgctagccatgtggctactgagcacttaaaatgtggctggtgagactgagaaactaaatttttaaaattttaccttgattttaccttaatcttcatcttactttaaaattaaatagcaacatgtgactggtggctactgtactggatagcacagttctacactaagattctggagtaaccatgccttcaaatgtgtgagttctgagcayagagtatgcattaatattcctgtttttaaaatttatttttaaaatgtgtaatactttactgactgaaaatgccatacacacagatatttatgagttgaaagggaacttttcattgtttgtacatgcatgtgtacatgtcttcgctacaatgaaaaggattccttccaattcacctgtgttttcccaaatctccagtgcatccaaaaaaatttattgttattagtttttttgcgtatctttctatggcattttaatgcctacataaacaagtacaaatatagacacccagccaggtgcagtggctcacatctcta

SEQ ID NO: 725734 - DNA, 625 bp, Homo sapiens
taaggtgctagatgatgatagtgtagaccagctctgatagatataacttttgttaatggtagaaatattctgtatcttcacagccactcaccatatgtggccatcgggcacttgaaatgtggctagtgcaactaaggaattgaatttttaattttagtgaattttgacgtatttaaatggccacgtgtaactagtggctaacatcttggactgcacaggtctagactacattcctccccatccccatgagtttgctctaccaatgccccagaacttagacacataactgtgaattgactgaagaagcatgaattgacgagaattgtttcttccagccaacagcataaaaacttgctataaaaattaatttctattggaaaataacatttctttcacacttggtttgggaatcctctctagtgccttaaaatagagacctattttattctcagaatgatcaagagcccgaatgaattaaactgctggctttattcctytgcatccggcttctattggtaactttcacactagccaggaaatctgtttgtaaggctgagcaactggttgttaaagaggggtcacgcctcacggtaacatgtggccccactagcccctaagcactggc

SEQ ID NO: 725735 - DNA, 625 bp, Homo sapiens
taaggtgctagatgatgatagtgtagaccagctctgatagatataacttttgttaatggtagaaatattctgtatcttcacagccactcaccatatgtggccatcgggcacttgaaatgtggctagtgcaactaaggaattgaatttttaattttagtgaattttgacgtatttaaatggccacgtgtaactagtggctaacatcttggactgcacaggtctagactacattcctccccatccccatgagtttgctctaccaatgccccagaacttagacacataactgtgaattgactgaagaagcatgaattgacgagaattgtttcttccagccaacagcataaaaacttgctataaaaattaatttctattggaaaataacatttctttcacacttggtttgggaatcctctctagtgccttaaaatagagacctattttattctcagaatgatcaagagcccgaatgaattaaactgctggctttattcctctgcatccggcttctattggtaactttcacactagccaggaaatctgtttgtaaggctgagcractggttgttaaagaggggtcacgcctcacggtaacatgtggccccactagcccctaagcactggc

SEQ ID NO: 725736 - DNA, 1006 bp, Homo sapiens
tggcagagcctagaatcaaaccctgatctatctggtccaaaccacatggtctttcccctgcatctcattccaaccttccggaagcctccaatctgagctgcactcagctcttggccctgtggtgggtgctggggatgcaaagaccaattggcccaggcctgccacggaggagctccaaggatgacagggactcacataagcgccaggccagggaactataagtctctggagggtgagattttagaagcaagcacagggacactgcagggcccgggggcgaggctgggaaaacccagcyggaaaagccaatggagcacaaagaaagggcctcttttctggttacaaaagagcaaaacaacacttgggaagtcggaaagtcaaagtaaccagcccaaaatgatacgtggaagaaagtagcagaagtaaaattggaagccaggcctgtgagacttcagtctcgcttctcttgctcttccagcatttctgtacagaaacaaagaagaaaacagcaggggagcctgggcagcagctgtgggcggcccatccaccccagctgcctgaccctgtctgagcttgaggcctccgcgggctgcagcttcctggttccacggtgccctgcggccatggaggggctctcctgtttccagaacacccagccttgccagctgcagtcaggtgtttccagcaacacacacactcacatgtgtgcacagacacaaacacatgcacacacatacacaccttgtgcaggagccacgccctccagcaggatcttaaccctggagccctgcacacctaactcagatctctaactcttgagccaccctctgtccagctgtccaagccgctctgtggccagtgctgggtgacctgcatgggatcccaggcatgtgcctaggggccggaggacacacacacacacacacacaaagttcagcctcagaagccttaagaggattttgcaattagaaaaccttagaaaaagttgttgtaaatctcacgatgc

SEQ ID NO: 725737 - DNA, 1624 bp, Homo sapiens
tgagccactgcgcctggcctgtgtcctctcatttttgtaaaaaaagtttagaaacacacacacacacacacgtatatatatagatcattaagggctatcttaaaggctggctactagacaggtagatgagttttctattttccacttctaacagattgttacaaggcagtatttcttttcttttctttttctttttctttttcttttttttttgagacggagcttcactcttgttgcccaggctggagtgcaatgctatgatsttggctcaccgcaacctccacctcccaggttcaagtgattctcctgcctcagcctcctgagtagctgggattacaggcatgtgccaccacgcccagctaattttgtacttttagtagacacggggtttctccatgttggtcaggctggcctcgaactcccgacctcaggtgatccacctgccttggcctcccaaagtgctgggattataggcatgagccaccgcacctggcctggtagtatttctctatcgcctgtccagcgatgttctgcatggccaagtgacggctgggctggctgtgtaatgtactaccttctatttgcttttcatcctttcctgtctcatgtcccttttcgttgactgtccttgtgaagaattagtacttaagctttgcctagcctctgttttctaagcagatggaactaagacaaacagtgcagcttaagtatttcatcatactagttttaaatgggggggtggggagagaacaggaagtgctctcaggatatgtgattctcagtgtgttccatatcaatgtacttgtcgagaaaactcttgaaagtacagagagaatagaagtcatggtataaaagatctgccagtgagtactgaacctttggagattccttttccatttaatttgtttctcttcaaaatcacaattgaaatgcccaagagaatataaaaatagaacatctgtatctgtattagaaggacatttatattttgtgaaatatcagcaagatacagcgcaaatatgcccagattgaagggaatattaatcagcttttaatttcaggaatgtagaagaaaaactcacttggaaaataagtagattaaagtctcccaaagaggtcccctcacaaactcaagttcagaggagcagagctgggagtgagagtgggctgtgggatagcatggggaggggaccaatgaccttggactctgaccgtggcccagtcttggagcagctctctccttgctcactctcagcatttcctcagagtagatacctctgggcactactacagtaccatcgctgcaggccccccaacaaagaactgtgcctcaactaacttacggttgtcacaccatcacagaaaaaaagcaactgccagctacgtcaccaaatgtggtgtacctactcttttttaaaatttatttttattttgtattttttttatagagacagggtctctctatgttgcccaggctggtctcaagctccctgactcaagagatcctcctgccttggcctcccaaaatgctgggactacaggtgtgagccacaatgcccggcttctttttttcttttttttaaacagggtgaaaaattatgcactttatttatacaactttgca

SEQ ID NO: 725738 - DNA, 1624 bp, Homo sapiens
tgagccactgcgcctggcctgtgtcctctcatttttgtaaaaaaagtttagaaacacacacacacacacacgtatatatatagatcattaagggctatcttaaaggctggctactagacaggtagatgagttttctattttccacttctaacagattgttacaaggcagtatttcttttcttttctttttctttttctttttcttttttttttgagacggagcttcactcttgttgcccaggctggagtgcaatgctatgatcttggctcaccgcaacctccacctcccaggttcaagtgattctcctgcctcagcctcctgagtagctgggattacaggcatgtgccaccacgcccagctaattttgtacttttagtagacacggggtttctccatgttggtcaggctggcctcgaactcccgayctcaggtgatccacctgccttggcctcccaaagtgctgggattataggcatgagccaccgcacctggcctggtagtatttctctatcgcctgtccagcgatgttctgcatggccaagtgacggctgggctggctgtgtaatgtactaccttctatttgcttttcatcctttcctgtctcatgtcccttttcgttgactgtccttgtgaagaattagtacttaagctttgcctagcctctgttttctaagcagatggaactaagacaaacagtgcagcttaagtatttcatcatactagttttaaatgggggggtggggagagaacaggaagtgctctcaggatatgtgattctcagtgtgttccatatcaatgtacttgtcgagaaaactcttgaaagtacagagagaatagaagtcatggtataaaagatctgccagtgagtactgaacctttggagattccttttccatttaatttgtttctcttcaaaatcacaattgaaatgcccaagagaatataaaaatagaacatctgtatctgtattagaaggacatttatattttgtgaaatatcagcaagatacagcgcaaatatgcccagattgaagggaatattaatcagcttttaatttcaggaatgtagaagaaaaactcacttggaaaataagtagattaaagtctcccaaagaggtcccctcacaaactcaagttcagaggagcagagctgggagtgagagtgggctgtgggatagcatggggaggggaccaatgaccttggactctgaccgtggcccagtcttggagcagctctctccttgctcactctcagcatttcctcagagtagatacctctgggcactactacagtaccatcgctgcaggccccccaacaaagaactgtgcctcaactaacttacggttgtcacaccatcacagaaaaaaagcaactgccagctacgtcaccaaatgtggtgtacctactcttttttaaaatttatttttattttgtattttttttatagagacagggtctctctatgttgcccaggctggtctcaagctccctgactcaagagatcctcctgccttggcctcccaaaatgctgggactacaggtgtgagccacaatgcccggcttctttttttcttttttttaaacagggtgaaaaattatgcactttatttatacaactttgca

SEQ ID NO: 725739 - DNA, 1624 bp, Homo sapiens
tgagccactgcgcctggcctgtgtcctctcatttttgtaaaaaaagtttagaaacacacacacacacacacgtatatatatagatcattaagggctatcttaaaggctggctactagacaggtagatgagttttctattttccacttctaacagattgttacaaggcagtatttcttttcttttctttttctttttctttttcttttttttttgagacggagcttcactcttgttgcccaggctggagtgcaatgctatgatcttggctcaccgcaacctccacctcccaggttcaagtgattctcctgcctcagcctcctgagtagctgggattacaggcatgtgccaccacgcccagctaattttgtacttttagtagacacggggtttctccatgttggtcaggctggcctcgaactcccgacctcaggtgatccacctgccttggcctcccaaagtgctgggattataggcatgagccaccgcacctggcctggtagtatttctctatcgcctgtccagcgatgttctgcatggccaagtgacggctgggctggctgtgtaatgtactaccttctatttgcttttcatcctttcctgtctcatgtcccttttcgttgactgtccttgtgaagaattagtacttaagctttgcctagcctctgttttctaagcagatggaactaagacaaacagtgcagcttaagtatttcatcatactagttttaaatgggggggtggggagagaacaggaagtgctctcaggatatgtgattctcagtgtgttccatatcaatgtacttgtcgagaaaactcttgaaagtacagagagaatagaagtcatggtataaaagatctgccagtgagtactgaacctttggagattccttttccatttaatttgtttctcttcaaaatcacaattgaaatgcccaagagaatataaaaatagaacatctgtatctgtattagaaggacatttatattttgtgaaatatcagcaagatacagcgcaaatatgcccagattgaagggaatattaatcagcttttaatttcaggaatgtagaagaaaaactcacttggaaaataagtagattaaagtctcccaaagaggtcccctcacaaactcaagttcagaggagcagagctgggagtgagagtgggctgtgggatagcatggggaggggaccaatgaccttggactctgaccgtggcccagtcttggagcagctctctccttgctcactctcagcatttcctcagagtagatacctctgggcactactacagtaccatcgctgcaggccccccaacaaagaactgtgcctcaactaacttacggttgtcacaccatcacagaaaaaaagcaactgccagctacgtcaccaaatgtggtgtacctactcttttttaaaatttatttttattttgtattttttttatagagacagggtctctctatgttgcccaggctggtctcaagctccctgactcaagagatcctcctgcctyggcctcccaaaatgctgggactacaggtgtgagccacaatgcccggcttctttttttcttttttttaaacagggtgaaaaattatgcactttatttatacaactttgca

SEQ ID NO: 725740 - DNA, 684 bp, Homo sapiens
ctgaatgaatagattaaatatctgtacaatcacaggggatgggttttccagattgggaaactgaggcttggggagggaagtgattttcccacggttacacagtgatgggtggaagagccggggcttgggccgtgagtcatggagtagagtcctggagaggggacagtacgrcaccgtgagtggtgctcatatatgagccatgcagtggtcacagatctccagggggtggggagccttagagatcccccttttacaattggcaagacagatcctcaaggccatgaagggaccttgtgcagttgacccctctctctgctatcagtttcaggcttttgaaagcctggtaagtaagctttcgtaaaaccaggcctggctttgagcaggttcatcttcagtttctcgctgcctcccaacggatggggcagaagagcgacgagaagattggtaccttccctccctggattggacaccggtttctagaattccctgaggggctaacctctaatttcaatatgttaatgtgtggaatctaatggcacatttattgcttatggagatgctagttatttacatgggaaactgatttatctattagataattagtaaacttcaataattgcaaaaaccttttagcaatcagttgacatttaattaacatacaataactgtcttattaaatctaca

SEQ ID NO: 725741 - DNA, 573 bp, Homo sapiens
ccctcaaggagaaaaaaagttaattgtctgagaaacagaggaaattaactttcactataaaccacaaaccccggtgctccccaattttgccttcctcctaatgtaagatcctgacatatcattcattttaaaaagggggttaggcacagtagctcaggcctgtaatcccagcactctgggaggctgaggcggacagatcacttgaggacaagagtttgagaccagcctggccaacatagtgaaactttgtctctaaaaataataaaaataaataaataaatgatttttttttttttggcttaagtatcttactttgggcttcagtctccccataaatgaaaaggttagactctatctctatggccacctataaatctagagcctatggttctttcagcaactaatagagtcagtaaaagtcttcargacagatctctaggccaggcacagtggctcatgagcattatcccagcaatttgggaggccaaggcgggcagatcacctgaagtcaggagttcaagaccagcctggccaatatggtgaaaccccgtctctactaaaaaatacaaaaat

SEQ ID NO: 725742 - DNA, 1417 bp, Homo sapiens
tctggtagatatacacactgaaatctttccagtgtgtcttagaatgttcaattcaattcaagtgaaatgtagtaaaacaagattacttctgagaagttctctgtggacatgtgccccttctttctgagcctttctttaggaacacactcttctccatttgcctgaatatccatttggagtactagggcacctcctcaaaggagaaaggctctgctcaaatcagaatccagaaggcgtgactattggtgtcagttaatatggagtttactcccacagaaacatgtaacatcatattccaaaatctagtacctgcttttcagctcctattccctcttcttcccttgaatgatagtaaatatgtcataaagaaggtcttaaacttttaatgtttatttctcacacttctacacaatttgaagtttttctttttcatttcacgatggcatgcacttcactgtgatgaagtcagtttaacctctgttcaaaaatcttttgttkaacttccttcaaaacgttcagctcgggagaggcagtctccctcagaaaaatctcaagactattttccagataacctactggtttgatctgttacatttattgtagatattctcttccccactgagagagaactgaagcaagagtagctattccatatttctttatgaaaagtaaatttgtagtttgtgagctgggataatgcatccatagggataggggacccacagatgagtggtaaaatttgtcacttgtaaacagggaacattgtttctgaagagtaaatgagagctcccaccctgagagatgttaccattaagagaagggaactttggtattggaaaatctgggtcacataattttcatgtttatgtgtaccaccattttgttctaactcacagaaataatgaaagaggtgactgaagaggaactgtgtctgccttgttttcttcataccttgttgctcacagtcctagagcttacttcaaagactgatgatataaacacctaggggatctagattccaaattaagaaaaacagattgtgctatcaaagtgcagttgatttagaatctttgaaaaaagtaactttagtcttagagaatatgatctacagcaaagataccagaatgcaacttagaattgttttgctttacttttcgtccttaattttaaaaaaatatgtaatatatgaatacacttttatattaaagtctcaaatatctccgcatatgaacacagacaaatgtgatttaacatccatgtctctgaagctctctatccacccctctccctgtcccatccagaagtaaccactgttaatgtttctgaagtacctgtctctgttcttttatgcatatacatggagggggaagatagacataccaacacacacacacacacacacacacacacacacaca

SEQ ID NO: 725743 - DNA, 833 bp, Homo sapiens
tttttgtagagataagatctcactatgttgttcaggctggtctcaaactcctgggctcaagtaattcttctgcctccrcctcccaaagtactgggattagagacatgagccaccacgccctgccaatgtataatcttagagttaatttttatgtaagatcacacacctgactcccactaactgaaccagacagcttctttcctaattcctagagccttgaaagagtatgatgactcccaaatatctccccaatttgcctcaaaatagttaccctagaatacttccttggggataaaacattttctctggaaaatggtaatgagtagcagcggataaactcatgaacatcatggtccaggtgagttcatgaaattaaccagatttaggaagttgggaaccaaggcaaaaagtaacaggtttgtcaaagctcaagtgggaggatttgtgggagcagaaaggtatgattgacagacctgtctttggacctggttctaatactcccttgctaagtaaacttgagtccaccatttaacttcagtacttcatttggtaaaatgggagcaatgagacctgtctaatggaattgccgtgaagataaactgtgaaaagacttttttaagcagagaaggtttggggtaaatattagttatttttttggcccactgaacccaatgcctcactcactacaatggcctggcttttactgagaaaatatttacttgagaactaattatattccaggcactataataactgtaggaacataatacttataaatggatggacgaaggagtgactggatgccttctagtagcctatgaactggtaaaggc

SEQ ID NO: 725744 - DNA, 945 bp, Homo sapiens
aaatacaaaagttagctgggcatggtggtgaacccctgtagtcccagctacttgtgaggctgagacaggagaatcgcttgaacctgggaggcggaggttgcagtaagccgagatcatgctactgcactccagcctggtgacagagtgagactgcatctcaaaaaaggaaaataaaaataaaataaaataaaataaacttttatatagtagcttcacaaagtcacacatatgatatttattatcaaattatattaaatataataaaaatatcaaaaaataacaagcagctttaaaaagaggattcaaacaacaaaatagattttgtaaaataaaaataccattacagaaataaaaacttcagtggaatattaggaaaataaaaaagtgcctttgagcactttaaaaactttgcagatgaccaaggctgcattcaacctgaagttagagacaacacagaacttttcatattctacaataaaggtttccaattaaattctagatatcatgctayagataaaactgtataatatctaggactttccctccagaagttcacaatttgtataaacaaggaacaaaaaattaaaggaaatactcacctgaatattctataactggtctgaacagtgcttgcaggaaagttcatgcatttggctcgggagttctgtgtcctctgggctttctggacaacagatgttattttctgaggtttccacagtctagcaaattccaaatgcctctaaaataataagacttgctttttggatgccagtatattataggattcttaaagcccctccctgattaggtttctgcagtacaaagtatcaataaaaggatttacctttcaaccgttgattaaattaactccatttgtaatctctgtaaataaccctctacaaacaccctctagtgctggtttatattgtcattgatttttaaata

SEQ ID NO: 725745 - DNA, 1423 bp, Homo sapiens
tgaaactgttcttggttttaacaggattcatcatctaagtataaaagtgacaaaccataaaaataaaatgtgtatttcccttacaaattaaagtctctttcaattggtttcaaaagacttgttccttgcctcataaaatgcatattttcaaccttgaaatataaaaatcatttttcttctttctgacagataaagccattttactttgctacaaaggatatagactacaataactgacaatcataaatatatayggcaaatgtccttgctctattatacgtatattaaacctacttaaagataagcaaagtaaaacttcagtaaatcgtggtctgatttgggtatgcagacaataaaatacttgaggcacagagtttacagaaatatgtcattatagaatttgtaatggcataaattcacttatcttacttgagtcacagatagaagctttttgagaatctcataatagatataagttctaaactactagctcactaaattatagagattgtgataaaagacataagaacattaattatttaatttattaaaattatttcaatttgaaaaatttcagccataagctattatttagcagtgatgtcacagtaaatcaattttgtaatatctttttgttaaattttattgtaaagatttttaaagtaatgcttaacagatactcaaattgttaaagcattttataaattcaattcagttatctatatttaatttatattcagaattttaaactgtactttaaactgtcctctaatgttggaagtttttaataatgtataagtttaaagcatcactagatctatttctacctgcttatgtttttcatattttatgattactattataagaacatgtataaatttgaaaattaggaacatctttgccttctaccattgccaggcattgtcattgacccataatctaacttttctataatagactataatatatctgcatagccctcactgttgttaataaaacagtaggattgtttgtaagtgatgtgaaggctcatgacaaatgattacccatatagtaaggataatttaaatctacaattatgaggcttatgtttcaaagactatattacacaggatctctgttctttcatatatctctttatccactattcaataattttagtgtcttttttggataataataattctaactttcaaatttgacatttaaactttaaaaatttaagagattaatataacaaaactatatttttagtaatattttattcccaggtttactgttgaaatgtgtcacagcaacctctagaaatttataaagcatattcaaaaatctccctagcctaatgattctttcaaataaatatacaaggtcctggacttaacaatagtttgactaagaattttttggttttattatgtgtgtg

SEQ ID NO: 725746 - DNA, 1423 bp, Homo sapiens
tgaaactgttcttggttttaacaggattcatcatctaagtataaaagtgacaaaccataaaaataaaatgtgtatttcccttacaaattaaagtctctttcaattggtttcaaaagacttgttccttgcctcataaaatgcatattttcaaccttgaaatataaaaatcatttttcttctttctgacagataaagccattttactttgctacaaaggatatagactacaataactgacaatcataaatatatacggcaaatgtccttgctctattatacrtatattaaacctacttaaagataagcaaagtaaaacttcagtaaatcgtggtctgatttgggtatgcagacaataaaatacttgaggcacagagtttacagaaatatgtcattatagaatttgtaatggcataaattcacttatcttacttgagtcacagatagaagctttttgagaatctcataatagatataagttctaaactactagctcactaaattatagagattgtgataaaagacataagaacattaattatttaatttattaaaattatttcaatttgaaaaatttcagccataagctattatttagcagtgatgtcacagtaaatcaattttgtaatatctttttgttaaattttattgtaaagatttttaaagtaatgcttaacagatactcaaattgttaaagcattttataaattcaattcagttatctatatttaatttatattcagaattttaaactgtactttaaactgtcctctaatgttggaagtttttaataatgtataagtttaaagcatcactagatctatttctacctgcttatgtttttcatattttatgattactattataagaacatgtataaatttgaaaattaggaacatctttgccttctaccattgccaggcattgtcattgacccataatctaacttttctataatagactataatatatctgcatagccctcactgttgttaataaaacagtaggattgtttgtaagtgatgtgaaggctcatgacaaatgattacccatatagtaaggataatttaaatctacaattatgaggcttatgtttcaaagactatattacacaggatctctgttctttcatatatctctttatccactattcaataattttagtgtcttttttggataataataattctaactttcaaatttgacatttaaactttaaaaatttaagagattaatataacaaaactatatttttagtaatattttattcccaggtttactgttgaaatgtgtcacagcaacctctagaaatttataaagcatattcaaaaatctccctagcctaatgattctttcaaataaatatacaaggtcctggacttaacaatagtttgactaagaattttttggttttattatgtgtgtg

SEQ ID NO: 725747 - DNA, 648 bp, Homo sapiens
atacacacacatgtgtgtctgtataccactaatctatattttcagtttgaaaatcctcataatcatcagtacatgtttatcaatgatttttaaatattttagatgtacttatgtcattatctcatagtgagtgtgcttcaaggcaaagacaatgttaactatttcacaaaaagccttaaataaatactgttactgtgtgaaaatttcaaaagtattttgtactatctttaattttacatgttttatatttgcaatttctaatgaaagacatttcatttctttcagagaacttatggagaaataaaaataatagttgctttcaaaaagagaatstacagtattagaaagaagactaggaaaagaaaccagcaacactcaatgattttatgaagccaaatgtcttcaaataattttcttctagtctataatgtaagaatgttaaaaccgtgtccctcaaagttgcaatatacattgcatgtgtaaattgtatgtataattacaacataatggaaatgaatatactacacatttctctcactttcaaatgttggttttgcaccaactatttttggtttccaaatagagtgaaatttacatccagaatttcattgtatcattaattatatcaacagcttaaggaaaaataat

SEQ ID NO: 725748 - DNA, 1163 bp, Homo sapiens
attcagtttttttccaaacaggttcatattcataatttttaacccagactgtaataatttgagcaagtagtgttgcgaaaagtatttctttttaaatatttgggaaaagtttaggggtttttttccattttattattcatttctagttaatagtaactagacttcaaatgttctcaatccttttaattttagaattccaatatattatatttcaatatttaaagcatactttcagcaatgcaacagattccttgcattcagaaagtgtggttcgttttttaggactgtgtgtgcatgcatgtaaatgaacatatgatcaacttttggaagtatttcacgaacacatgaaaaggatgtgtagtttattttatttcatatataatgataagttcaacttcattaattgtattgttcagattctgcatgcttttattttagagtaagagttaataagaaagttctggggaaatggaaagattaagttattatttttgttagtttctctcttatttgtaaagtttctctatgtatgtttttccccactgttatccagtgaaaattgaaatgaatacatttttgttgattctaccttttattaatctatatatttmctctttccattaatgattttgtcttacaaaatattgttaccccgttttcttttttgttatattggttgataaacctttggccatcattattttgatctttaattaactgagaatcttggatacctaatgatgttttaaaagcttttaaatttaataatatgacaaatgtgtttaatcatcttgtttgtaatgtatgctttttatgcatccttgttacatcttggactttttgtttttattctttattccttgttacatctttgtttttattcatataaaataagaactgtgttttgtttatttttaccttctctaggatcctgttaaaaggcatacacccaatgttttaattcttatagtgataatatttcagtttaaaaaataacatatattataccatatataggtataatacatatattttacactcttattatcaaagtcaagaataaaatgttaagttttgagtcttacctatacaagatcagaaattcattcgtgatttcctaatcttgttaatataattaggagttttaaagtcaagttattgtt

SEQ ID NO: 725749 - DNA, 606 bp, Homo sapiens
tgaaagagtgtctcagatgccccttctgctagaggagccaggatgcagtgtggcctttaccaaacagccactaaatacataggccaatgttaacatctttctgggaaattcttctcaaaccgattttaagttttaggttattattccagaaaattaacatacatcgattgacaccttgaaaagctgaagataaaaacaagattttcttcttcattctgattccttgagcttctgctccggtgtttggcaatcctaaaaagaggagtactagaaacattgttttgcctggcactgctgattttggatctgtagcccacttayttttgcacctttgtaagtgtgaggctagaactgtggtaatctcatggattgttaactattcagactcttaaaagggaggcacatattagagacttgaactgaaacggatttaatttctagagtcctgaaaaaatcccacagagccccagctgtggctgtggatggaactgtacctctaatcaagtgaacagggccccctctggctaggactgagcagtgtataaactaagaaagactgtaatatccttagatttttaattcatggggtgagaaagataaggcaaa

SEQ ID NO: 725750 - DNA, 922 bp, Homo sapiens
tatgccaggtatggtggcaggaacctatggtcctagacactagagaggctgaggcaggaggattgcctgagcccaggaattcatgactacagtgagctatgattgcatcactgtactccagcctgaacaacagagctagaccttatctcaaaaataaaatatacagaaagatgtattaggttatatacaaatactatgccattttatatcagggacttgagcatctgtggattttgatatctgcaggggatcctggagccagtcccctgtgcataccaagggatgactgaagacaaagtatctagtcctgcttatggtcctgrccagttgtttggccttataaaaaccatgtgaactcttctgagtcttggagatcaattagatgaatgccgatgccctctcacaaactaacatcaataaatatgtctgattgcattcttctattaaaagagaattcaacaaaatacagtgaaatataaatgcagccaattcttgtttatctcttttaatagaggaaagtattactgtaaatcatccagaagctatgtctctgctggtttaatgagaatgcgatgaagctacaatcagtagatccaacacaagatctgagatctttctcaatcattcaaaacattagtctgaactgaactctgttgtcctcatttctttctttttttttttttatagttcttacctaatcaggagggaagcagtgtgtaagagggctagagaaatacatggatattttgctttagaaattcttcctcattagctgagttgagtatggacagcctcacccttctttctaattttctaatggattacagattgcactaacagataatcaaccaataaatggactactatagtatttatggagcagctacaaagggaccaagcactaagggaaattccaaagaat

SEQ ID NO: 725751 - DNA, 674 bp, Homo sapiens
gcctcagcggtgtgtgggaagaacgctgaaagacagctcctgtcaaagtccctgccccgttggatcggacgcaggcttaaatttccgcatcgtttgcacccctctgttttagggtgagtgtctgcaaaaggctgttctcaaacacatctcaatcaggagggatatgttttgggttccttggccttgagggagtgagtcaggaggaggagcagaaaaatcttgactagtrggctctgctgggaaagctctgtgggcatcttggggtgcccggggggtgtaagtgagccacacctgaagggagttgacagtgtaatcttcacccacaccaggacacttcaaagagtggaaggaggctctatgaatagttatgccaggacaactggcctaaaccgggactatccaggcaaactgggacatatactcacctcccttcaaagggaaatagacattgtgacatctccattgacccagactacgtactttagaaccttgcctgatcataggttccagagacatgttggtggcatagtccgttatcatatttcaaggttctcccccatatccacgtcttggtacctacacatctctgtagaatcattgaggtgattatctcatggctcattgtgactgcatagctagatggccagccccgccctccagcataccctggagga

SEQ ID NO: 725752 - DNA, 674 bp, Homo sapiens
gcctcagcggtgtgtgggaagaacgctgaaagacagctcctgtcaaagtccctgccccgttggatcggacgcaggcttaaatttccgcatcgtttgcacccctctgttttagggtgagtgtctgcaaaaggctgttctcaaacacatctcaatcaggagggatatgttttgggttccttggccttgagggagtgagtcaggaggaggagcagaaaaatcttgactagtaggctctgctgggaaagctctgtgggcatcttggggtgcccggggggtgtaagtgagccacacctgaagggagttgacagtgtaatcttcacccacaccaggacacttcaaagagtggaaggaggctctatgaatagttatgccaggacaactggcctaaaccgggactatccaggcaaactgggacatatactcacctcccttcaaagggaaatagacattgtgacatctccattgacccagactacgtactttagaaccttgcctgatcataggttccagagacatgttggtggcatagtccgttatcatatttcaaggttcycccccatatccacgtcttggtacctacacatctctgtagaatcattgaggtgattatctcatggctcattgtgactgcatagctagatggccagccccgccctccagcataccctggagga

SEQ ID NO: 725753 - DNA, 831 bp, Homo sapiens
cagtttgaaagagctgggtgaaaataaactcagcttgagggtccaaaggagaaaaataattcaaaattagagcaatagtgggaggatattagaatcaaaacgttggagtcaagtcattctttatgctaagaacacagataggctgattcctgacttactgaaggttgggaaaagacagactattgggaagggtgccctcctcagggtggcttttgggttgctggctctggatcctcactcccctcttgcagtgcatttcagggtgggctgctctcacgactgctgattgctgctgcccgtgattgtcagagggagcagcatggtagcaggtgttaaagatacgctgccatccggttatcagtcaaaataggtagctgggagaattcaatgcatttttaaatgggtaatcttgrtaggaaaagtgggtagcttttggtctgttctcaaggatctccggagtctgtttcctatgaatagcaagtattaatatatccccagatcttttgcttagtttagtgcagaaactgagactgggacccagcagtttttctctgcaacaccatccttcggggctccactgagctatcaaatacccagaaggcaactggcaaagagtgcaggaagagaaactcaaactaaactcctctttccaaactgccctttccacctccctgtatctgtaatggtgcccaaaccccagtcacccaaaccacttctgccctctcctggtatgttcagtcattctgcctctgcctcgtttccacccacccctcttctccagccctgcacaagcaccctgcattgccacagccacccactaatccccagagg

SEQ ID NO: 725754 - DNA, 831 bp, Homo sapiens
cagtttgaaagagctgggtgaaaataaactcagcttgagggtccaaaggagaaaaataattcaaaattagagcaatagtgggaggatattagaatcaaaacgttggagtcaagtcattctttatgctaagaacacagataggctgattcctgacttactgaaggttgggaaaagacagactattgggaagggtgccctcctcagggtggcttttgggttgctggctctggatcctcactcccctcttgcagtgcatttcagggtgggctgctctcacgactgctgattgctgctgcccgtgattgtcagagggagcagcatggtagcaggtgttaaagatacgctgccatccggttatcagtcaaaataggtagctgggagaattcaatgcatttttaaatgggtaatcttgataggaaaagtgggtagcttttggtctgttctcaaggatctccggagtctgtttcctatgaatagcaagtattaatatatccccagatcttttgcttagtttagygcagaaactgagactgggacccagcagtttttctctgcaacaccatccttcggggctccactgagctatcaaatacccagaaggcaactggcaaagagtgcaggaagagaaactcaaactaaactcctctttccaaactgccctttccacctccctgtatctgtaatggtgcccaaaccccagtcacccaaaccacttctgccctctcctggtatgttcagtcattctgcctctgcctcgtttccacccacccctcttctccagccctgcacaagcaccctgcattgccacagccacccactaatccccagagg

SEQ ID NO: 725755 - DNA, 585 bp, Homo sapiens
tggatggatttccaaaacattatactgagtaaaagcagccagatataaaagagaacatactgtatgattctattgatatgaaactctagcataagcagaagtaatctattgtgactggaagcaggtaagtggttgtctggatttgggagttaggcaaagtgttacccagaaaggggctcaagaaattttggaggagataagaatgttctatttaccacacaggtaaatgtgtccatcaaaactcatcaagctgcacacttaaaataagtgcattttattgcatgtaaaaataactcaatgaagttgatttaaaacaaatattcaattgtttctcactactttagaaaaaagttttaaaaagttagtatgatatacaacgtcttcaatgatatgaccccttctatctctctgactttttctttctaggcctccgyctggtttgctccagtcatactctaatgcctactccctccgcatcatcacactttcttgtgtctctatatctttataaatgcaattcccacttcctggaatctgaaccctaccccctgcctccttgtaatttgactcactcctactcatcct

SEQ ID NO: 725756 - DNA, 585 bp, Homo sapiens
tggatggatttccaaaacattatactgagtaaaagcagccagatataaaagagaacatactgtatgattctattgatatgaaactctagcataagcagaagtaatctattgtgactggaagcaggtaagtggttgtctggatttgggagttaggcaaagtgttacccagaaaggggctcaagaaattttggaggagataagaatgttctatttaccacacaggtaaatgtgtccatcaaaactcatcaagctgcacacttaaaataagtgcattttattgcatgtaaaaataactcaatgaagttgatttaaaacaaatattcaattgtttctcactactttagaaaaaagttttaaaaagttagtatgatatacaacgtcttcaatgatatgaccccttctatctctctgactttttctttctaggcctccgcctggtttgctccagtcatactctaatgcctactccctccgcatcatcacactttctygtgtctctatatctttataaatgcaattcccacttcctggaatctgaaccctaccccctgcctccttgtaatttgactcactcctactcatcct

SEQ ID NO: 725757 - DNA, 620 bp, Homo sapiens
tagacctatggcctcccagaaaacagctaaattagcctcttctctaatgtaggcccagggctctggctctatcggggattccaaagtccctcaacaccacccctgagcttaccctggagagtaatgttttccrggcattcacatcgaccgagagcttaaatatggttcttctgggagagggccaggagacgggatggccattatcagcaatctgctctctgcggagtctgagccatgtgaacaaacaacctcacacactacgagtggggagagaagcgattggaatgttcactcctattttcctaaaatatccagtgaaccatgaacctaaactctacacctgaggcaaaccgggagttgctattttaacacagcacagcttagaaaacaatccacacatgttctgtgacttgggccagccccagagagattcctggcagcattgcatgggtgactaatattcacagcctctctgagggtgaagggtatgctattcacctgtctgccaccactcacttcaatatgctttgccatgtgggatctgagaggagtctttttctgggagttttaaatatcttttcaatggggcttttaagatacttataagtactgttttctga

SEQ ID NO: 725758 - DNA, 620 bp, Homo sapiens
tagacctatggcctcccagaaaacagctaaattagcctcttctctaatgtaggcccagggctctggctctatcggggattccaaagtccctcaacaccacccctgagcttaccctggagagtaatgttttccaggcattcacatcgaccgagagcttaaatatggttcttctgggagagggccaggagacgggatggccattatcagcaatctgctctctgcggagtctgagccatgtgaacaaacaacctcayacactacgagtggggagagaagcgattggaatgttcactcctattttcctaaaatatccagtgaaccatgaacctaaactctacacctgaggcaaaccgggagttgctattttaacacagcacagcttagaaaacaatccacacatgttctgtgacttgggccagccccagagagattcctggcagcattgcatgggtgactaatattcacagcctctctgagggtgaagggtatgctattcacctgtctgccaccactcacttcaatatgctttgccatgtgggatctgagaggagtctttttctgggagttttaaatatcttttcaatggggcttttaagatacttataagtactgttttctga

SEQ ID NO: 725759 - DNA, 662 bp, Homo sapiens
tggtcttaactcattgctcccctaagctgaatagggaatgtcaggcagctgtccttcatgccactgagattctcctgcctgaggccccaaccttccagaaggttcaggtggctggggccttccagggggagtggctgggtctgtgaggtggcccatggatagagctggggtaccctcttcctcccacctctctgggatctgcctgcactgtggacctggtcatgtcctggggtggggktgcagagggcaagtggggataccaggggaagaagaaatgtcacttgagctgtggcagacactggagggccaggccctgcacaacaaccactgttaccatggaaactcccaaggagaccgccgaaggccactagaagcagccttggtaacattcttccatttctgacctctcattacatttgacataactgaccaatctcattctggagacttctccttcctcggtttatgtgacatgaaccctcttggttctgctcctctcaccctgagtgacctctgtcagcctcttttgcagacacttacttcactctctcttcattcactcattaatcacggttacaaaaatctggtcttaggatccctgctttcttttttttttttcttttttcttttattttgttattattatactttaagttttaggg

SEQ ID NO: 725760 - DNA, 1254 bp, Homo sapiens
aggcgtgagccattgcgcccggcgttgtcagtattttttaggtataataatatctcattgtgattttcccaggatatttgccatgtggtgtgtatttacctgataatttatgaagttgaaaaccttttcatatgttcattggctatttgtatcatcatgacttgtttttaagaaacatctttttctgtcctttgaatattaagttgctccacaaattttgtctctggtggtagctaatttatagtgctgggttttgtttttattttttttaccttgttgtactagattatagtaaagtagtttttatatctaaataactatttgaccaaacttgtgatttagaattctaaacccatttgtggaaatatgtgctattctggttttttactcacccaccggtgtttttttcctgtgcaaatgtcagcttagtctttgacagggatgagtcttaggtcataggaagagttgcrttcaaatattttaacctcttattcagaagactaatacacatacttttcttagactgaacagtctttctgtatttcagccttgccaagtgagagtgctttagcttcttgattttagaatttgtatatccttattgaactatcttaagtttcccactttcaaggctgtcttaataggagtgcatgagctcttatttaatgtggtatttggtatttcttatatggtaagattaaatgtggggccttaatagccgtatatgttttttcttatcctctctcagactctaccactcattttagccattctgtatactacagaaagtgtaaaataaaacatgagagaacacactgtccctggcttgttggcatcagagcagccagagagttcctcttaaatataggtcagattgtgtcttctgctcataactttcagtggcttcttatcttagattaaatgccaagtccttataatggtctacaaggctctgcatagtctggcatccatttcttctttgacctcatcttctttctcccctcctctcatttctttctgttggtttctgtgttgttcctcagatttgtgaagtatatgctgactgtggcaaatttgaacttgctgttctgtctctgttttactatatattttacttattaatatattgtgcctcctaacttgagtatatgcctcatgagggcaggggtttctgtttggttcactgcgatatcctcagtgcttagaatagtgcttggcacatagtactggcaaatattgttgaaagaacatacg

SEQ ID NO: 725761 - DNA, 1510 bp, Homo sapiens
gtactgaattttcttttctccacttgctcctcaaagacagccaagaagtttaggaaactgaagtcaaattttgaaatactgaattgtacacttggaaatgaacatatggctaatgttaagataattcaaaccacagaccagtttgtctacagcctaaatagaggaataaagacacgaatcactccctctgaaacatgaatatccacatatagtggacatggaattccctacatggagtatttgtaggcaactgaaggcataaactctggcttctcttgatcccatgtgcagctctctttgaccaactataaataaatatgaaggtctggaagaaaasgataattcataatcacaaaaaagctattaggaaggccaagccaacaaaaatgtcaagttcttaaatattttgctatagtagcagtaggaactattgcaaccttattgtatgccactaaacttggatgcacatgggaaaaatgcgagcagaaaaggtgagaaaaacagatgctgtggctttaaagaaaggctactaaagtcaatttaagtgcagttagaaaaataagaaaaaaaataactgcagtgacaggaactgtctaaaacttatgatgtcgctaaactgaaaaaattttaaacgtgtatcttccccagcttacgctgatcatttttgctcatttgcatgtgtttaaataatgccaacaaaaactaaataatattactttaggttgatgcagaaaggctccaacacaaagctaaactaatcttaggttgtcaaagtcattattatcgagttagacacaataatttctttttttttcttttttgagacagagtctcgctctgttgcccaggttggagtgcagtggcgcgatctcggctcactgcaagctccacctcccgggttcatgccattctcctgcctcagcctcccgagtagctggaactacaggtgtccgccaccacacctggctaattttttgtattttttagtagaggcggggtttcaccgtgttagccaggatggtctcgatctcctgacctcgtgatccacccgcctcggcctcccaaagtgctgggattagaggcgtaagccaccgacacaacaatttcttaaaaatccaaagatcaaaaacatcaacgaccactgctatataattttcatctcacaatgaaaaataaagttatatgtaaaaaaaaagggacaaatgggaaaccattttaaagaaatgggtagctgctttcatgtctaactacactgggctaactacattgactttaagaccagtcctcctgcgaagtctataactaatgtctaaaatcacagatcattaaaaaaatacctgcaaacattagtgatgtcagcaccagaatagccctcaatcttctcggctatatcttccagttgaatatcaggatctaattcgacctcacgaaggttgatcttcagaagctcagctcttccttttgctgttacaagattttggtggtgttgttagatgttttactttacaaa

SEQ ID NO: 725762 - DNA, 2827 bp, Homo sapiens
tcgccacctcctctgtgtcacactgccctgcctccccccagcctggggctggggcacctgaaggggaggcacaggtggcctcctcctgagcctgagtcagcagagccccctccctgagacctgccttcagcccttcccctgccggacccaactccagttaggcaggagcgcctccccacagccccctggtcctggaggccatagctcctggctgatctcctgggccctgataccctctccttgcccccagtcccctcccatccagccagaaccatcttcccagagcacagcacagcccactttccctaaacctacccattcaaagctctccgactcctaaccccctttctggctttcctctgggggtaccgtgagcctgtgtggatgggctccatggctttccccactcctctctgcacctgggatgccatggcctccatgtcacctgagatacttttcaccctgtgggtgggaagtcagggtctacccagcatctacgggtttatctcaaaatctgcctcctccaagcaaccctccctgattgctattcctgactaagactgctccctctgatggacctcacagcccactgtctggctgctggagcacctggtatgatggtcatttctgcaaccatctttcctcccatccagtgaggaaacttctggagggtggacctggagcctcagtcctgcacacagcccagcacagtcctggcaagcagccagcattcatcaaaatgtcaagatgaaccaaaraagaggctcactggatggcgggtggtgctgaccagtgctcaggccccaggccagaggacagatgagaaaagccaggctgacatcacatgaaaccacagctgcttcaagaacccagacaggcatagcattatacatggactctggagtcacacagacctgggtttgaatcttgcccctcttgcttcttgtgtggccttgggcaggttgcatagcctgcctggcactccgtttcctcatctgtgatacagggatgggttgtaatgccacttacagagtctttgtgaacattaaattagataatagacacaaagtacccagtatggttttggcacatgatacctgctcaggaaattaactcttagaatagcatgtgaatcccctagttcaccttcccagtgattctaaaagttaacaacttcagagtttacatctgttatctccttaggagcagagattcttataatcctcattttacaagccaggaaacggaggctcagggaagtaaatgtttttgaaccagggtattcagctaaggtaagggcaatggttagcatgggctccatcttggactctggggggatagtgtgtggagggaaggggcaactccctggcagctgccaccacagtgacctgctcccagtcctcttttgctgacattctgccctgggagttaagtttcagctgactctgggtagaccctgacttcctgccaggccaggctgggattcacatgagtagccaatcccagggcctggcccagggccactgccaagcctgctgcatgcctttgttccatctgctctgcccctcttgcctccagtggagcacagtcagcaatggctaagggagggcgcataaggggtaggggtggggagggcctgagaatgagcgaggcagcagcaagaccaccggcatgcgagagatgcaaggagtccaatgcaggaaatgcacgtgacacggctgctgccagctcatgtgactgctttatataaattagaaaaaagtgccctctctgggtgaacaaagccccatactgaggcacacagcttggagagtggattctgggttgaattttgctctctgctacctcattgtgctgtgaacaatatgcacgaccatccagggcaaacttacttaccaggcactcctgaagggccaggtcctgagctgggcactgagataaggagatgcctcagacatagcaccagcttctgggaagctcaagggaagccaaggtgctaggggagcccagaggaagaggtatctaactctctttgggcagaggtttggaggagctatggcagactagtgggagaagacagtagtaacctggctctcaaagaaaaaaaaaaagccctgatgcatggtgtgccaatttgccaatttccatagtgtaaatactcccacctaccatgagcaattcaaggcaccaatgtgccatcgctggtctcaggaagagatatccacaatcagatcttgcaagctggttcaagctgtctctagaacaccactaagataaagtgaaacttcaactaaacccagaaggcagagaagagggtagaggcaggggaggacattccatgaggagggaaaggcatggaggcatgagagtggggagcaagttgtgaatggttttgaaagggttatggttgggaagggacaaagtcttctggaggttggtaatgttttcgtttcttgacctggacaggggttacatgcctgttatgattccttaagctgtgcatttaagttttatgcacttttctgtatgtttgccatgttttacaataaaaaagttaaaaacttgtgatagtctcactcaggtataaccactgtttagaattttgtaatatttcattccaatctttttcccatgcatacatttatacaaccattcagcaaaaattttcatgtagtggaaaaaaaaaaactgagtccccattcataaaaaagaaagcattttaacatcaaaagcaacatgctgcagtggaataagtgtgagttttagagtcaaagagacctggattcaaatcctgcttcctaaatgctgaccctatggccctgaaaaa

SEQ ID NO: 725763 - DNA, 1552 bp, Homo sapiens
tttcatatttaaattataaatcatcattgaacatttttattgataagtaaagagaatgtcaatagtaacaataactatagtgattatcattattatgtgccccataattcacacatcttattataaaaaatacatatatattgcaaaaatacattataaaatataatacgccctttaagtagtttcgtcattaagtgacttggaggtggttggagacttaagtagtggctaagatggaacttaaaagcaggtcccatgttctgccttaaaaaagttctgggcatggtggctcatacctataatcccagcattgtgggaggccaaggctggaggctcatgtgaggccaggagtttgagaatatcctgggcaacatagtgataccctgtctytacaaaaaataaaaaacaattatctgggtgtggtggtgcacatttgtagtcccagctactcaggggctgaggtgagatgattgcttgaactcaggaatttgaggctgcagtgagctatgattgggccactgcactccagccagagaaaaagcctttctgaaaaagaagatgaataaataaaagagaagaacaaggaggaggagaaggagaaggagaagaacaggaggaggaggaagaggaagaagaagtggcggtggaggaggaggaggacctctttttctgattgggaaatgatgacttatattttaaaattaaatgaaggacttaataaaatggcatattatgacccatagacaacttttgaaagctgagaatgaggtaaataatgacttcaaatctactagtttatgtaactcttccacaatttgactttggttaagagtgttccagtgaagcacttgaataggtttgtagaaactctcattgccacaaatggaaaaaatagtccaaatgcatattttaataacagcagttatgtaagtgaaagattacatgattaatttgtaaataaacactattcatttatgagtagataaattatgaatagataaaccacattgtgctaggtgtaggtggtagggatgaataaggtattttgtctgccctcaaagactgcattctagtaaaatgaagtgggactgaatatgctcaccttatgcccaggagccaggtatatatgaatggcaatgcacttagagatcgtatgatgcctttggtactggaatctgtaaaagttttcgtgaatggtaaagctggatttaacatttactaggttaacagtagaagcagcagcatgccagggctgccactgggcaggtaactaacactggaggaagtacatgatctcaaaaagcacctctggatgtaaacttgatgaaaggtaatgacaagaggagaacagagctatacgagttcagggacaaatcaaaggacagaaatcaaacccatggtggaactgttgggaattctaatctctcagtgggcacagaaaaaaaatcagatgttggaggttctgggataaagagtcagaaattagatgggtggttgtatgctgtgttagttgcacatgtggtctcttatcaggaacatggatttattgtat

SEQ ID NO: 725764 - DNA, 1552 bp, Homo sapiens
tttcatatttaaattataaatcatcattgaacatttttattgataagtaaagagaatgtcaatagtaacaataactatagtgattatcattattatgtgccccataattcacacatcttattataaaaaatacatatatattgcaaaaatacattataaaatataatacgccctttaagtagtttcgtcattaagtgacttggaggtggttggagacttaagtagtggctaagatggaacttaaaagcaggtcccatgttctgccttaaaaaagttctgggcatggtggctcatacctataatcccagcattgtgggaggccaaggctggaggctcatgtgaggccaggagtttgagaatatcctgggcaacatagtgataccctgtctttacaaaaaataaaaaacaattatctgggtgtggtggtgcacatttgtagtcccagctactcaggggctgaggtgagatgattgcttgaactcaggaatttgaggctgcagtgagctatgattgggccactgcactccagccagagaaaaascctttctgaaaaagaagatgaataaataaaagagaagaacaaggaggaggagaaggagaaggagaagaacaggaggaggaggaagaggaagaagaagtggcggtggaggaggaggaggacctctttttctgattgggaaatgatgacttatattttaaaattaaatgaaggacttaataaaatggcatattatgacccatagacaacttttgaaagctgagaatgaggtaaataatgacttcaaatctactagtttatgtaactcttccacaatttgactttggttaagagtgttccagtgaagcacttgaataggtttgtagaaactctcattgccacaaatggaaaaaatagtccaaatgcatattttaataacagcagttatgtaagtgaaagattacatgattaatttgtaaataaacactattcatttatgagtagataaattatgaatagataaaccacattgtgctaggtgtaggtggtagggatgaataaggtattttgtctgccctcaaagactgcattctagtaaaatgaagtgggactgaatatgctcaccttatgcccaggagccaggtatatatgaatggcaatgcacttagagatcgtatgatgcctttggtactggaatctgtaaaagttttcgtgaatggtaaagctggatttaacatttactaggttaacagtagaagcagcagcatgccagggctgccactgggcaggtaactaacactggaggaagtacatgatctcaaaaagcacctctggatgtaaacttgatgaaaggtaatgacaagaggagaacagagctatacgagttcagggacaaatcaaaggacagaaatcaaacccatggtggaactgttgggaattctaatctctcagtgggcacagaaaaaaaatcagatgttggaggttctgggataaagagtcagaaattagatgggtggttgtatgctgtgttagttgcacatgtggtctcttatcaggaacatggatttattgtat

SEQ ID NO: 725765 - DNA, 633 bp, Homo sapiens
cacagaggacaagaataattccttgatttttggttttgttgttttcatggtcttaggaattcacaaaatcattagaagggaaaagacagtagattcatagcaatacactgtattttaacaaaataaagatgccacaaacttcatgccaagggaaagcaatgatatttctagtcccattaatcttaaagctctcctattaatttcaagtccagggaacttagctaatacattttccattgataggcactctaaatcgctttcatatatatgctatggtgatgaacatttgtctttggaaattgggagagctttggtggtaaataagaaaagtcttcatttttttcttttttgaggcaaactgatgactctgagaasttagtgcctttttctttcttgtcacaccccaaagacttagccgattgattattagaaattaaaaatgtcataactatatctatcttacagccaacacagttaaaatgaacaaaattaaatagaaattacattacttcttggggccctaaacattcccctactccttttctcttttttccaccactggaccttgctatcttcactccactgttagctctaaaatgttgaaactagatgatctctaggcccccttccagg

SEQ ID NO: 725766 - DNA, 3664 bp, Homo sapiens
gcatattaaacagtagtaagtctagcacatagtctcagccacttaaaacaaaagtttttttgtttgtttgtttgtttgtttttttgagatggagtctcactctgttgcccaggctggagtgcagtggcgtgatctcggcttactgcaacctccgcctcccgggttcaagcgattctcctgcctcagcctcccaagtaactgggacaacaggcgcgtcccaccacacccagctaattttttatacttttagtagagatggggtttcagcatattggccaggctggtctcgaactcctgaccttgtgatccacccgcctcggcctcccaaagtgctgggattataggcgtgagcccctgcacccggccaaaagttgatttttaattacataaaaatcgtaaaaacttctagtaaaaacttgatttggtgaatacagttatatttwaaaaccttaaggtgacaagcattttctatgcctaaatcttcattggtttgcctggaaagagtctctgttaaaagattttccatattcaaagtaaaaggaaagatttcttgctttctaattgtcttttggacacatgcctattttctttgaggtataaacctttagatgtgaaaaatgtaatttcattctgctattgtgtgtgcttgtgtgtgtgtaattgaaaaaactgggaaatcctgctttgttggtaataaatcaatatttttatattcttttggtgtatgttattttaagtgagaactattttttatactctgaaccttattaagagtcattttggttttcagatttactaaaaaaaggtctgttaagtacccacatttacaaaatagtgttcagcagtctattagtgttcgaaagggtagaaaatttagtcccttttctgcctgcagtgaaatcacagtctaatagaagcaataaacactcatgaaaaaaaggtttaaaccatttaaagaagccaagttacaaggccgagtattcatcagagaggctgcaacataggttaactgtttttatgtttaaacactatgtttgctaacatgcccaatagccaattttcacttattactccttacattaagctactatataaagtaatttttttaaaatatatttttgagtcaggcagactttcacttacaagttacttgatagtctcatcattggtgaaatgagaatcatacctaattcacagagttgttgagaggagcaaatgagatcggggcctattgggacacatagcattatagtgagtacattattaatgtttatgtatcttctcatattttaaatcttgaaaaatgtactgtgaattttatacacccaggtctgaaaattctaaataatgtgaaagtagagattattttgtagtctattgataaatagttcaaaggatgccaatacctacagactgagcattggggagtgctgatagttatttttatagatcttgttaccttgttaaattcaaatataagttagtcagatgagcttctttaaagatattccatctcattattttatattgatatataatttggaaattttataattaatagaatttgcacatttgggagatatgactatgttgacaatttgggctttttatttccaccaaaaaggttaggtatgggggattttatttattttttaatgttgaattataactttattgctgcaaaataaatgactggtgattggctggaagatttagatattttcaaaaaagccagctttgtataatcccaaagagagagagcaggtctcctctggttagcttcattctaagctgtgctaagaggacttggtgaagctgagggcaacctaaaaacagctctggccctggccctggccctggccctgcctttatcagagaggctgcaacgtaggttagttatttttaggtaggtcagaaacacctgaaagacgttctccttccacaaatagtaccttacctgtctgaccatgcttttgttagtaaactttaatttccttttgcctgaggagactgttacacgctcttggcatccagggtcatgcgtttagagtgaaggttgaggggaaagggtgccaagagggtcacttgaccatttctgccaaatttaaggagtgggttaatgaattccagtgcaggaaagatttgggacaagctgcccaatgaatgttatgatagaatggtaaattttacattcctttcatattatttagaatttattttaaaaaagagatgaggtcttggtatattgcctaggcttgtctcaaaccagcctcaaacctctctcggcctcccaaagtgctgggattacaggtgtgaggcgctgcacccagcctagaattttagtcccagtgatctctgacagtgaaattctgtaccatcagagattagttgttagatttaggagggaccttctgagtgatttaggccatccccttcttttcagtcaggaatcatggaaagaagttatttgataagttttttgtttgtttgagacagagacttgctcttattgcccaggctggagtgcgatggtgcaatctcggttcactgcaacctcctcctgggttcaagcgattctcctacctcagcctcccgagtagctgggattacaggtgcgcaccaccacgcccagctaattttttgtatttttagtagagacagggtttcactatgtttgccaggctggtctcgaactcctgacctcaggtgatctgcccgccttggcctcccaaagtgccgggattacaggcgtgagccactgcacccggcccccagcccctaaaggagatttttttttttttttttttgctttataagtatttaaatctacattgtcatatataacaactttgtactgttgatggagaaacagggacttaaaaatgttgtctttcaagttctttttttattctttttctttaagactgtttattgctttggttacccaggctagcctcaaactcctggcctcaagctatcctgcctcagcctcccaaagtgctgagattacaggcctgagtcactacgcccgggctcaagttcttactgttggtaaatggcagaggtgagactgaataaccaggtccaatggattgttttttttcttagaaaataccatcatgccttgctatcaaatatcaaactaccttggctttttgagtcgttggagttattacataagcagtccctacttctgtaattaacttccttgtgggtaagatactgcttctccaatacgcccccaaattagggtacagatttcttctactgtaacaaagaccaaaatataatgtatacaagatagtttattattaacagaacataagcatgctggggctgataggccgactcctctctcaacttctgttggttgctcttctctcctcaggaacctgtgtgttccctctcatagtccaagatggctgatttagttcttgccaacatacctgtatccaaaccatctaaaggaataaagagctggcactgtagcttatgcctgtaatcccagctattccggaggctgaggtaggaggatcacgaggccaggagttcaagaccagcctgagcaagatggcaagaccctgtctcttaaaaaaaaaagagagagggacaaagggagactgtgaccacttcttttaagagcatgatctgcaagaggtacaca

SEQ ID NO: 725767 - DNA, 703 bp, Homo sapiens
gatgagagatatcaagaattcgctgctctgccagggcagcagccacaaaggccaccccaaatcaacccaaattgacttctgggtgtgaccccatagttgggcaggttaactctcatacaagagctagtggcttcatattgctgttctaaaatatggcatttatgcatgactgcattggtattgcagaataaataagtgaataaaatatcacatttacattgacttctgggcatttccttttttctccctytttttagaagtgtaatatatactccttttgtagaaaacttagcataatatagataaggagtataaatttaaaattatccctagtcttatgtgtcaaaataatcacggttaacattcttgtgtagtatcctttaaatccttctagccttttttttttctgagcacatatacgtgttttaaagtgagactatactgggtaagctgctttttatataaatatattgtgaacatatttttatgtcatttctcaaagtctgattttcataatgtctctaaaaacaaacaaactagggcaaaatgaccatagtcaagtaagtttgtgcgattctgcatgctacgtcagcccctgggatatgaatgatgcatactggatcacaacaaagactctgcaaagaaattcagtagagaaacttggttcacctcgcctacgtatcccacacttatctaatcatag

SEQ ID NO: 725768 - DNA, 842 bp, Homo sapiens
gggaattagtgtaataagttgtgatctatctacaaagcagaatccttgcagctaattacaatgaacacacacacacacacacacacacacacgctcacactatacaatgatgtgtaaaaaggtgttcccaaaatactacattgggacttctggctaaatagggtaagttgaaaaaatgtttttatttctgcttccccctgaaaccgcactaaaataaaagggataaaaatgcataaacccacaaggcaaagtgaatgtgagaggagatgagagacaggaatttgggagaagtggagtgaggataattaattagagcarctgatgaagatgagcattgtgagccagcagaggggatgctggcaatgaactccacagcacagcaccccaggaagaggtaggagcttggagcatcacctaccaagaaatatgaggttgaggcatggggtcgaaggaggaggatttgtttggtcactcattcaacaattgtaggacatctgctgtgctccagatttctgctttcatggagcttacattctagttggagagacaaatgaataagtgaaacatataggatgttagacagtggtgagaaccctggagaaaaatgagggagggaaaaggacaggaaatattacattggaggagtgcaattttagagaggccagggaaggactccatggaaggtgacagatgagtcaagacgtggaggaagaaagggagtgagccattcagaaagctgagtacagactgttgcatcagaggggacagcaagtgcaaaggccctgagactggaatgtgtctggcgtgtttgagggacagtaaggaagaaaatgtggctggcg

SEQ ID NO: 725769 - DNA, 584 bp, Homo sapiens
cggggctgggcgcagtggctcacgcctgtaatctcaacactttgggaggccaaggcgggtggatcacctgaggtcaggagttcaagaccagcctggccaacatggcaaaaccctgtctctagtaaaaactaaaaatataaaaattacctgggcatggtggcccttgcctgtagtcccagctacgggggaggctgaggcagaagaatcacttgaacccaggccaagatcacaccactgcactccagcctcggcagtagagrgagacttcgtttcaaaaaaacaaaaaacaaaaacaaacaaaaaaaagcaagctctatgcacctgggtggggcccaagggtgaccaggccgagactggagatttcattagagggtttcaaatctcaaatcgtggtccctgtagaccttgtccccatgccaagtggtttccccagaaaagaattctctagtctcctgacctggagagggagggagacatgggaacagcttgaagcccaactgcccacatcccgtaaacagcgtgggaagacaaggtgggaatcccaccctttaattctttaatttgttttcctcccagttttagtc

SEQ ID NO: 725770 - DNA, 1792 bp, Homo sapiens
  misc_feature 978, 979, 980, 981, 982, 983, 984, 985, 986, 987, 988, 989,990, 991, 992, 993, 994, 995, 996, 997, 998, 999, 1000,1001, 1002, 1003, 1004, 1005, 1006, 1007, 1008, 1009, 1010,1011, 1012, 1013, 1014, 1015, 1016, 1017, 1018, 1019, 1020: n = A,T,C or G
  misc_feature 1021, 1022, 1023, 1024, 1025, 1026, 1027, 1028, 1029, 1030,1031, 1032, 1033, 1034, 1035, 1036, 1037, 1038, 1039, 1040,1041, 1042, 1043, 1044, 1045, 1046, 1047, 1048, 1049, 1050,1051, 1052, 1053, 1054, 1055, 1056, 1057, 1058, 1059: n = A,T,C or G
  misc_feature 1060, 1061, 1062, 1063, 1064, 1065, 1066, 1067, 1068, 1069,1070, 1071, 1072, 1073, 1074, 1075, 1076, 1077: n = A,T,C or G
tttatattttatatgactggctcccctctgaggccggaggcttggctgccatcaaattcaggcctccctgggtcactgccctgcggggcccacatagcaccacataagtcagttaaaagttggatagaaatctgcattcttacttgttaaggaatcacagggcagaatctgggacttccacagaaattgaaaagtaaaggaggaaattccgggaaggagaactccatggaggatatgttccgaattctccacccaaacttcaggctgttttctgaactgtgaattcatctgggaggctcctggaatcctaactgtggctaaaatarctgaacagagatttcagctgctgtctaccagaggggagactttgaagtttgagttcagccaagttaactgcctgctaaaataaaaagccgacactcagaagaacataataaaatccagagtctctacaacttatcattgacagtgtccaggatacaatccaaaactactagatatatgaagaaacggcaaaatgtgagccatattaatagaaaaggcaatcaatggagaataaccttaatgtgacctagatgttagaattaagagacaagaatttaaaagtagctgttataactatgctcaaggacatgaagaaaaatatactagcaatgaatgattaaacagaaaacttcagttggaaatagactatacaaatgagcaaatgggaattctagaaccaaaaaatacaatatctgaaataaaaattaactggatgagattaaattttatgtagtcaaaaacgattatttctttatagattctaggtttcttgtcacaggtaaaagtgccccctacacactgcattatacatgtattcacctaaatttttttctaaggttttatgttttgtttttatatttaagtcttattaacccattggagtttaaatttgtgttggtttgaaggatccaacttcatttttttacaatcaannnnnnnnnnnnnnnnnnnnnnnnnnnnnnnnnnnnnnnnnnnnnnnnnnnnnnnnnnnnnnnnnnnnnnnnnnnnnnnnnnnnnnnnnnnnnnnnnnnnttggagtttaaatttgtgttggtttgaaggatccaacttcattttcttacaatcaaacagctgctttttgctagcattatttattaatttttttcttaatgaggtaaagtatttattatgtattaaattttcatactaggacatatttctgggttctttattctgttccaaagctttctgtgaatccactaattctatgccaataccatgttgttggattctagtggctttatagtatattttaatatctataaggcaaggcaagatatttccctttaaattttttttggccattcttagacattattcttttacatgaactttattatcatttcatccaattaaaaatggttctataatcagatggtattataatgtaactcattataatgagttataatggtactataatataattcattacatttatacattactgttgggagaattgacattttatattaagcctttccctccaaaaatatggtatctattttccagtttttcatattacattttaaagtttttcaataaaatttcataattcaataaaattgaggtgaactagagactttatttttatatatttcttattatttgaataataatagaaaacttttctgtaaaccttttattttaagttcaggggtacaagtgcaggtttattacacaggtaaacttgtgtcatgggggtttggtgtacagactatttcat

SEQ ID NO: 725771 - DNA, 1246 bp, Homo sapiens
tcttctgctgaggtccaccatacgacaggcagggcagaagctttgagtgacacctggctggtggctagaaagcaacctcagatgcactcagtgatgccgaccatagcaggcagcaagctacatggaggccaaactccagcgccttgcacaaagcctgatgcatagtaggtgctcaataatggtcagttgctgctaaaactgtttatctttgaaagttttgctaagtaaggtagaagattttccctctatagttaaaygaagagaaaatgagcaattttatgctaactgtgcccttaaaatattagagaaaactgttcttagacaggggtgcaaatttcaaaggatcaggggctatgcaggtaagtttcatgagccagtcaggttggaggccagtgctgggaagatgagggggccagtcaagctcgctcctactgactgttacatccaagttgtcaaaacaggtgggacatcagaatttttaaagatgagcaactattgtggccagatggtgtttgatctctggttcaacctctgtttaaacactcctcccttcccctacccagccctctctatcttgttacacccgtttggaacagaaaagatgtttttataattagcatagtgtttatattccaatgggagcattcaaaaggcttaaaaatagaatgattccttacacaccttagagctcttcccctgaagatcttctttacactagcattttccctagcaaatcttttggaaaggtcaactgcagtttacaaaatcataaaccggcaactccgaatgattgggattttgttgcatacactgaggcaactttaaagtcccacccaatgggttcttctgcttcagtgcttagtggctctgagattaatggctctacagagaagcgcacgtgaggagagccccaaggtgcctatatcctgcgtcttgaaggcctggctgccagagggaaccaaaagaggctcttggaatttggcaggcctctgggatcctggaacaaacatggactttggtttaaggaaacccgacttagaagacttagacactaccttgctaagggccaatttatcccatttacagaaagggtgttctcatcacagaaagaaccgggggagcaaccgccttaaaaagcagctctctcctggggtaataactcagtgttcatgtctccttatattagccagcagcatgttaaataaaaagtgtgcttagagggggaaagggtggtccaggttggggg

SEQ ID NO: 725772 - DNA, 881 bp, Homo sapiens
ttcaagggcagggaacagtcctaaaacctgttaaaattcaaatacttggtcactgtatgtgcagcatgtgtgttctagaaagtcctattattttaaaatataaattgaatcttgttgagaaattaatgtcatatgaatatattaataactgaaatgctgccaagtttacaaaaagccctcaatgaaactgtgaccttgtatagacaagggcctgtggagggacatttttaaaccatctctttttttatttcctcatgagatctacaatgtaagtgcattaaagttgatgaatgaattgcagtgcaacttttcctgcctcttttgcctttcatttgtctatatttcaagcttcactgaagtgatagattttgggctttgccacattgtcctctgattgcttccctctgctcctccttttcctagtgaatctttgttttactggtggaaaaatctrcatctttgtatcttggcattttactttcacattatctcatagattttatttcaagttgctataaagttatcaacttttatttttaactaatattatttttaacaattagaaaattgttgaccaggtaattccagcactttgggaagctgaagcgggaggatcacgtgagcccaggagctcgagaccagcctgggcaatgcaaggagactgtctctacaaaatataaaaatacattagccaggtttggcggtgcatgcctggggtccagctattcaggaagctgaggtgggaggatcacttgagctggagaggttgaggctgcagtgagcagtgatcgcaccactgcactccagtctgggtgacagagggagaccctatctcgaaaaaaaggaaaagaagaggattttgctggcaagatggctgaata

SEQ ID NO: 725773 - DNA, 952 bp, Homo sapiens
ggtaagtgccctgaacaggcgtaccattttaaatcttttataccagtacttttattgtaccttttctatgttaaataggtttagatacacaaatacttttcatcattttaacwgcctgcagtattcagtacagtaacatgctgtaccagtttgtagtctaggagcaataggctatgctatagcctaggtatgtagcaggctataccctctaggtttatgtaagttcactctacgatgtttacacaaatatgaaatcacctataacacatttttcagaatgtatccccatcattaagtaacacatgactgtaccactctgacatatgaatatcatgaattattaaattccattaaattatgactaagaaaattaatgtatctgcatgaagaatctatgttaaataaaaatatttttaacatttatgtaaataacaatgtcacttaaagtcaattatgtctttacagtaataagaattgggaaaggcccagctttaggatgttttgcttttaagtcgactttaatgtataattaacgtgcagtaaaatgtacctatttaaaaggttcattttgatgacattctgcaaatgtatatgactatgggaacactatctcaatcaagacctttccatgaccccaagaaattgcctcatgcctctttgtagtcatctcccccatcacccccatccctggcctcagtcaactgctggtctgctttctgttaccatagattagttttgcttttctctagaatttcatataaatggaatcatatagtacgcactcttttgtgtttggtttctttatttcagcataacattatggatattcatatattctattgcatatatcagtacttcattcctttttattgttgaacatattcactatgtggatatactgcaatctgtttatgtattctgttactaatgcacttttagactgtctccagta

SEQ ID NO: 725774 - DNA, 2072 bp, Homo sapiens
  misc_feature 694, 695, 696, 697, 698, 699, 700, 701, 702, 703, 704, 705,706, 707, 708, 709, 710, 711, 712, 713, 714, 715, 716, 717,718, 719, 720, 721, 722, 723, 724, 725, 726, 727, 728, 729,730, 731, 732, 733, 734, 735, 736, 737, 738, 739, 740: n = A,T,C or G
  misc_feature 741, 742, 743, 744, 745, 746, 747, 748, 749, 750, 751, 752,753, 754, 755, 756, 757, 758, 759, 760, 761, 762, 763, 764,765, 766, 767, 768, 769, 770, 771, 772, 773, 774, 775, 776,777, 778, 779, 780, 781, 782, 783, 784, 785, 786, 787: n = A,T,C or G
  misc_feature 788, 789, 790, 791, 792, 793: n = A,T,C or G
ggaccctgctaccatttggtcaatttaatattatgcaagagaaattccatttccctagtagttacacaatgcccgctttcagaccagctagtcaaccctgtgagggtcagatagagtagtttatccatttggttgtcagacaactgcctcgaacagccaggccatttctacatgttctcagttactggttaacaaatgttgccccagaattcagcacctaataggaaatacattcatttccaaattcctactgaaataggatttttctcattcctagataaaacagaggcacccagattttcctggaatggcattcagaaatagagaaggaatcatagagaaatgtctgcccaggcatctctgagtctcatgcctttttgctgttgctgctgttatgactcctaccttggaaagtttcagtcatccttgaacatcctccccacccccatgctttcctgtcttctgtttcataactaaatgccatttaaaactctagctatagataccccttgctgatataagcaacagaagtagagagtccttagattctagactgaatttagggcccaacagttagacaattggaacttgataataacgttatctcagcagattgcgtaagtcagaaatgttctccctgtcactgctttctttttccttccagcaagaagtggacattaaggagaaagtgaannnnnnnnnnnnnnnnnnnnnnnnnnnnnnnnnnnnnnnnnnnnnnnnnnnnnnnnnnnnnnnnnnnnnnnnnnnnnnnnnnnnnnnnnnnnnnnnnnnngcctgactatgctgagttatgatacaataaaggcaagttattaatattatcaccattattagtgtcagtcaggattgcaaacacaagtacatataaaagcaagctacggttcactagtcaagcatgcgctaaaaggctttatcgggcctcaacccctgaaaatctgaacacctaaatttaacaggagggaacttaacttgccacatcatggacatagcaacctgacaatgagcaacctattttggatgtagccccagggaaactttytcctatacttatgctaaatatcagtacctctaagaaataaaatgactcaaaactaatctagaccaaaaaaaaagaagaagaagaaaaataaataaattaaggcctggcacggtggctcacgcctgtaacgctagcactttgggaggccaaggcaggcagatcacttgagctcaggagttggagaccagcctgagcaacataacgaaatcctgtctcaaaaaaaaaaaaagaaaaaaaaaattagccaggcgttgtggcacgcacctgtggtcccagctacttgggggactgaagcaggaggatcacttgaacccaggaggatgaggctgcagtgagaccaagatcatgccactgtactccagcctgggtgacaaagtgataccccgtctcaaaaaattttctaatttaaaaggcacatgtatgtttagtgctattttttttttaaacctgcccatttataccaatttatccaaacacagaaatacacagactctaaaacaactttttggctacttgactgatagaaatcattattcaccttaattaactgaatgactggctattctgaaggttgctagtaattctatttgctggtgtaagcatttttaacataaacatttaagacggaatgctaaaaataccttaaggaatatataattgtgctattttatacagcaaagctatattttacgtggggtgcatgctctttctctaaatacatacgtcatctacaatataacctcattaattcaacatcaatttctaatgtgtcgctcaaataacttgctattcaccaacaattattctttaatttaaaatatatggtaattaaaacactaatgaattaaaagcacattctctctatacttcaaattgaccaggttttctagttctccgcaagcacaaaatacatcttttcattattcccttctagcttgcttccctcttgctactagctatatgataaaaattacaggctttgctcttaatttttcttatttatatttattga

SEQ ID NO: 725775 - DNA, 2072 bp, Homo sapiens
  misc_feature 694, 695, 696, 697, 698, 699, 700, 701, 702, 703, 704, 705,706, 707, 708, 709, 710, 711, 712, 713, 714, 715, 716, 717,718, 719, 720, 721, 722, 723, 724, 725, 726, 727, 728, 729,730, 731, 732, 733, 734, 735, 736, 737, 738, 739, 740: n = A,T,C or G
  misc_feature 741, 742, 743, 744, 745, 746, 747, 748, 749, 750, 751, 752,753, 754, 755, 756, 757, 758, 759, 760, 761, 762, 763, 764,765, 766, 767, 768, 769, 770, 771, 772, 773, 774, 775, 776,777, 778, 779, 780, 781, 782, 783, 784, 785, 786, 787: n = A,T,C or G
  misc_feature 788, 789, 790, 791, 792, 793: n = A,T,C or G
ggaccctgctaccatttggtcaatttaatattatgcaagagaaattccatttccctagtagttacacaatgcccgctttcagaccagctagtcaaccctgtgagggtcagatagagtagtttatccatttggttgtcagacaactgcctcgaacagccaggccatttctacatgttctcagttactggttaacaaatgttgccccagaattcagcacctaataggaaatacattcatttccaaattcctactgaaataggatttttctcattcctagataaaacagaggcacccagattttcctggaatggcattcagaaatagagaaggaatcatagagaaatgtctgcccaggcatctctgagtctcatgcctttttgctgttgctgctgttatgactcctaccttggaaagtttcagtcatccttgaacatcctccccacccccatgctttcctgtcttctgtttcataactaaatgccatttaaaactctagctatagataccccttgctgatataagcaacagaagtagagagtccttagattctagactgaatttagggcccaacagttagacaattggaacttgataataacgttatctcagcagattgcgtaagtcagaaatgttctccctgtcactgctttctttttccttccagcaagaagtggacattaaggagaaagtgaannnnnnnnnnnnnnnnnnnnnnnnnnnnnnnnnnnnnnnnnnnnnnnnnnnnnnnnnnnnnnnnnnnnnnnnnnnnnnnnnnnnnnnnnnnnnnnnnnnngcctgactatgctgagttatgatacaataaaggcaagttattaatattatcaccattattagtgtcagtcaggattgcaaacacaagtacatataaaagcaagctacggttcactagtcaagcatgcgctaaaaggctttatcgggcctcaacccctgaaaatctgaacacctaaatttaacaggagggaacttaacttgccacatcatggacatagcaacctgacaatgagcaacctattttggatgtagccccagggaaactttctcctatacttatgctaaatatcagtacctctaagaaataaaatgactcaaaactaatctagaccaaaaaaaaagaagaagaagaaaaataaataaattaaggcctggcacggtggctcacgcctgtaacgctagcactttgggaggccaaggcaggcagatcacttgagctcaggagttggagaccagcctgagcaacataacgaaatcctgtctcaaaaaaaaaaaaagaaaaaaaaaattagccaggcgttgtggcacgcacctgtggtcccagctacttgggggactgaagcaggaggatcacttgaacccaggaggatgaggctgcagtgagaccaagatcatgccactgtactccagcctgggtgacaaagtgataccccgtctcaaaaaattttctaatttaaaaggcacatgtatgtttagtgctattttttttttaaacctgcccatttataccaatttatccaaacacagaaatacacagactctaaaacaactttttggctacttgactgatagaaatcattattcaccttaattaactgaatgactggctattctgaaggttgctagtaattctatttgstggtgtaagcatttttaacataaacatttaagacggaatgctaaaaataccttaaggaatatataattgtgctattttatacagcaaagctatattttacgtggggtgcatgctctttctctaaatacatacgtcatctacaatataacctcattaattcaacatcaatttctaatgtgtcgctcaaataacttgctattcaccaacaattattctttaatttaaaatatatggtaattaaaacactaatgaattaaaagcacattctctctatacttcaaattgaccaggttttctagttctccgcaagcacaaaatacatcttttcattattcccttctagcttgcttccctcttgctactagctatatgataaaaattacaggctttgctcttaatttttcttatttatatttattga

SEQ ID NO: 725776 - DNA, 2138 bp, Homo sapiens
taggaatcttatgtggccttagatgcagaaaagtggctgtttcaaaatttcttcctggtttttgtgggcatcatgggttgagggctttataattgtgttcccttctttaaaagtggaaaggctgttgggcgcggtagctcacgcctgcaatcccagcactttgggaagtggaggcaggcagatctcaaggtcagaagttcaagaccagcctggctagcatggtgaaaccctgtctctactaaaaatacaaaatttagctgggcttggtggcgggcgcctgtaatcccagttacttgggaggctgaggcaggagaattgcttgaacccgggaggcggaggttgcagtgagccgagatcatgccattgcactccagcctgagtgacaagagcaagactccatctcaaaaaaaaaaataaataaataaataaataaaggggaaaggctctgggggactgccaattccccagatagaccactgtttatcagcaaagaccagtttttactgaccaaatatgggagagtactgccttgaacaagttttagtttgtcttagaaagaggaggtccagggtttgggggtctggattccagtgttgcaggcaggttttgtcatctgatatcttaggattggtggacactgagaggctagaggcttggaggtagtcttcctaagtaaatggatgtttgataaagcaagagggtttttccagctgggcaacctgttgtcttaagagagatgatgtctacccagatgagcatccaattggcctgggcagaataaatgggttttcatgaagtgcctgaggttaacaatgaagttatttactggtttacagctttatcttcctgggcaagaattttctggaacaaatggtaaagtcatattggaccttggttcctagtccctgatcaccaaatttaaacaaccaccaaactcagtagcagcgtggaggagtgactgagccccaagaaaacatttggcaatgtctggggacatttttggttatcttcaccgggaaaaggtgcttctgacatctaattcacatagcttaggagtgctgttcaacatcttacatagcacaggacagaccaccacccctgcaacatagaattatccaggctaaaatatcaaaaaaatcaaggtaagagactctgacctgtaagaaaatgaagtttcactccgaggacatttgaagagggaaaggagaaacagggaccagagggcaagaaataaagttaggaaccatgaggggaccccctgggaaggggccaacttaaaaagaagtctgggaccgaccatatgactgagtacatcatattattagtgatgttttatggtcaatactgtagtaaagcatttgcctacatcattaaatattttttgaaaacatggcttttaatggtttaataatatcttcatgtatgcctgtaccataactttttaactaagtccttattttttgcaggcagagtgtttctgattttctgatgttgtcagccgtagagcaatgaacacttatcaatacatctttgtgaacatcaggttgtttccttaaattcttagacataaaatcgttacatgaaaggacatatatgttttctatcttttgatatatgttgccaaatccgttttcagaaagactccccaatatacatttccaacagaattgatagagggtccttgggatttttttttcaatgtttatgctaagggaccagtcactaccataaaagatttttctacctgatccttcccactctttcttccaaagaatgcatcaattcagaaatattgtgctactatggctgcctcagccttccagattccaattctcccttttatggaattattaagagtagttgaaagttgagaaagcaattacctccctaatgatatcctagaaatctgaaccttttagtataacgtcaaatgattccatttgaaaagagggaagaggaattgataagcacctaacataccaccccacctttcaaaatggaaaaagtaagatctaaagagaagatgctgctagtttcacagaaccaggggaaagttgaacctaaaatccaaattctttattctttatccagtgctatttctgctgagtccagcttccaaaaaatacarataaaaaata

SEQ ID NO: 725777 - DNA, 929 bp, Homo sapiens
tattctgttaaaatagcttgtcctctcttaactgctgctatgtgggccaaaaaggctagtattgcattgccaaccaagagggctaagccaaggcaaggcagtttaggccatccctttcagcgaagaaataacattttgtcttgaagatggtcctgccagtgctttccccaaccataagaataaaacatgcagagggcaggtaggagcagggtttgaaaagctagtactgtctctttagcaagaaagaaggctcctggtctctgagatccttctaatagatttgttgagatacagatcagatgggattatggaacttcctgcccataggccaattcatcagtggcaagaatgttgctattgttaagaagaaaaacacacacacataaaaatactgaggacacccaagccacaagatctgcagaaaagatcagaagtggtgggtgattactttgccttctgggaagggatggtttatgggtctcagaaaaaggaggtccgggtgccttcagagtagcctcggctgcaaattctaggcatttcagggtcaccgtcctggcagtggttgcctgtgctttatgtttctttatctcagtgaaaattagtgaaatgactgaggttaaaatgcagagctatgctcttgctagattcaactgggatgtacaggtatgcattaaagtttagttgcaataattatttaaaaaggggrgcagtcatatgcaaaatgaagcgatagtctctaccgagcttcaaacccatggaggcacataataaagatgagcaacggaaaactgtgtcagaggaaggctgctgactttggcaggcccccgggaaacactgaagtcttgtaacaggggtagagtgacgagtaaactataatgcaccctcctgggtctggggctgggagtttgccatccaaaggccaacactcc

SEQ ID NO: 725778 - DNA, 623 bp, Homo sapiens
tgccataattctactagcctcccctacattttaggttgcattatcactagcaaccatttctcagatacattcatagatattgttgctagttctcatcttccttctacaaagttagagtttaatctaatgctatccctttatcatcatcactgtaaccttcaccctctagctcagatgccattacctttgcatttaagatttcactttggaatcttgttaccttgcatcacaattccagtagaacgacttaacccaaaaaaggcaaaaaaaaaaaraaaaaaggaaactcttgcattggcctgaattaataatggagaaaggggagaagtctaatctttccagtgcagaagatgtgtgcattgtttgttgtgagtagcccttggggagggaaagatttcaagttcagcatttatgtggcacatttttcaattagacaatatactgtatggtatttcccttcctcccccaaccccgtctcttttattaccacatgatttcatctccccgtgtgactgacaaagcccattgggctcaacactgataaaaaacatctgtgggagaaaaattgcaatttagaaaacaattaagtacatcattttcttttcatttagttggctagagaa

SEQ ID NO: 725779 - DNA, 802 bp, Homo sapiens
tgagacagccgctcttgttgcccaggcgagagtgccctgacatgatctcggctcactgcaacctctgtcaaggttcaagcaattcttgtgcctcagcctcacaagtagctggaattacgggtgcacatcaccacaaccaacagatttttgtatttttagtagagacagggtttcgccatgttggccaggctggtgttgaactcctgacctcaggtgatccatcaacctcggcctcccaaagtgctgggattacaggtgtgagccaccayacctggccaagttttttttttaatgatgatctcttcacttcttgaagtcatcatcaacttggaaccttatacaaggaagtgataaaatttaaaaccatcttaactactacttaaaatgtataaagtgttagaattatatttaaaaatataatagctcttttctttcatggtcaaaatattgaaatttggggggaaaatgtgtttttttcccaaaagataacatattttcaccaaaactaatgaccatgggattccaatccattgcaagtatttcaaaataatgatggagtgctaactagagaatgcatgtacattattagaacagctaccttgcacctactttggatactattagatgggtacatcagctgcaaatgggcagaagtttctggtacacattaaagacacagacttgggactgctacctggagtagcactttccggggtcctgtgtcatacctccctcctcactcccacatcacccctgtaaccagtcatacctgtgatacttgaatcatgaagtgctctagtat

SEQ ID NO: 725780 - DNA, 802 bp, Homo sapiens
tgagacagccgctcttgttgcccaggcgagagtgccctgacatgatctcggctcactgcaacctctgtcaaggttcaagcaattcttgtgcctcagcctcacaagtagctggaattacgggtgcacatcaccacaaccaacagatttttgtatttttagtagagacagggtttcgccatgttggccaggctggtgttgaactcctgacctcaggtgatccatcaacctcggcctcccaaagtgctgggattacaggtgtgagccaccacacctggccaagttttttttttaatgatgatctcttcacttcttgaagtcatcatcaacttggaaccttatacaargaagtgataaaatttaaaaccatcttaactactacttaaaatgtataaagtgttagaattatatttaaaaatataatagctcttttctttcatggtcaaaatattgaaatttggggggaaaatgtgtttttttcccaaaagataacatattttcaccaaaactaatgaccatgggattccaatccattgcaagtatttcaaaataatgatggagtgctaactagagaatgcatgtacattattagaacagctaccttgcacctactttggatactattagatgggtacatcagctgcaaatgggcagaagtttctggtacacattaaagacacagacttgggactgctacctggagtagcactttccggggtcctgtgtcatacctccctcctcactcccacatcacccctgtaaccagtcatacctgtgatacttgaatcatgaagtgctctagtat

SEQ ID NO: 725781 - DNA, 1413 bp, Homo sapiens
ggagaaaagtgcaacaataatgtcagctacttctttttctatgattagaaatagcagtcagcaatcagagcacagatacttgatttttggaaggcaggatcctttttgtccacctggctcctggagactgtgaggaagctgctccagggatatgtgcatggtgctaaggagtcagggatgggtagctgctactgtgctaagttatgaaatggatcaacattaatcataattcatacttcaagccttcctgtggaagtttcaagcctacaatagactccagaatttcaaaacacttacatcaaattgctggtgcaattgttacctaagtagggaacagatttctggtgcttcttactttgccatctttccagaccctctctcctgtgccagactgttgctttttaggaaatagacaatgagccatctaggagaagatatatgtctggcagagagccaagtcagaatctcatggacacagcgaatcaaaactttattgattccctttccttgccatatatatatatatatatataaaattaccattttaatgtcattgaagagaagtgagcccctgagagccctgagagcactaataagtatgtggatttataatgcatttcatgaattctggtggaagtatggaacactgcttcttcataatttcctttttttgattcaacatgaatactatagtgacagtccccaaaacggtgaactaggcccttatgacaaggctaaatcagtaagagaaatacccacaatgcattgtgaataaggacactaaaaataataatgtttacaagaggggaaatcaggtgataaaaatctacagaatgagattattatagtccaaagtactaaacatctaatcatgcttgcatttcatcccttggggtgtgtgtgtgtgtgwgagagagagagagagcgagagagagagagagatgatacacttttactctctataatttctgtccatacatcttccttgctccctaatatggaattcctatatatccttccaaacttgactgaactatcagtttttctattaagcctgtcaagatctacctgatccccatatctgactgaccacctccaggattcatcattatctctctcgtcttcatctagaacttttatacataatctagctggatctatgaacaggctgactttcagtattgacaaattgcatatctgcttgtcctccttaaaacataatggatatattacttcagtgcagatgtataatttatctttgaattcttagcacttcacagatacattcaataactcatttttcagtcgtatttcattttatatttgctgattttcatttgtcacttataattaatctgacgttttctgaatttctactaggaagcaagctgagtgctacgtatttattgttaa

SEQ ID NO: 725782 - DNA, 1413 bp, Homo sapiens
ggagaaaagtgcaacaataatgtcagctacttctttttctatgattagaaatagcagtcagcaatcagagcacagatacttgatttttggaaggcaggatcctttttgtccacctggctcctggagactgtgaggaagctgctccagggatatgtgcatggtgctaaggagtcagggatgggtagctgctactgtgctaagttatgaaatggatcaacattaatcataattcatacttcaagccttcctgtggaagtttcaagcctacaatagactccagaatttcaaaacacttacatcaaattgctggtgcaattgttacctaagtagggaacagatttctggtgcttcttactttgccatctttccagaccctctctcctgtgccagactgttgctttttaggaaatagacaatgagccatctaggagaagatatatgtctggcagagagccaagtcagaatctcatggacacagcgaatcaaaactttattgattccctttccttgccatatatatatatatatatataaaattaccattttaatgtcattgaagagaagtgagcccctgagagccctgagagcactaataagtatgtggatttataatgcatttcatgaattctggtggaagtatggaacactgcttcttcataatttcctttttttgattcaacatgaatactatagtgacagtccccaaaacggtgaactaggcccttatgacaaggctaaatcagtaagagaaatacccacaatgcattgtgaataaggacactaaaaataataatgtttacaagaggggaaatcaggtgataaaaatctacagaatgagattattatagtccaaagtactaaacatctaatcatgcttgcatttcatcccttggggtgtgtgtgtgtgtgtgagagagagagagagcgagagagagagagagatgatacacttttactctctataatttctgtccatacatcttccttgctccctaatatggaattcctatatatccttccaaacttgactsaactatcagtttttctattaagcctgtcaagatctacctgatccccatatctgactgaccacctccaggattcatcattatctctctcgtcttcatctagaacttttatacataatctagctggatctatgaacaggctgactttcagtattgacaaattgcatatctgcttgtcctccttaaaacataatggatatattacttcagtgcagatgtataatttatctttgaattcttagcacttcacagatacattcaataactcatttttcagtcgtatttcattttatatttgctgattttcatttgtcacttataattaatctgacgttttctgaatttctactaggaagcaagctgagtgctacgtatttattgttaa

SEQ ID NO: 725783 - DNA, 1413 bp, Homo sapiens
ggagaaaagtgcaacaataatgtcagctacttctttttctatgattagaaatagcagtcagcaatcagagcacagatacttgatttttggaaggcaggatcctttttgtccacctggctcctggagactgtgaggaagctgctccagggatatgtgcatggtgctaaggagtcagggatgggtagctgctactgtgctaagttatgaaatggatcaacattaatcataattcatacttcaagccttcctgtggaagtttcaagcctacaatagactccagaatttcaaaacacttacatcaaattgctggtgcaattgttacctaagtagggaacagatttctggtgcttcttactttgccatctttccagaccctctctcctgtgccagactgttgctttttaggaaatagacaatgagccatctaggagaagatatatgtctggcagagagccaagtcagaatctcatggacacagcgaatcaaaactttattgattccctttccttgccatatatatatatatatatataaaattaccattttaatgtcattgaagagaagtgagcccctgagagccctgagagcactaataagtatgtggatttataatgcatttcatgaattctggtggaagtatggaacactgcttcttcataatttcctttttttgattcaacatgaatactatagtgacagtccccaaaacggtgaactaggcccttatgacaaggctaaatcagtaagagaaatacccacaatgcattgtgaataaggacactaaaaataataatgtttacaagaggggaaatcaggtgataaaaatctacagaatgagattattatagtccaaagtactaaacatctaatcatgcttgcatttcatcccttggggtgtgtgtgtgtgtgtgagagagagagagagcgagagagagagagagatgatacacttttactctctataatttctgtccatacatcttccttgctccctaatatggaattcctatatatccttccaaacttgactgaactatcagtttttctattaagcctgtcaagatctacctgatccccatatctgactgaccacctccaggattcatcattatctctctcgtcttcatctagaacttttatacataatctagctggatctatgaacaggctgactttcagtattgacaaattgcatatctgcttgtcctccttaaaacataatggatatattacttcagtgcagatgtataatttatctttgaattcttagcacttcacagatacattcaataactcatttttcagtcgtatttcattttatatttgctgattttcatttgtcacttataattaatctgacgttttctgaatttctactaggaagcaagctgagtgctacrtatttattgttaa

SEQ ID NO: 725784 - DNA, 484 bp, Homo sapiens
tcaaattataatagtggattcctatcatctctttatgtcagtcctagtgaaacaaattayactaattatatttctcaatgaaagttttatgtgggattttattctttcttgagttatataattaagatgtgttttttccctttccaagtcataatatcactttattttgtccacgagttggtctgccagccttatactctttatgctttcctcttccctctcagcttccactatgtcctctttatgctgtgtaataaaacatagtgaaaaataacacaggtttttcccaatcccaaataacacatagattgattactagctatatggtctttataaaatattttagtacctaagtgttctcatccataaaatgagagtgaaaacatgattgattttgtccgtatattataatgattcaaagaggtaatgcatttacgaagcttaacatgttacctaataagtaagacagacacaagagatattg

SEQ ID NO: 725785 - DNA, 1522 bp, Homo sapiens
ttcaagtatttatgaaaattgaaatataactccccataaaactgattaagttttgcaaatatgtaatccacccctaatacttgtttttttttycccaaaagtctgaattgtaagttgaggaataaaatatgtagttaagagaaatggtgtttataaatcaggtagacaagtagactcttctccatctcctacttctaaactattactttgctttgtaaaccaaaaagtatctgagacaagtctcaatcaattggttaaggacatgcctgcaaaacatcctcaggaggttctgacaacatgtgcccaaggtggtcaagttacagtttggtttcatacatttgagggagacataagacaccaatcaatacatgtaagatgtactttggtttgatatgggaatgcaggacaacttgaagccaggagttggtgggggtaggtggagtcaacgatttttctgattggcaattggttgaaagagtttatttaaaggaatggagtcaatagaagtgagtgtctgggttatgataagaggttgtagagactaaggttctcattacgcagatgaagccctcatgtagcaggcttcagagagaatagattgtaagtgtttcttatcagacttagaatctgttctatcaggtttaagatctctgttttaacattaatactgatcagctgtgtctgaatttcaatgggagaaaggtataatgagtcctgtctgaccacctattcccatcatggcctgcactagtgtttcaagtttactttagaatgctcttggccaaaaggagggtccgttaagttggttggtaaacttagaattttatttttgtttcacagcttcaaaataatcacatggaacaaaaattgtgtggaaaagatatatttaaaaacattcttttggtctttcattaggtgtctaggaaggtacgtgtgactagatgaacaagaaaaaagcaaagcagatagattgagacatgggtgagagttggaataaagaaactttaaaagccccatttaaaatcacaggaaaataaaaaatactcaagctgaaatcctggttagatgatactgtttaatactcatacagttgttgacaaaaagagtcaaactctgtaaaacatttgaggagatatattctgagccaaatatgtgtaaccaatggcctattacacagccccaggagatcataagaacatgtgcccaaggtggccagtctacagcttggttttacacattttagggagacgtaagacttcaatcaatacatgtaagatgtatattggttccatctggaaaggcaggacagctcgaagcagggacttccaggtcataggcatttcaaagattttctaattggcaattggttaaaagagttatcatctaaatacttattatcagacaaaaataatctgttatatcagcctgaaggtctttgtgttgatgttaatgctggtcagttgtgcccacatttcaaaaggatagtgggtataatgaggcatgtctgactcccccttcccat

SEQ ID NO: 725786 - DNA, 1522 bp, Homo sapiens
ttcaagtatttatgaaaattgaaatataactccccataaaactgattaagttttgcaaatatgtaatccacccctaatacttgttttttttttcccaaaagtctgaattgtaagttgaggaataaaatatgtagttaagagaaatggtrtttataaatcaggtagacaagtagactcttctccatctcctacttctaaactattactttgctttgtaaaccaaaaagtatctgagacaagtctcaatcaattggttaaggacatgcctgcaaaacatcctcaggaggttctgacaacatgtgcccaaggtggtcaagttacagtttggtttcatacatttgagggagacataagacaccaatcaatacatgtaagatgtactttggtttgatatgggaatgcaggacaacttgaagccaggagttggtgggggtaggtggagtcaacgatttttctgattggcaattggttgaaagagtttatttaaaggaatggagtcaatagaagtgagtgtctgggttatgataagaggttgtagagactaaggttctcattacgcagatgaagccctcatgtagcaggcttcagagagaatagattgtaagtgtttcttatcagacttagaatctgttctatcaggtttaagatctctgttttaacattaatactgatcagctgtgtctgaatttcaatgggagaaaggtataatgagtcctgtctgaccacctattcccatcatggcctgcactagtgtttcaagtttactttagaatgctcttggccaaaaggagggtccgttaagttggttggtaaacttagaattttatttttgtttcacagcttcaaaataatcacatggaacaaaaattgtgtggaaaagatatatttaaaaacattcttttggtctttcattaggtgtctaggaaggtacgtgtgactagatgaacaagaaaaaagcaaagcagatagattgagacatgggtgagagttggaataaagaaactttaaaagccccatttaaaatcacaggaaaataaaaaatactcaagctgaaatcctggttagatgatactgtttaatactcatacagttgttgacaaaaagagtcaaactctgtaaaacatttgaggagatatattctgagccaaatatgtgtaaccaatggcctattacacagccccaggagatcataagaacatgtgcccaaggtggccagtctacagcttggttttacacattttagggagacgtaagacttcaatcaatacatgtaagatgtatattggttccatctggaaaggcaggacagctcgaagcagggacttccaggtcataggcatttcaaagattttctaattggcaattggttaaaagagttatcatctaaatacttattatcagacaaaaataatctgttatatcagcctgaaggtctttgtgttgatgttaatgctggtcagttgtgcccacatttcaaaaggatagtgggtataatgaggcatgtctgactcccccttcccat

SEQ ID NO: 725787 - DNA, 1522 bp, Homo sapiens
ttcaagtatttatgaaaattgaaatataactccccataaaactgattaagttttgcaaatatgtaatccacccctaatacttgttttttttttcccaaaagtctgaattgtaagttgaggaataaaatatgtagttaagagaaatggtgtttataaatcaggtagacaagtagactcttctccatctcctacttctaaactattactttgctttgtaaaccaaaaagtatctgagacaagtctcaatcaattggtwaaggacatgcctgcaaaacatcctcaggaggttctgacaacatgtgcccaaggtggtcaagttacagtttggtttcatacatttgagggagacataagacaccaatcaatacatgtaagatgtactttggtttgatatgggaatgcaggacaacttgaagccaggagttggtgggggtaggtggagtcaacgatttttctgattggcaattggttgaaagagtttatttaaaggaatggagtcaatagaagtgagtgtctgggttatgataagaggttgtagagactaaggttctcattacgcagatgaagccctcatgtagcaggcttcagagagaatagattgtaagtgtttcttatcagacttagaatctgttctatcaggtttaagatctctgttttaacattaatactgatcagctgtgtctgaatttcaatgggagaaaggtataatgagtcctgtctgaccacctattcccatcatggcctgcactagtgtttcaagtttactttagaatgctcttggccaaaaggagggtccgttaagttggttggtaaacttagaattttatttttgtttcacagcttcaaaataatcacatggaacaaaaattgtgtggaaaagatatatttaaaaacattcttttggtctttcattaggtgtctaggaaggtacgtgtgactagatgaacaagaaaaaagcaaagcagatagattgagacatgggtgagagttggaataaagaaactttaaaagccccatttaaaatcacaggaaaataaaaaatactcaagctgaaatcctggttagatgatactgtttaatactcatacagttgttgacaaaaagagtcaaactctgtaaaacatttgaggagatatattctgagccaaatatgtgtaaccaatggcctattacacagccccaggagatcataagaacatgtgcccaaggtggccagtctacagcttggttttacacattttagggagacgtaagacttcaatcaatacatgtaagatgtatattggttccatctggaaaggcaggacagctcgaagcagggacttccaggtcataggcatttcaaagattttctaattggcaattggttaaaagagttatcatctaaatacttattatcagacaaaaataatctgttatatcagcctgaaggtctttgtgttgatgttaatgctggtcagttgtgcccacatttcaaaaggatagtgggtataatgaggcatgtctgactcccccttcccat

SEQ ID NO: 725788 - DNA, 1522 bp, Homo sapiens
ttcaagtatttatgaaaattgaaatataactccccataaaactgattaagttttgcaaatatgtaatccacccctaatacttgttttttttttcccaaaagtctgaattgtaagttgaggaataaaatatgtagttaagagaaatggtgtttataaatcaggtagacaagtagactcttctccatctcctacttctaaactattactttgctttgtaaaccaaaaagtatctgagacaagtctcaatcaattggttaaggacatgcctgcaaaacatcctcaggaggttctgacaacatgtgcccaaggtggtcaagttacagtttggtttcatacatttgagggagacataagacaccaatcaatacatgtaagatgtactttggtttgatatgggaatgcaggacaacttgaagccaggagttggtgggggtaggtggagtcaacgatttttctgattggcarttggttgaaagagtttatttaaaggaatggagtcaatagaagtgagtgtctgggttatgataagaggttgtagagactaaggttctcattacgcagatgaagccctcatgtagcaggcttcagagagaatagattgtaagtgtttcttatcagacttagaatctgttctatcaggtttaagatctctgttttaacattaatactgatcagctgtgtctgaatttcaatgggagaaaggtataatgagtcctgtctgaccacctattcccatcatggcctgcactagtgtttcaagtttactttagaatgctcttggccaaaaggagggtccgttaagttggttggtaaacttagaattttatttttgtttcacagcttcaaaataatcacatggaacaaaaattgtgtggaaaagatatatttaaaaacattcttttggtctttcattaggtgtctaggaaggtacgtgtgactagatgaacaagaaaaaagcaaagcagatagattgagacatgggtgagagttggaataaagaaactttaaaagccccatttaaaatcacaggaaaataaaaaatactcaagctgaaatcctggttagatgatactgtttaatactcatacagttgttgacaaaaagagtcaaactctgtaaaacatttgaggagatatattctgagccaaatatgtgtaaccaatggcctattacacagccccaggagatcataagaacatgtgcccaaggtggccagtctacagcttggttttacacattttagggagacgtaagacttcaatcaatacatgtaagatgtatattggttccatctggaaaggcaggacagctcgaagcagggacttccaggtcataggcatttcaaagattttctaattggcaattggttaaaagagttatcatctaaatacttattatcagacaaaaataatctgttatatcagcctgaaggtctttgtgttgatgttaatgctggtcagttgtgcccacatttcaaaaggatagtgggtataatgaggcatgtctgactcccccttcccat

SEQ ID NO: 725789 - DNA, 1522 bp, Homo sapiens
ttcaagtatttatgaaaattgaaatataactccccataaaactgattaagttttgcaaatatgtaatccacccctaatacttgttttttttttcccaaaagtctgaattgtaagttgaggaataaaatatgtagttaagagaaatggtgtttataaatcaggtagacaagtagactcttctccatctcctacttctaaactattactttgctttgtaaaccaaaaagtatctgagacaagtctcaatcaattggttaaggacatgcctgcaaaacatcctcaggaggttctgacaacatgtgcccaaggtggtcaagttacagtttggtttcatacatttgagggagacataagacaccaatcaatacatgtaagatgtactttggtttgatatgggaatgcaggacaacttgaagccaggagttggtgggggtaggtggagtcaacgatttttctgattggcaattggttgaaagagtttatttaaaggaatggagtcaatagaagtgagtgtctgggttatgataagaggttgtagagactaaggttctcattacgcagatgaagccctcatgtagcaggcttcagagagaatrgattgtaagtgtttcttatcagacttagaatctgttctatcaggtttaagatctctgttttaacattaatactgatcagctgtgtctgaatttcaatgggagaaaggtataatgagtcctgtctgaccacctattcccatcatggcctgcactagtgtttcaagtttactttagaatgctcttggccaaaaggagggtccgttaagttggttggtaaacttagaattttatttttgtttcacagcttcaaaataatcacatggaacaaaaattgtgtggaaaagatatatttaaaaacattcttttggtctttcattaggtgtctaggaaggtacgtgtgactagatgaacaagaaaaaagcaaagcagatagattgagacatgggtgagagttggaataaagaaactttaaaagccccatttaaaatcacaggaaaataaaaaatactcaagctgaaatcctggttagatgatactgtttaatactcatacagttgttgacaaaaagagtcaaactctgtaaaacatttgaggagatatattctgagccaaatatgtgtaaccaatggcctattacacagccccaggagatcataagaacatgtgcccaaggtggccagtctacagcttggttttacacattttagggagacgtaagacttcaatcaatacatgtaagatgtatattggttccatctggaaaggcaggacagctcgaagcagggacttccaggtcataggcatttcaaagattttctaattggcaattggttaaaagagttatcatctaaatacttattatcagacaaaaataatctgttatatcagcctgaaggtctttgtgttgatgttaatgctggtcagttgtgcccacatttcaaaaggatagtgggtataatgaggcatgtctgactcccccttcccat

SEQ ID NO: 725790 - DNA, 593 bp, Homo sapiens
atgtccaatgaatagaagaaacaacaagagccttggaatcattcaatggccttactgacttcaagcaaagtagaaaatgaatcaggattcaagcccagatccatccaacctcataaagcaaactcttaaccatcgtacttttctgactttaaatgtaaccaggtgattatttacaaatttctttgaaaaaatatgaacccaaaatatcttttgaattcaaaggttaaatgttatccacaaggtatataacaccaatattcagttttgattagaaatccattagtatttattattttttgttctcaaatatataagattagaacaagttacaacaccggtactttcacttaatctactaaattttcgttaagacaatacttggaggttatactgaaatatagtaaaaacaaaaagtggtcagcaacagcaaggatccattgttaaatgaatagtatttcaacaaataaraaaaaaaaaccccacaaaactaaaaaattaaacctaccagtgtttcctgtcttgattttcagtgttctgcccctgataaatcagagtgagtaattcacattttatcaattttctgaattctaaca

SEQ ID NO: 725791 - DNA, 1316 bp, Homo sapiens
  misc_feature 592, 593, 594, 595, 596, 597, 598, 599, 600, 601, 602, 603,604, 605, 606, 607, 608, 609, 610, 611, 612, 613, 614, 615,616, 617, 618, 619, 620, 621, 622, 623, 624, 625, 626, 627,628, 629, 630, 631, 632, 633, 634, 635, 636, 637, 638: n = A,T,C or G
  misc_feature 639, 640, 641, 642, 643, 644, 645, 646, 647, 648, 649, 650,651, 652, 653, 654, 655, 656, 657, 658, 659, 660, 661, 662,663, 664, 665, 666, 667, 668, 669, 670, 671, 672, 673, 674,675, 676, 677, 678, 679, 680, 681, 682, 683, 684, 685: n = A,T,C or G
  misc_feature 686, 687, 688, 689, 690, 691: n = A,T,C or G
ggtaagctgtactgttaggttcagcttactgataaagatacagaggagcaaagggttttataagtgacatagttggcattcagacctgtgcagcctggctccagaggctgagctcttaaaaactatgctgcgctaaaatgttacagtgaggaagactgaagtttaccaactgacataccaccctgcactgtccgagtacctgggtccattaatcttcccatgaggttttgtgtacctgccactttatacctagaaataaacataaaccaaaaggcaggaggtgttaataacctgaaatttctcttattctgcctatgaagtccatgccagagagctctataacaaagtcctgttaaacattagtgaccaaggcctctcatgaggggtacagaaaggcccaacttagagacaaacaaaaaracagcagtaaacctctgcagacttagatgtccctgtctgacatctttgaagagagcagtggttctcccagcacgcacatggagatctgagaatgggcacactgcctcctcaagtgggtccctgacccctgacccccgagcagcctaactgggaggcaccccccggtaggggnnnnnnnnnnnnnnnnnnnnnnnnnnnnnnnnnnnnnnnnnnnnnnnnnnnnnnnnnnnnnnnnnnnnnnnnnnnnnnnnnnnnnnnnnnnnnnnnnnnntgcctgtgtggggcttccactcactctacgtttaaatctttgtgttacattgtaatgggaacaccagtatcacaaataggcatccgttttcaatgagaaaccagttaccaacgactaaaacattttttagaagtcaaaattgcaagtgaaatctaaggtgtcataaatttattcgattcaaaaaatgcatactaggaaatcagtttctcaacgagaaggacggactggtttccaggtggtgttaatggggcagtcactgtcgctcagctgcagaaggtgtgggtcctgggcaggaaggcagcgctggttcctcctgccccagccatgctcaccatcgtgggtgcgggcatggggcacgcgtgggaatggggtgcgggcccagggtgcgcgtgggaacggggtgcgggcacagggcatgtgtgggaacggggtgcaggcaggaggcatgcttcttcagggttagagactatcctcagctgtgctatggaccaggcactgtgccaacagccctacagctattcatcaagctccagcgaccatcccgtgaggctggtgctatgatcctctccaggcacagagagctttagtcacttgcccaaagtcacatagctgtgagcacggacag

SEQ ID NO: 725792 - DNA, 1550 bp, Homo sapiens
  misc_feature 221, 222, 223, 224, 225, 226, 227, 228, 229, 230, 231, 232,233, 234, 235, 236, 237, 238, 239, 240, 241, 242, 243, 244,245, 246, 247, 248, 249, 250, 251, 252, 253, 254, 255, 256,257, 258, 259, 260, 261, 262, 263, 264, 265, 266, 267: n = A,T,C or G
  misc_feature 268, 269, 270, 271, 272, 273, 274, 275, 276, 277, 278, 279,280, 281, 282, 283, 284, 285, 286, 287, 288, 289, 290, 291,292, 293, 294, 295, 296, 297, 298, 299, 300, 301, 302, 303,304, 305, 306, 307, 308, 309, 310, 311, 312, 313, 314: n = A,T,C or G
  misc_feature 315, 316, 317, 318, 319, 320, 324: n = A,T,C or G
gcatgtatcagaaaagagtggtcatttttattttactaactctgatatacacaaaatgatgtcatgtgaccatggaatattagagctattatgggactaagaaataattcataccttcagtgtaaagatgagaaaagtgagggacaaaattgtaaaggttattgctcactgtctcacagactaraggcaaagatgaggcaggtattgagatttttttcttnnnnnnnnnnnnnnnnnnnnnnnnnnnnnnnnnnnnnnnnnnnnnnnnnnnnnnnnnnnnnnnnnnnnnnnnnnnnnnnnnnnnnnnnnnnnnnnnnnnnctgnttacttgtatctttcacggaggtttttcagatcaataattgtttgaaagttacaacactagtatttggttgagataccatgactctcaccttgaaaggttagcaatgcttaacctttgataaccaacatcaattaatataattagctgatgataattagtatcattaaattaacaataaaaccatcactatatctctgacatccatgctttttgccaaatctgcctgaaatttataaaacaacctgggactattttacccctcaggtgacatttgctaatgtctggagccattcctggttgtcacaacaaagagttttctggttcaaactgtcaataatatcaaggttggtaaacccactaaagggatttaatgctgccctctgcccttaataaacccactaaagggatttaatgttgccctctgcaacacctatatgtaataaaagacatgtttcctatactagttgaaaagaagtctgatcttccctattctattgtatttcaaacttttagggatgtctctagattacagtatgtcatattttcatgaagaacttcaaatattctcatctatattttatagaattaggtcctcttccttttttttcaaagatctattttttaaaagtctaacctcacacaaatgccagtgcttttcctttgtgacttttcaagcttcatttgttagatatgtctctacatatgtagaaaaaaagatgattgttgtattttagattccaccattgatctacacaagaaaaaggttgttttgtgttatttgcatttcctggtatttatttttgtttggggctctatccttattaactgttaacaatttcatggaatatgaatagtcattttttatacattgaagaaagaaatattgagtccaggaaatacaagctagacacatacctgcctctttggagttgagccttctgcaggatataagtgagtatgtaaacaagatgcaatatgatgataaagaatatggaaggcactacaaatgcacataaaagggcctataatcgaggcttgagcaatcagagaggtgaggtctgagctgatacctggcaagtaacatggagataagtattgtttctgacagaaaaaagactttaaacacatctcattagagatgagatacagccagtgccccagaggtactgaatactgtaggcaattgtagcacaatggtaggtatttgtgtaagtaaacagatcta

SEQ ID NO: 725793 - DNA, 606 bp, Homo sapiens
tatgagttaaatgagaccaaaaatacatagtatttaaagtcatgcctggaacatagtaagcacagaataggtaaagtgactcatgttctgtgcctgtgaaagaatctcagtttaggcctcctgtcctagactatwaatatgaagccctctttcactctcagtagtgcccttgtgtggacgattaattttatagtcaccctgtatgtgaaaaattgctattatttttttcaaggcatatgcatggccttgattttacacggttgaggtactattatattaacagttttaatcttgtttttatcacctttataggatgtagtcagaattttcctatttcaatccattttttattaataatttttaacatttgtatatgatcccctggaatgaatattccataattcatgtatatgtctatgtatatgtctattgtttttaatttggcctaccaaaatagtgctgtgatgaacatctatgcccatatattttgactacccttctgttgaatttcttacgatggtaaatttaaattattgagacaaaagcaatgcacatttgttaggattttgataatggtgtgtatcttaagccatggagaattctgaa

SEQ ID NO: 725794 - DNA, 2903 bp, Homo sapiens
  misc_feature 617, 621, 783, 784, 785, 786, 787, 788, 789, 790, 791, 792,793, 794, 795, 796, 797, 798, 799, 800, 801, 802, 803, 804,805, 806, 807, 808, 809, 810, 811, 812, 813, 814, 815, 816,817, 818, 819, 820, 821, 822, 823, 824, 825, 826, 827: n = A,T,C or G
  misc_feature 828, 829, 830, 831, 832, 833, 834, 835, 836, 837, 838, 839,840, 841, 842, 843, 844, 845, 846, 847, 848, 849, 850, 851,852, 853, 854, 855, 856, 857, 858, 859, 860, 861, 862, 863,864, 865, 866, 867, 868, 869, 870, 871, 872, 873, 874: n = A,T,C or G
  misc_feature 875, 876, 877, 878, 879, 880, 881, 882: n = A,T,C or G
catattcttcaatttcttcctgaacttctaaatagaaataattagacaactaaaaggtaaattcctcatacggacacgtgaaagccagtggtgttttttaagctcagcaatatgttaccagaaaagttcattttcaggtcatttagcagcctgacatcagtgagttgaataattcactaaattattaatacagaacaacttactttaacatttccctttagacttagtgcagaaaaagcatagaaataggaataaacttctcttatacaatcaaaagtgtataatgggagcagtaaatggtcagaaaagagattcattgtcagtttttatgggacatggttttatcaagagacttggaggtattttgttgtatttcagaaaattaggaagaatatagaccatacaagtaacaaattgcttcgtagtaaaatattttattctgaatattaaacaaaagatgtgcagacagagattgagacaggtgtatgtattcagtctgtatcatgtttatgtgtaggatatgtttgcttcaaaatatttccttgcaacttaggcatgtttattcattgtttattcttactgcatcaatcaaaacttatcaggagtctaatacaaancagncacatctagtcaaaagtttagttaccttaagtagatatttgaagttgatgaaatgcattcatgcattgatcatgagctgaactatgatgtaagtaataaaaggcctgattcacttaaaaactgacgggtgatttttttaaaaggggaaaaaaaaaaataaannnnnnnnnnnnnnnnnnnnnnnnnnnnnnnnnnnnnnnnnnnnnnnnnnnnnnnnnnnnnnnnnnnnnnnnnnnnnnnnnnnnnnnnnnnnnnnnnnnnaaattaaaaaaattatttttcccagtctttgtctagctttttgttcagatttttgaaaattaagttagatttatacttatgaactcatatgcttttactaatgatcataaagtttctaaaattataaatgcttttaaatacatcatttccatggctatgtaacaccctggtagaagagcatttcataatttaaccatcagcaatatttatatattattgttaattttgtaaacattttcatatacaaaatcatcagtggaataaagaggatgctttttaaaagtttcttaatatttattagcatgtaatttcaactaaagtttatacaatttatctggccatattagagagctccatttctgtcacatgcttgccaacattattatttttaatttttattgttttcatttgcatttctgtaactcctaatggaattcaatatttttaaaatgtgtattagttataattgttcattttctaaattttctgttgctgtaactatgtattctttgggaccattatactttttataattcatttgaatgaattatccctagtaatgatattaactttcatttgctgtatttgtagaacacatattttaaatttatttgccttttattttgttaacagtgtttcttagttttagaaatgtgtcctttgtttaattacattcttgatttcttgtatacatagaaaatcttttctcattccaaaagcaaaattatattcctcatgtattttttcctattttaaagtttttttttatgttgtacatttaatccatccatttttctagatttaattgtggtacatagtatcagataaatatctaagagtttctcctaaatattgatggtattgtctgagtataactctttaacacactatttaaattgcaactcaactgtgttgaaatttaatattaatawatgtttcaaaatgtgatagtttttaatgatgcttctttttttttctttttttgttttgagatggagtcttgctctgtcgcccaggctggagagcaatggcgcaatctcggctcactgcaacctccacctcccaggttcaagcgattcttctgcctcagcctcccaagtatctgggactacaggcatgtgccaccatgcctggctaatttttgtacttttagtagaagtggggtttcaccatgttagccaggcttgtctcgaactcctgacctcaggtgatcttcccacctcagcctcccaaagtgctgggattacaggcgtgagccactgcgcccgggcaataattcttctaaatatgcttttgacagtgccataccactgtgctattgaatctctgggtatgttctattagattgttgagccagctcccatcatcatcactactacttattttccttattttttgtcttccttttcttgttctctttgtcctcctctttcttttccctttatctttcttctttctctttttttctatttcttttcctgattatttttcttttgagatggagtctccactctgtcaaccaggctggattgcagtggtgtgatctcgactaactgcagcctccgcctcccaggttcaagcgattctcctgcctcagcctcccaagttgctgggattacaggtgcatgccaccaccctcagctaatttttgtatttttagtagaggcaaggtttccccatgttggtcaggttggttttgaactcctgacctcatgatcctcttgcctaggctttccaaagtgctgggattacaggtgtgagccaccatgcctgacctatttttcttatactttaagttatttctttgatacattttaaaatttgctaatagcatggatatctgacattatctttttacaaaataagttatgaacacaaaaaagttaactcaaaatggattaaaggcttacatagaaatgtaaatcttctagaaaaaaatcataggtaggaaaactctttggcactggtcttgatggtaattttttttgatatgacactaagagcacagatgaaaaaaaata

SEQ ID NO: 725795 - DNA, 2903 bp, Homo sapiens
  misc_feature 617, 621, 783, 784, 785, 786, 787, 788, 789, 790, 791, 792,793, 794, 795, 796, 797, 798, 799, 800, 801, 802, 803, 804,805, 806, 807, 808, 809, 810, 811, 812, 813, 814, 815, 816,817, 818, 819, 820, 821, 822, 823, 824, 825, 826, 827: n = A,T,C or G
  misc_feature 828, 829, 830, 831, 832, 833, 834, 835, 836, 837, 838, 839,840, 841, 842, 843, 844, 845, 846, 847, 848, 849, 850, 851,852, 853, 854, 855, 856, 857, 858, 859, 860, 861, 862, 863,864, 865, 866, 867, 868, 869, 870, 871, 872, 873, 874: n = A,T,C or G
  misc_feature 875, 876, 877, 878, 879, 880, 881, 882: n = A,T,C or G
catattcttcaatttcttcctgaacttctaaatagaaataattagacaactaaaaggtaaattcctcatacggacacgtgaaagccagtggtgttttttaagctcagcaatatgttaccagaaaagttcattttcaggtcatttagcagcctgacatcagtgagttgaataattcactaaattattaatacagaacaacttactttaacatttccctttagacttagtgcagaaaaagcatagaaataggaataaacttctcttatacaatcaaaagtgtataatgggagcagtaaatggtcagaaaagagattcattgtcagtttttatgggacatggttttatcaagagacttggaggtattttgttgtatttcagaaaattaggaagaatatagaccatacaagtaacaaattgcttcgtagtaaaatattttattctgaatattaaacaaaagatgtgcagacagagattgagacaggtgtatgtattcagtctgtatcatgtttatgtgtaggatatgtttgcttcaaaatatttccttgcaacttaggcatgtttattcattgtttattcttactgcatcaatcaaaacttatcaggagtctaatacaaancagncacatctagtcaaaagtttagttaccttaagtagatatttgaagttgatgaaatgcattcatgcattgatcatgagctgaactatgatgtaagtaataaaaggcctgattcacttaaaaactgacgggtgatttttttaaaaggggaaaaaaaaaaataaannnnnnnnnnnnnnnnnnnnnnnnnnnnnnnnnnnnnnnnnnnnnnnnnnnnnnnnnnnnnnnnnnnnnnnnnnnnnnnnnnnnnnnnnnnnnnnnnnnnaaattaaaaaaattatttttcccagtctttgtctagctttttgttcagatttttgaaaattaagttagatttatacttatgaactcatatgcttttactaatgatcataaagtttctaaaattataaatgcttttaaatacatcatttccatggctatgtaacaccctggtagaagagcatttcataatttaaccatcagcaatatttatatattattgttaattttgtaaacattttcatatacaaaatcatcagtggaataaagaggatgctttttaaaagtttcttaatatttattagcatgtaatttcaactaaagtttatacaatttatctggccatattagagagctccatttctgtcacatgcttgccaacattattatttttaatttttattgttttcatttgcatttctgtaactcctaatggaattcaatatttttaaaatgtgtattagttataattgttcattttctaaattttctgttgctgtaactatgtattctttgggaccattatactttttataattcatttgaatgaattatccctagtaatgatattaactttcatttgctgtatttgtagaacacatattttaaatttatttgccttttattttgttaacagtgtttcttagttttagaaatgtgtcctttgtttaattacattcttgatttcttgtatacatagaaaatcttttctcattccaaaagcaaaattatattcctcatgtattttttcctattttaaagtttttttttatgttgtacatttaatccatccatttttctagatttaattgtggtacatagtatcagataaatatctaagagtttctcctaaatattgatggtattgtctgagtataactctttaacacactatttaaattgcaactcaactgtgttgaaatttaatattaatatatgtttcaaaatgtgatagtttttaatgatgcttctttttttttctttttttgttttgagatggagtcttgctctgtcgcccaggctggagagcaatggcgcaatctcggctcactgcaacctccacctcccaggttcaagcgattcttctgcctcagcctcccaagtatctgggactacaggcatgtgccaccatgcctggctaatttttgtacttttagtagaagtggggtttcaccatgttagccaggcttgtctcgaactcctgacctcaggtgatcttcccacctcagcctcccaaagtgctgggattacaggcgtgagccactgcgcccgggcaataattcttctaaatatgcttttgacagtgccataccactgtgctattgaatctctgggtatgttctattagattgttgagccagctcccatcatcatcactactacttattttccttattttttgtcttccttttcttgttctctttgtcctcctctttcttttccctttatctttcttctttctctttttttctatttcttttcctgattatttttcttttgagatggagtctccactctgtcaaccaggctggattgcagtggtgtgatctcgactaactgcagcctccgcctcccaggttcaagcgattctcctgcctcagcctcccaagttgctgggattacaggtgcatgccaccaccctcagctaatttttgtatttttagtagaggcaaggtttccccatgttkgtcaggttggttttgaactcctgacctcatgatcctcttgcctaggctttccaaagtgctgggattacaggtgtgagccaccatgcctgacctatttttcttatactttaagttatttctttgatacattttaaaatttgctaatagcatggatatctgacattatctttttacaaaataagttatgaacacaaaaaagttaactcaaaatggattaaaggcttacatagaaatgtaaatcttctagaaaaaaatcataggtaggaaaactctttggcactggtcttgatggtaattttttttgatatgacactaagagcacagatgaaaaaaaata

SEQ ID NO: 725796 - DNA, 2189 bp, Homo sapiens
tgtggcttatcagttataagcctttaggggtcctcccagatgaatgttaattgatatggctttggtaatgtgagatgccctagatggcaggcccttatcacagcagagtctgacgggtctgactcatcactcacagctgagaagacacaacattctacatggttgtttagccacccagtggctggtagctgattttttttttttccttctcgaaatctgtcatcgtgcatgcaaccaagcaaagtattttaagtttattttgaaagaacatgaaatcctcaagaatgctggtaaatgtgagatattttttctttagcatagtactgcagcagaaaaagagaactttcaccatctttttcttctgaacggtgttcagcaatctcccaatctcttaattcataatttccatttatcaccaagccagttcatagtgaaaatgaggcaatttgtataggcaatcggtatgttcatttttaaaaacatattatgcttttattttactgtgcttagaattgcaacaaaggaagatgtagttattgattgttaccattcccaacagcaacctgggtttctcaccccaaattatgtaacactgaactgccagagaactatgcaggggagccttggtattcacagatttaacactctaggttttgaatatttgcaatcgaccatgaaggtttgtgatgtgttaattggcagttttgctgaggttcaaattcgaatcatatgtactttgaagctagtgttagggagtgattgaggagctagtgtgttagcctagtcagccgcccaacatccctctccaatcagattttttttgttctctgctcttcacataagcactaactcttagggtgattaaaaacttgatttctatgaaaaagaaaagtagtcatcctatgaaagataaaacatgaataaatctttcaaaaacattgacttggtgtgggaagagatagactttggaaatgcatatgtttcaaaagaaatcattcttggaaaaagccagaagcctgtgcaaatatctccatgttcacggatttggagatttttttatgtctcaggatttagcccttgcaaatatcaaggatttacaaacgtgttttggaaggtctgaatgagattttaaatttaaaattttcccttgttttgcttctgctacacttgaaatatggctgctgagtgccaggctacaagagctctcccttttcacttcctatgtaggcttttggggcaaaacttgctcctgacagagtccatatggcctgtaagcagtgctctgtggcccagctgtggccgtgaagtggcacaatctaggaatgtgaaatcttagggtttggcaaactttcctgttcgttggccccaaggaaaatggtgtgccccaccttatgctgctcgcgagctcagacctctgttcgttggtcatcagcaattatcagacacagatgaggcccaatgagcccagacaccagagtctgtgtacaaaatgttcttcggtacagggcaaaatgagaagatggagtttttttgtaaagctcagatgtattcaatttaaagggctattccttattaatatttttatgttaaaatgcccttttaataaaatgatggagacagtagtttttttttttttatgtttcttgcttggcaagattaaaagttggcaactttatataaaagtcccccaaatgttttgaaattttgcttgtctgggaaatctaataaactatatatagttctaaaactatatggtttagcaagagagaaaytcttctctagagagttcaagtttgtcctcatagtcaggagtagacaaactgtggcctctgggctttttgcacaagagcgtctgagtccttgcgtcacccatgaacccatctcttccgtggcactgtatttcattgccactcaagctattggaccagctgtgtttacataccttgagccattcaaagtaagtgatctttgttctgataacaatggaaggagttgtactttgcactcataagtgccaccaaaaaaaaatctattcttggctatcatccaaaaatgacaattgcaaaaatacgattaaatcagtgatttattttgtatctttttttttagttgtagtgtttctgtttttgtaagactcatacagtacttgaagaatgctgaggtttacaaattaaaggaaatattaggca

SEQ ID NO: 725797 - DNA, 2189 bp, Homo sapiens
tgtggcttatcagttataagcctttaggggtcctcccagatgaatgttaattgatatggctttggtaatgtgagatgccctagatggcaggcccttatcacagcagagtctgacgggtctgactcatcactcacagctgagaagacacaacattctacatggttgtttagccacccagtggctggtagctgattttttttttttccttctcgaaatctgtcatcgtgcatgcaaccaagcaaagtattttaagtttattttgaaagaacatgaaatcctcaagaatgctggtaaatgtgagatattttttctttagcatagtactgcagcagaaaaagagaactttcaccatctttttcttctgaacggtgttcagcaatctcccaatctcttaattcataatttccatttatcaccaagccagttcatagtgaaaatgaggcaatttgtataggcaatcggtatgttcatttttaaaaacatattatgcttttattttactgtgcttagaattgcaacaaaggaagatgtagttattgattgttaccattcccaacagcaacctgggtttctcaccccaaattatgtaacactgaactgccagagaactatgcaggggagccttggtattcacagatttaacactctaggttttgaatatttgcaatcgaccatgaaggtttgtgatgtgttaattggcagttttgctgaggttcaaattcgaatcatatgtactttgaagctagtgttagggagtgattgaggagctagtgtgttagcctagtcagccgcccaacatccctctccaatcagattttttttgttctctgctcttcacataagcactaactcttagggtgattaaaaacttgatttctatgaaaaagaaaagtagtcatcctatgaaagataaaacatgaataaatctttcaaaaacattgacttggtgtgggaagagatagactttggaaatgcatatgtttcaaaagaaatcattcttggaaaaagccagaagcctgtgcaaatatctccatgttcacggatttggagatttttttatgtctcaggatttagcccttgcaaatatcaaggatttacaaacgtgttttggaaggtctgaatgagattttaaatttaaaattttcccttgttttgcttctgctacacttgaaatatggctgctgagtgccaggctacaagagctctcccttttcacttcctatgtaggcttttggggcaaaacttgctcctgacagagtccatatggcctgtaagcagtgctctgtggcccagctgtggccgtgaagtggcacaatctaggaatgtgaaatcttagggtttggcaaactttcctgttcgttggccccaaggaaaatggtgtgccccaccttatgctgctcgcgagctcagacctctgttcgttggtcatcagcaattatcagacacagatgaggcccaatgagcccagacaccagagtctgtgtacaaaatgttcttcggtacagggcaaaatgagaagatggagtttttttgtaaagctcagatgtattcaatttaaagggctattccttattaatatttttatgttaaaatgcccttttaataaaatgatggagacagtagtttttttttttttatgtttcttgcttggcaagattaaaagttggcaactttatataaaagtcccccaaatgttttgaaattttgcttgtctgggaaatctaataaactatatatagttctaaaactatatggtttagcaagagagaaactcttctctagagagttcaagtttgtcctcatagtcaggagtagacaaactgtggcctctgggctttttgcacaagagcgtctgagtccttgcgtcacccatgaacccatctcttccgtggcactgtatttcattgccactcaagctattggaccagctgtgtttacataccttgagccattcaaagtaagtgatctttgttctgataacaatggaaggagttgtactttgcaytcataagtgccaccaaaaaaaaatctattcttggctatcatccaaaaatgacaattgcaaaaatacgattaaatcagtgatttattttgtatctttttttttagttgtagtgtttctgtttttgtaagactcatacagtacttgaagaatgctgaggtttacaaattaaaggaaatattaggca

SEQ ID NO: 725798 - DNA, 663 bp, Homo sapiens
gatctttggaaaaaaaaacctgaaaattgatttctgtctccagaaatgtaagtaatttgtaaaaccatggctaacttatacaatctctctatatgatttggccacattctgaaagcataaaataggaattttwaaaaattatttcaatcctatttatggtaagtattttacagagggtaggtatctataagtattactagtaattgttgatgatatatcctgtcattattattacagaatacttgcctgtagaaatgtttttaatagttagaattacagtacttaggaatgttaaaatatctctcttcaaagcaagtgttttcgtacaatcattgatttgggaagttgtgtctgtcaaaagtgggctataagaaagggctctaaaaagattattctagttctctaatacacactcttttctctcaactgtcagtttcatcctttaacatctgctctgaaataatttaccatttcagctctgttcaacttccagaatttgtgactcattatgcttttcttaatcacttccaaaaaagtagtcataatctccctcaattgcttaggggagaggaagtaaaacacatctattccttttcatcacaatttaaattggatgcaatattatttctaaaatgtatcaaatcatgcttataaaaataattt

SEQ ID NO: 725799 - DNA, 1282 bp, Homo sapiens
caatttttaagtgaaataatccctgtgcactaccaaaaaaaaaccctttttattatttgggtttcatgctattaatgtattttcctctgtggttcctacatggtttgcagaggtaacactcctttcctttcatatacagacacacatacttttggatggttggtagacagtacattatcaataatggttttgggatagacaatggactcaaaccttgtgcctcatttctgtatatcaaaacatgtcaaagccccagttataaacctagttttaagcacaattctgaagctctcccagatcattcatcttggctgtgctctggaagaccaaatctaacagtgctgatatgcagacatgaagtacttgctttctgattattgaagtaagggtctgtatttcaaatcaggcaatttgcagttccttgtttctaaataaacctatgaagtttcctgttgctgaggaaaaaatttcttttgaattatcctgtctttaaatctcttgccaaatgttaagcaaactactcagaaacacatattcatttttcttaaccagcaatacaatgcattgcccaaatatgatcaaacatcctcaaactttgtcaatcacttaaattattaaacaataaaacattaaactctgtagctaaaataaaaatatattccctggtttctatgaaattacgttctcataggtcatttttatattcttatttctttaaatatggctgttaatttcatcccttcaattagaggttgccattcatggtcaggtaagttcaatttcctctattgtttcacttggaacctgaaaccccattcaagcatcttacaaattcctgccattgatcacaaaaactgagcaaggaaatatggatgactcagtgtgaattcattactcttattaagaaaatgacataaagtcctactgagcaagacacaatagaatcattttcaagtattagccacagagtggtgtcattataacatcactttcacatgtaaatataaaatgaaagtttaatgttaaaaataagaaaaaatgtaaatgtataatagaccaaaaattgttctatttttgtccttggggcagtgatgttaaatcatctcatatctatgagacattgctagttataaggaatattcatgttctcsttttcttcttaggcacatagcagtcagttctgaataattgattgtgagctgaaatagtcatttttaggcctcttccattaagcctccatctgaatacagaggataacaaaggcttagaggagaagggagcc

SEQ ID NO: 725800 - DNA, 1485 bp, Homo sapiens
tgcctcatatgcctataaatttgtaagtctctacctttactctctttctttttatgcttctctttccatcactccttcccattctttcctcccattccaccctcactaaatccctttcttcttccctattctgtcttattccctttcatcccttactttcattcacaactttgtacaaaaagaaagctggatgactttcaaacatatgcacataagttgagaggtgctaacaatatagttggaatcattaaatactagagtatctcatggtgtttacattaagtgttataacacttggaatctgattctcctatataaatcactcttgcttagttattgttttatttgcttaacagggaaacaattacattttactttgatagtctgtgtattctgtaactatttaattgattctattagttttgtgactctgtatgtctttctgttattattttaattgtagcctttctggattaatatccaaaaaagaaaaatattccatattcaatgtatatttgaggtgttcatgaacagtatcaaaaatatatttgtacatacaaatatagacagtgaaacgtttggccataagaatttcctattattctgacagtacacatcactaatatagtttccataatttagaaatctgacacacacacacacacacacacacacactcacacacataatgcttttatttaattaatttttaggtatactattttggagagaaaaaaatggaataggataaatgaattggtagatttgacaagccagttggcgtaacagtgatatgtatgatcaattgctctatttcaccagcattcttcctccaagttaacctgaacctgattagatgattctgtgatgaaggccagtggcaaccttcaaatacatgccgtgttcaagttttcaagatttatatctgtcttttaggatttacattcatgaaaaaaacatctacaaagacagcgactaagcagatatttaagataaaggttgacgtgttagtctaattgactagacccagcatagaccattatttggaacaagttcctataagaatgttactcatttatatctcaaaggtcaagctttccgagcagttttcagaaaaaagtggatgcattaaagatgcatgaggagagtcaatctacaatgtcaaagagacctgagtgattgtgcaggtttcaaacaatctacagtacccagctaaaaggctaggactctgaagcagttgtttttcaatggctgttattgagatgttgaattctcatctaggtgakgtttccaaaagccactttgctagtgaaaaacctcaaatggaacatactgcaggtttcaaataacatagtttggtaatgcttctagtacgaataaaaagaggtagtaacacaaaattaagcattcctaaaatcataaaattcagttccattaaaactgtagttggaatttcctttgtaacttaaatccattgataaaatt

SEQ ID NO: 725801 - DNA, 739 bp, Homo sapiens
tggcttcttgatcttttattgtatcctcaagcaaagaccaaaaagaggattgaataaagataaaaactactgcaaagaatacttcacttcattgataataaataacatgttaggcagaattgaacagtacctactactcatgactacctgactagaagactcaaaactgaaatgaagagagaaataaatttcaaactgatcagacatctttaatcactagatctagggaaatttaaggtaatagcttatgatttccacccggaggatcattagaagaaaatgtctttataaatacaaaatagttgttcataaaatatcagaaaatatgtttttcaaagtaactgataacagagtaaatgaaaggtaacacctgcaaggcattgtcctttttgatatatgaaggattacacagtttatgcagcaattgtggtacaataactgtagctttatctttttagaaaggaaactgaaatagattacatggagagaaagtaacttgttcaagagaataaacagtggttatgggtttcaaatccaacattcatactctagatcttttyttctgaattaatattttatgtattatagactgtcaatctccataattgtcaagaaaatctatttaacccaattcaacatttatcttgagagggatatggaaagaatccttaatcaggtttacttgattatggacacattctatgactatgggcctcttctcagaggatgctaatatgtc

SEQ ID NO: 725802 - DNA, 652 bp, Homo sapiens
tgtcataaatcagtgtttgataaatacactttattgctacttttattacatttaatttagttccacctggtatctgcataatttgaacaataggcaaaaatactaaaataaatgttaacamccacgataactgcgtttagtctgagggatttggaccccaagttttctgctaaaggacgaattacttcagcacttcttctattatcaatgagaaattcctgaatacaggaaagatggctggctctgcaccagtgggctcatcccactgggtgtttgctgtcagtccaggttccttggtgtgtgtcccagctaagatgtgctgaactggctaaaatgatatttggcagcaatgcattctaaagcttgttttggagagaataaagcttacagggctatttgatttcttgtgcccagtaagaaatagcagtagcatgtcttcagatttaaccaaaggtgggtactgcagccctctgtcagctaatgattgaattacacaaaatccctccacaatttacatcaaatcagttgtgcctattaataaataataatcaatataagtagggaatagaaaatagtgtgtaatgttgggaaattgacttaaagctgtttattcatttgaatgtggctaacattatcttcatcacagtacttt

SEQ ID NO: 725803 - DNA, 603 bp, Homo sapiens
atccaagagccagctacatttggttattccatgttcaagaataccaatgacaaagtaaggctgggacaagttcctgttaatagtcacacaccaaaaaatgatgttttgggcaaagatggaccacatatacgacaacggtaatagtgtatttttactgtatcttttaaaagttagatgcacaaatacttgccattgtgctacggttgtctactatattcagtacaataacatgctatacagcttagtaagctaggagccacaggctgtagcatacagcctcagtgtgtagtaggctatgcyatgtgggtttgtgtaagtacattttgtggtattcacatgaagatgaactatccccatcatgaagcaaagcacgactgtatgtttattaagcaaaggagactttaaaattagacctgcctcttatcactgactagctttgtgccctccactgatttccctcatctctttgagccagcagtttctcatctgtaaaatgggctaacaccactcaatggcattatgaagattaaatcaaataatgcatgcaatgtgctcagaatggaccttggctcataagtgttccataaatgctagctatgatcg

SEQ ID NO: 725804 - DNA, 1106 bp, Homo sapiens
tgcccttcatgtggtgattgaacagcctaagctgtgtgtgtgtgttgaaataattataaagtgaatgcatgaaaatattgcaaatggggtatctggatgaagagtatttagaatttcttggtactgttcttggcatttttttggtgaattttaaattgtttgatataaaaaattaaaaatttacagaaggatatattgtccctcttgcttccaggaaaaagcacatttgttactcagctcttaaggtcagcacgaacctagataattaatatggaaattcagtaggtgcctcagagcttaggtcctgtgaggaattagtaaagaacaacaatggtgccctgctttgggtttagaatctataaagaaaagccttttaaataacctcctggaggcctgaggtatttgctgaaaattttccagatgcagttttgtcttgttgaattaaaagatcttgaggcaggcatggggcttctctggtggtagctattggatatatgtcacaccagagaaaatcatcccagatgatgggattgctggttttaattatagatatagtatacataagaatttgtactaagtgccttcattcaaaggtatgccaaatgtgggctatttgtatgcctagcacattcaccttcttcrcagctatgcatgaaaaattcagtctcttatgagggcaccagggcatcctcagttaccatgtgctgactcagcaaatgtccttagcaggtactctggtaaaagccctgagaaaagaggagacaacaaatattggtttttaatcatttcttctgggacatggaagaggaaggaggggctctatagctgaaaaggcatttgtttcctgagccaagggttggtgagtgtatctaattttgaaaatataagcaatttctgtgcataacagaggagaaaccagttttgggggtgatgggaagagggatttcctgggcaaagaattgccagcaaataagactgtggaaaactgtgcgcacccgggttgcatgttgcaacctggttgcaagtaaggacataattattttcttttcatatagcactggctggttcagagatctcaagtggctgcccaatatttctctaggtaa

SEQ ID NO: 725805 - DNA, 644 bp, Homo sapiens
tgcagtatttatctttctgtgcctggattacattatttcacataacatcccccaggtctatctgtgtcacaaatgacagggatttttttttcttttttaaggctgaatagtattctattgtgtataaataccacattttcattatcctttcaaccactgatgaacacttaggttgatttcataccttggctattatgaaaaatgctgcmatgaacatgagagtgtgagtatctcttcaacaaactaatttcatgtttttggatacatatccaatggtgggattgctgggtcataccatagttctatttttaatattttgaggaacttccatactgtattacataatatcataccaatttacaaattcaccaacagtatactagagttcccatgttccacatccttgccaacactttttatcttttgtcttttaaatactagcaatctgtaaaaaccacttagcataatatttagaatacaataagccctaaatatactagctacaataataatttctactactactattattattaatttgggacctcaggatttttcattataactaaatttgaaatttatccactatggtagaatatattgggtaaatgaattaaagtttaaaagcttatagactaatgaaa

SEQ ID NO: 725806 - DNA, 644 bp, Homo sapiens
tgcagtatttatctttctgtgcctggattacattatttcacataacatcccccaggtctatctgtgtcacaaatgacagggatttttttttcttttttaaggctgaatagtattctattgtgtataaataccacattttcattatcctttcaaccactgatgaacacttaggttgatttcataccttggctattatgaaaaatgctgccatgaacatgagagtgtgagtatctcttcaacawactaatttcatgtttttggatacatatccaatggtgggattgctgggtcataccatagttctatttttaatattttgaggaacttccatactgtattacataatatcataccaatttacaaattcaccaacagtatactagagttcccatgttccacatccttgccaacactttttatcttttgtcttttaaatactagcaatctgtaaaaaccacttagcataatatttagaatacaataagccctaaatatactagctacaataataatttctactactactattattattaatttgggacctcaggatttttcattataactaaatttgaaatttatccactatggtagaatatattgggtaaatgaattaaagtttaaaagcttatagactaatgaaa

SEQ ID NO: 725807 - DNA, 679 bp, Homo sapiens
aaggctctcttctttgcaaaattttttgaaccaccactgcactatacatttgttagcagttcctgggccaaatgtgttgttggtgttgtgagttgtctcctctgccttacgacccattttgaacttgaataagaaaatcgctcaaatttgctttttgtcttaaacataatttccatagtctaaaataaacataaaataaaaagcaagtaatgtcattatcaaaaaaaatgaagtgagaaatcctcattaaaatgatgtataacataaccacattttttaaagaatgtattcccatatcaaacagcaaatttcaacaacgcaaaaactgtaattacttttgtaccaacctaatataatgggcaaaaaaggagagagaatcatagataactctgtggagtttgcaaacctggctgagctgattttagtaatggcagatgatgagtcagacttagtaaactagaacatcctttttgtcaacattattggaaaatacattttttttaatactttaagttttagggtacatgtgcacaacgtgcaggtttgttacatatatatacctgtgycatgttggtgtgctgcacccattaacttgtcattgaacattaggtatatctcctaatgctatctctcccccctctccccaccccacaacaggccccagtgtgtgatgttcccc

SEQ ID NO: 725808 - DNA, 679 bp, Homo sapiens
aaggctctcttctttgcaaaattttttgaaccaccactgcactatacatttgttagcagttcctgggccaaatgtgttgttggtgttgtgagttgtctcctctgccttacgacccattttgaacttgaataagaaaatcgctcaaatttgctttttgtcttaaacataatttccatagtctaaaataaacataaaataaaaagcaagtaatgtcattatcaaaaaaaatgaagtgagaaatcctcattaaaatgatgtataacataaccacattttttaaagaatgtattcccatatcaaacagcaaatttcaacaacgcaaaaactgtaattacttttgtaccaacctaatataatgggcaaaaaaggagagagaatcatagataactctgtggagtttgcaaacctggctgagctgattttagtaatggcagatgatgagtcagacttagtaaactagaacatcctttttgtcaacattattggaaaatacattttttttaatactttaagttttagggtacatgtgcacaacgtgcaggtttgttacatatatatacctgtgtcatgttggtgtgctgcacccattaacttgtcattgaacattaggtatatctcctaatgctatcyctcccccctctccccaccccacaacaggccccagtgtgtgatgttcccc

SEQ ID NO: 725809 - DNA, 574 bp, Homo sapiens
ggttatgcattctttggcaggaataccagagagatgatgttgtattctaatcatatcctgtgaggtggcatacaattttgatttgtctcattactgatgatgytaactttgaaaacatggaagatactgtctgccagccttcttgactgtaaagttactctttttccttttgtaactagtaagtattttgtagggaatagtagagcctctaaatctcagctgaaggttgtttccctaaagtggtattcatttaaagactgaactcctttctgtgtctttgattacttaagaatatagcatgttgtcagagcttgattttctaatggcagattatgtgccctttggattctctttggcccattattttaaccccaaactgggtaccactcactcagtgtatataatgtaagattcttgtaatgatatacttctgtcccttcctcctccttttgtactatttttacagagttttacttttgtatccctaaatcattgttatttttgctttaaacaattatcttttaaaggaactttaaaaaatgagagaaagtctgtatttacccactgatttact

SEQ ID NO: 725810 - DNA, 587 bp, Homo sapiens
tgaaactccatctctactagaaatacaaaaaattggccaggtatggtggcacacacctgtagaacaagctactcgggaggctgagtcaggagaattgcttgaaccgggaggcggaggttgcaagcaagtctccgtcttcaaaaaaaaaaaaaaaggcaaaatatagcagcctagccaacctaggctctactaaccaaaccaaacctyatctctactaaaaatacaaaaaagctgtgcatggtgacattcacctacagtcccagctactcaagaggctgaggcacaagaatcacttgagtgattgagccggagattgcagtgagccaagatcacaccactgcactttagtctggacaacagagcgagactctgtctcaaaaaaaaaaaaaaacaccaaaaaaaccaaaaaaaccagtcctatgaattagtttacaatagtggaaataatcaccaaaataccttgatggcaataatgagctgaaaattggcaaggcttctgtggatttaggcctgcagagcttgatctacctgaagcttttcttcccatatgtcatgaataacagaaaggacttattttcatttccagc

SEQ ID NO: 725811 - DNA, 1057 bp, Homo sapiens
aaaggactagttttcatgctgtaaaacactggccagataacttatgataatttatgatgagcttattcacttagttactaatattttcaggaacaacttaatgggcattcacaatayataagatcaacaattttagcaaaaaatcctttatatccctctctttttttttttttttttttttgagactgagcctctatcgcccaacctggagtgcagtggcactatctcagctcactgcaacctctacctcccgagttaaagctgttctcgtgcctcagcctcttaagtagctgggattacaggcgcccaccaccacgcctggcttttttttttttttttttttttttcccgagatggagtctcactctgtcacccaagatggagtactgtggcgccgtctccgctcactgcaaccttcccttcccaggttcaagccattctcctgactcagcctcccgagtagctggaattacaggcaagcgccaccacgcccggctaatttttgtatttttagtagagacggggtttcaccgtgttgaccaggctggtctcgaattcctggcctcaagtaatctgccacctcggccttccaaagtgctgggattacaggcgtgagccacggcgcctggtccattttttgtatttttagtagagatggggtttcaccatattggccaggctggtatcgaactccttacctcaagtgattggcccaccttggctcccagagtgctgtgattacaggtgtgagccattgcgcctggcctatacatatatcttaagttataaatatttggtgtattaaaattgattacggtaattgacttctattagttaagagttgatatttaaataatatttaccaattatatgaaatgtgtgacaacttaaactctagattagatttctcatgtgctttttgcatttcttgttactactatattagatttacctaatttacaattttatattttcagacatgacatcaagtatttgaaggctttttcatgtagtttaaatgctcagaaagtaaatggacctgtggagagatttctta

SEQ ID NO: 725812 - DNA, 649 bp, Homo sapiens
caagttattttgatctacgtactaaaattaaaataaatcaataatgataattatataaaatatttgaagattcagggttagcttctgaatctaaatattgcttatgaatgctgttgaaatttagttgcaatcttagcagaaaaagtttctcaaaattaaaagtattaagacaattttgggagctaaaataactcaaggcatttttaatttggtgataaatcagtgtaactaaatcatgggaaagcctcattataatataattagtagattttgtgaaaatgaaggcaatataaagtatgttaacttacaaattttcctcattttattttattcttatccaaccactgcctttgcatcaatagaacacctagatatctgtagtagatcttaatacactggctcccttagccagaaaacatactttacaaacagttaaggatacataataaaagtatcyaatattagtgtcatcacaacttttagataaaaagtcaattaattcaataattgtttgacttttttcatccaattaatgcaaatgaattgaagcttctgggaattcattatgtcaatgataaaatatccttcatttgtggaaatattagtctaaaaagttaatattaaataaaaaattgttttgcactaatat

SEQ ID NO: 725813 - DNA, 543 bp, Homo sapiens
acatcttgcaacttttcgaactcttaatattattttaatttctatgagtaatgcattcttgtctatatatgcgtgctttcgtaaagttgtttctccttaagttaaattcttgaaagtacaactgttggataaaaagtatgcacatttaaaattttgatttgtatacagaaaattattatttgttgagtaatgggtcaccaaatgtcatcttaattttcattattatgccaatttataagatccatttcctatcaccttcagtaatactgttttgttattgattttaagtttcttctagttcaatataaaggaatatcttctaatccttatcatccttgaaayggacgggctgtgcttctagatcagaactactaatgtaagctgagtaaccaatgtcttcactactctcgtattaaatacattgtttggaacaacatgagccacagccaggcaattcagtggcagactcagacctcatccttgaaagaccatccttgttttatatactagtctttggttatttgtatatgcaaatatgaaata

SEQ ID NO: 725814 - DNA, 613 bp, Homo sapiens
caattgtggttacaaaagagtgtatacatttggtaaaactaattgaattgtttattttaaaaaggggttttattgtgtgaaagttatagatcaataaaagtgatttaagtttaaaaactaaagatttattccatataatgtgagtatatataaatatgtgtgtatatatayacatgtacacacacatatatttatatgtctactacgtgtacatacaatctgaaggaggagtccggggagattgttagtggaaggagtggggaacgaggaacacaagagtgaagaggtgacagtgagaaggaggatgaagtcggcctcctggccatgcctgagggatgcggttacataggtgaaaggaaccagaatttgaaagaaaaatatttctcaatgctatttcagtcccttggtttaaaaggaaaacacagaaagaagaaaaaacacaaaacacacagaaatgcaagctttttcctcctgaccccttccccatcctctgtccaccaaggcctcagcagccaccagcagacacaggggagcagaacaaggatgacacaaacaggaaaatcaagcaggctggtagcaaattggggagcagattctggattttatttcttca

SEQ ID NO: 725815 - DNA, 797 bp, Homo sapiens
  misc_feature 696, 697, 698, 699, 700, 701, 702, 703, 704, 705, 706, 707,708, 709, 710, 711, 712, 713, 714, 715, 716, 717, 718, 719,720, 721, 722, 723, 724, 725, 726, 727, 728, 729, 730, 731,732, 733, 734, 735, 736, 737, 738, 739, 740, 741, 742: n = A,T,C or G
  misc_feature 743, 744, 745, 746, 747, 748, 749, 750, 751, 752, 753, 754,755, 756, 757, 758, 759, 760, 761, 762, 763, 764, 765, 766,767, 768, 769, 770, 771, 772, 773, 774, 775, 776, 777, 778,779, 780, 781, 782, 783, 784, 785, 786, 787, 788, 789: n = A,T,C or G
  misc_feature 790, 791, 792, 793, 794, 795: n = A,T,C or G
tgctgataaagttagattaagatatacatattctgaccaggtgcagtggctcatacctgtaactccagcactttgggaagccaaaatgggaggatcacttaagcccaagagttcaagaacagcctgggcaacaaaaggagacaccatcttcacacacaaaaawtttttttaatagccacaggcccggcgcgctagctcacacctataaccccagcagtttgggaagcggaggtgggtggatcacttgaggtcaggagttcaagaccagcctggccaacatggtgaaactccatctctactaaaaacacaaaaatcagccaggcatggtggcacccacctgtaatcccagctagttgggaggctaaggcaggagactcacttgaacccaggaggtgaaagttgcagtgagctgagattgtgccactgcactccagccccagtgactgagttagactccatctcagaaaaggaaaaaataaccgggcatgatggcatgtgcttatagtcccagctacttgggaggctgaggtgggaggattacttgagcccaggagtctgaggctgcaatgagccatgattgggccactacactccagcctgggcgcgagagcaagaccctggtcaaaaaactaaaaattaaaaaaaaacacatattccaataatcatgaatctactttattagtaaataaagacccnnnnnnnnnnnnnnnnnnnnnnnnnnnnnnnnnnnnnnnnnnnnnnnnnnnnnnnnnnnnnnnnnnnnnnnnnnnnnnnnnnnnnnnnnnnnnnnnnnnntc

SEQ ID NO: 725816 - DNA, 1845 bp, Homo sapiens
tgtgccatcccattgtttatccactgaaactattctgtttcaggcaaggatatactcaactcaaaggggaattaattactgaaagacaggatattttaaaaataagaagtagtaaaacacatattattataaatgatacaacatttaatcccacatgcatgctaataagattttctttctaaatttaacaaaagtcactaaagtaatatctcttcatttttatagaattgtcagagaagtaatatgcaagtggaattcaactgaaaaaatagattttttcataatgtgtactctatatctctgyccatgtctcccaacaaagatagtgtgtccaatctgttttggctattggctattgtttgaaaatctatgctatatatttcaaagaaatatcagcattacaaaatgcagaaatatctcctctctaaaatatgtacccactaagtggagaaaaccttttttcctaaatttttatcttttactttttatcttttgtcatttgctttaagaaaaaaaaaagtcgtaatataaatatttccaaagcagaaaatataattacagatttttttaattaatgagaacattgaaaaagaagagaaaatatttctaatgtgtactgaagttctcacaaaagccaaaacactagaaaactaatgcaattgataatacacattggtataaaatacaagatattgtcatcatcattcttctcaaaagcttttctcttgatactctaagaataaatgtttatagggaaaaaattaaagcaatcacttccttttcaaatccaactttctatgtttccaatttcaagtcactacttaaatgtaacaaaagattctgttttccttaaagagacattcacttttttaaagctattatcattagaatgctgccttgatttttattttccctgacatcaggttatttgggttacatttattgcccagtgtccaatgacatttgcagagagcttccagaactaaattttatcttttatgacatcagcataaatatacttttataaaagaaaaaaagggtcataataaaatgtaacagctaaatgtcaaacagatgataagttggagaggattaaaaactcagtgtctaactctaagtaacgttaatatttcaaacctatattctaacttttaacttgaagctttctaccttcattcttcctccctcactcccattaactagtatattagttgtgtaccaaaactggaaaaatcccaatattatgacaaggtcctaatttttagtaaaatttggtgggtagatatgtaattttgctgaaattagatggcagagcattctgagcatatgaggtgctgctttaaagtaatgaggctgattctcatgcatggcttgaagaaacagtgaaggagtgatcatagcaaggacaagtttaaacaagctttgacctggaagaacggagctccgaaggctggccagcccatgcctgagttggtgctaaagaagcacacacactctcacatacatacacacacacacagcccacattacaaagcaaacaatttagagcacaaaacaatttacagttaaaaaaaaaagtaaaaattttagaataaatttagatttttaacaaatgtatctgcaaaatagtacatgacctgtaaaaagaagctggaggggataaagttatgtcaaaaacaagattttttttaactgatctcaaaaatttcattaagaaaataagactcactctcacaatacttcaacctagcttgagtatcagaatcaactctagagcattttcaataaactagccccctggtcctgcccaggtctgctgaatataaacatgagcagaggcgggac

SEQ ID NO: 725817 - DNA, 628 bp, Homo sapiens
tgacttggtattagtgatacatacagtgagaaattgattaaaatatataaagtcacaaaaataatttaatgcttatattttaatgtttaaataaaaacagtatttttaaaatttttctgtaatatattttaaggtgtatttttgaaaataatttttaaaaacatattttgaaaatttttattttagaaaaaaatttattttgagaacttttwatgtctcaacttattaaatgttattcaataaaatatttcagaaattatataatttaaattattttcagcaaaatcttttactatcaaaagtgtcctggtctagacaataaattgtatgtcaacttattgctaacacataaaagtctctttcattttaatttagcaaatgctataacaacacataaaaatgccattttttaattggaaaagattcagaaaaaagagaattcttagagaatgtggtctccaaaagatctcaaataatcttcttaaagatacacatgctggtaatttttgataaaagaaaacagtaattataagaaagtattatttatctaacactatggcaattgttacaagtatcaatttgcagatagtggggttgtgaagcaagatattcccctaacccctttgca

SEQ ID NO: 725818 - DNA, 628 bp, Homo sapiens
tgacttggtattagtgatacatacagtgagaaattgattaaaatatataaagtcacaaaaataatttaatgcttatattttaatgtttaaataaaaacagtatttttaaaatttttctgtaatatattttaaggtgtatttttgaaaataatttttaaaaacatattttgaaaatttttattttagaaaaaaatttattttgagaacttttaatgtctcaacttattaaaygttattcaataaaatatttcagaaattatataatttaaattattttcagcaaaatcttttactatcaaaagtgtcctggtctagacaataaattgtatgtcaacttattgctaacacataaaagtctctttcattttaatttagcaaatgctataacaacacataaaaatgccattttttaattggaaaagattcagaaaaaagagaattcttagagaatgtggtctccaaaagatctcaaataatcttcttaaagatacacatgctggtaatttttgataaaagaaaacagtaattataagaaagtattatttatctaacactatggcaattgttacaagtatcaatttgcagatagtggggttgtgaagcaagatattcccctaacccctttgca

SEQ ID NO: 725819 - DNA, 663 bp, Homo sapiens
gtgtcaaaactgtacccttaggtatgtagttatatttatttagaaaaaaagtgtacatatttgacgatatctgcattagatttctctctggatagaatcaatctgttatttagctgttcctctgtaacatgtttgatgacacataatcccttttttattttattttattttatactttctgccttgggtgtgatttcacatctctgagtaaataattaagaagatctttcctgggatactgtaatataaagaaagaaaataattatattatccttgcgtgagaggaaaatacaaactcaggacctagttcactatgccaaaaggaaaaaattaagctggaaggcaacttattgaacaaactgcccttccttytgttcctaagcaggtagctacaaataaagggttaaacatctccacaggtagctactctatgttcacctcatcctatgcaaagtgcccatttgctaagcacaggaaaaatgcctaatggactattcctctacatgctcctttgctcttgcaaccacaccctctttctcctccagcccacttattcccagaaaccacagaccgtttctgtgattctgtgttctttgcttccaggcattgtgcttaaccttggcacattgagacctgtctcagatacttcttggtttacactca

SEQ ID NO: 725820 - DNA, 1938 bp, Homo sapiens
  misc_feature 1792, 1793, 1794, 1795, 1796, 1797, 1798, 1799, 1800, 1801,1802, 1803, 1804, 1805, 1806, 1807, 1808, 1809, 1810, 1811,1812, 1813, 1814, 1815, 1816, 1817, 1818, 1819, 1820, 1821,1822, 1823, 1824, 1825, 1826, 1827, 1828, 1829, 1830: n = A,T,C or G
  misc_feature 1831, 1832, 1833, 1834, 1835, 1836, 1837, 1838, 1839, 1840,1841, 1842, 1843, 1844, 1845, 1846, 1847, 1848, 1849, 1850,1851, 1852, 1853, 1854, 1855, 1856, 1857, 1858, 1859, 1860,1861, 1862, 1863, 1864, 1865, 1866, 1867, 1868, 1869: n = A,T,C or G
  misc_feature 1870, 1871, 1872, 1873, 1874, 1875, 1876, 1877, 1878, 1879,1880, 1881, 1882, 1883, 1884, 1885, 1886, 1887, 1888, 1889,1890, 1891: n = A,T,C or G
agtattgaacaaaatgcaatcatacagaatttaatataatatcccttataaagtttaaatacatcaaagtgctattgtgtatcactttcatagcatacaagtataaaagaggagacatcatctaaagtccattaagagagctgtgattgcgaagaagtgactgaaaatcatcattttttttcctagaacagatactgtagttaggaatagcataaaagagatcaggagaggaaaattatccccagacagtcacgtatcatttattctaataatctgccacactcacatatggatgggttgatatgagcatgttacatcttctaatgggggctataaatcagcaaggagtgaacacacacgtgcacacacacaaacacacccatattaatttactgatttttgtagtcaacattatcaaaaatagtgatgagccctatgaacaggaggagatgcagcatatttgatgggtaataatttaagtataaattaaatacctaaaattttattgtatttttatgcaaattactttggtccttatttcaattatctattacttggagaaaaaaacagtccaaatattgaagttcaaaataaatatgtattgaaatactttacttttggagcaatttatgcttatagcacaactgagcagaaagtacagagttcccatataccttctgcaaccacccatgtacagcctcccccattatcagcatcccccaccagagtggtacagttgatacaatgatgaacacatcattatttcccaaagtcaatagttcaccttaaggttcactcttggtgttgcacatactatgagtttggacaattctataatagcatgtatccaccattgtggtatcatgcagagtaactgcactgccctaaaaatcctctgtgctctgcccgttcatccctccctccctcttaacctctgggaaccacagaccttctttcttgctttgtagttgcacctttttcagaacagcatattcagtagttggaatcatacagcatgtgggcttttcagactggtttctttcacttagtaatattgcacctcagctacctctatgtcttctcaaactttataactcatttctttttagcactgaatagtatttcattgtctggatataccaaagtttatttatccatccacctactaaggaaattctgattgctaactattttttatgattctttggtttgatctgatattcttctgttttgcttgctgktgggtaggctggcattatggctggcatgcctgacagtgtggcacaggctgcccatcaggaactcagttctgactgagggacagtttcctcagggtttctttaggtaaatcccttcatgtggctgcatgtacttcctcactggctgattttaaagaccccttctgagttctaaatatgaatttttgaatctttaaatggccatactattattgctttagaaatgtccataatgctgcaccctagaacctctatattatactgtgaggcaggtctttctctacatttgcctgagagttagtagctgtggattaaagttattacaatttatagaggtttattgtctctctgaatgactcaatgaagtgtatccttatgaactttaacacacaggttctaggaggtatggccattaatatttcagaatttgttataaagagtcaaatagccacacacttgacttcatcttgatcctaagcatttttttaactggcagcacctagatttcatttcttccttaaggcggccagataaaaagcctgtaacaagaaacnnnnnnnnnnnnnnnnnnnnnnnnnnnnnnnnnnnnnnnnnnnnnnnnnnnnnnnnnnnnnnnnnnnnnnnnnnnnnnnnnnnnnnnnnnnnnnnnnnnnggtagtaaataacattattttatattttatcaagcctccaatacata

SEQ ID NO: 725821 - DNA, 1938 bp, Homo sapiens
  misc_feature 1792, 1793, 1794, 1795, 1796, 1797, 1798, 1799, 1800, 1801,1802, 1803, 1804, 1805, 1806, 1807, 1808, 1809, 1810, 1811,1812, 1813, 1814, 1815, 1816, 1817, 1818, 1819, 1820, 1821,1822, 1823, 1824, 1825, 1826, 1827, 1828, 1829, 1830: n = A,T,C or G
  misc_feature 1831, 1832, 1833, 1834, 1835, 1836, 1837, 1838, 1839, 1840,1841, 1842, 1843, 1844, 1845, 1846, 1847, 1848, 1849, 1850,1851, 1852, 1853, 1854, 1855, 1856, 1857, 1858, 1859, 1860,1861, 1862, 1863, 1864, 1865, 1866, 1867, 1868, 1869: n = A,T,C or G
  misc_feature 1870, 1871, 1872, 1873, 1874, 1875, 1876, 1877, 1878, 1879,1880, 1881, 1882, 1883, 1884, 1885, 1886, 1887, 1888, 1889,1890, 1891: n = A,T,C or G
agtattgaacaaaatgcaatcatacagaatttaatataatatcccttataaagtttaaatacatcaaagtgctattgtgtatcactttcatagcatacaagtataaaagaggagacatcatctaaagtccattaagagagctgtgattgcgaagaagtgactgaaaatcatcattttttttcctagaacagatactgtagttaggaatagcataaaagagatcaggagaggaaaattatccccagacagtcacgtatcatttattctaataatctgccacactcacatatggatgggttgatatgagcatgttacatcttctaatgggggctataaatcagcaaggagtgaacacacacgtgcacacacacaaacacacccatattaatttactgatttttgtagtcaacattatcaaaaatagtgatgagccctatgaacaggaggagatgcagcatatttgatgggtaataatttaagtataaattaaatacctaaaattttattgtatttttatgcaaattactttggtccttatttcaattatctattacttggagaaaaaaacagtccaaatattgaagttcaaaataaatatgtattgaaatactttacttttggagcaatttatgcttatagcacaactgagcagaaagtacagagttcccatataccttctgcaaccacccatgtacagcctcccccattatcagcatcccccaccagagtggtacagttgatacaatgatgaacacatcattatttcccaaagtcaatagttcaccttaaggttcactcttggtgttgcacatactatgagtttggacaattctataatagcatgtatccaccattgtggtatcatgcagagtaactgcactgccctaaaaatcctctgtgctctgcccgttcatccctccctccctcttaacctctgggaaccacagaccttctttcttgctttgtagttgcacctttttcagaacagcatattcagtagttggaatcatacagcatgtgggcttttcagactggtttctttcacttagtaatattgcacctcagctacctctatgtcttctcaaactttataactcatttctttttagcactgaatagtatttcattgtctggatataccaaagtttatttatccatccacctactaaggaaattctgattgctaactattttttatgattctttggtttgatctgatattcttctgttttgcttgctggtgggtaggctggcattatggctggcatgcctgacagtgtggcacaggctgcccatcaggaactcagttctgactgagggacagtttcctcagggtttctttaggtaaatcccttcatgtggctgcatgtacttcctcactggctgattttaaagaccccttctgagttctaaatatgaatttttgaatctttaaatggccatactattattgctttagaaatgtccataatgctgcaccctagaacctctatattatactgtgaggcaggtctttctctacatttgcctgagagttagtagctgtggattaaagttattacaatttatagaggtttattgtctctctgaatgactcaatgargtgtatccttatgaactttaacacacaggttctaggaggtatggccattaatatttcagaatttgttataaagagtcaaatagccacacacttgacttcatcttgatcctaagcatttttttaactggcagcacctagatttcatttcttccttaaggcggccagataaaaagcctgtaacaagaaacnnnnnnnnnnnnnnnnnnnnnnnnnnnnnnnnnnnnnnnnnnnnnnnnnnnnnnnnnnnnnnnnnnnnnnnnnnnnnnnnnnnnnnnnnnnnnnnnnnnnggtagtaaataacattattttatattttatcaagcctccaatacata

SEQ ID NO: 725822 - DNA, 694 bp, Homo sapiens
gaccttaaggtaaagtcttaaataataaaatcatgacaaatttaaaatcttacaaaaatgccagaaattattacaaagaacttctcatttttacaagtattactagaagtgacaaatgagaatgatcactataaaattttctgtttgtcattttgttttgaaatttctggctaaagccaaaccatgtgaaaattagaaagaggtaaaaagaattattggaaaggtttagataaatttatcatatcttgtgacttatatatggttacataagacaatgacataacaagaaaatctaagaaaacaaattaaatatacctgttagataaattttcttttaattaaaagtagaggatgatgatactattgtttttaaggcatctggtagcatttaccactccaaattcataaattttaataccatgtagatatcatgaatttgtcttccagtatttaaaataaggttgtttttgatatttttaaaaggataactctttttgtgtagaacatcatgaacacttcaggttgtttaccagttctgctgtgctcaaaattaagtgcacgtgccaacctcaatcactgagactttcaagaaagctgctgcctattkccaaactttctgtgcagagtggagagcgggagggcaggaaaagagatctaccatgctctgttgataaacagtgatccagaaggagca

SEQ ID NO: 725823 - DNA, 889 bp, Homo sapiens
tcaggcacaacacacacccaggcacagtgctcactcaggcacagtactcacccagacatagtgcttgcccgcccaggcacagtgctcacccaggcacagagctcacccaggcacaatacacacccaggcacagtgctcactcaggcacagcactcacccaggcacagtactcacccagacatagtgcttgcccgcccaggcacagtactcacccaggcacagcgctcaccaaggcacagcactcacccaggcacagcgctcacccaggcacagtactcacctaggcacagtgctcacccatgtaggtacagtgttcacccgcccaggcacagtgcttgcctgcccaggcacagtgctcacccaggcacagtacttgcccaggcacagtgcttgcctccccaggcacagtgctcacccacctaggcagtgctcgccaggcccgtgccaggctccacaatgccactcagcrctgtgttcttcagaactgattccacgaccacgtgccccatcaattgccagtgccttcttggcattgccttcctcaaaggtgtttgtgtgttcctttttaaaaaagcgaggagctacctggagagacctgcctggtgagcctgaaagcacacattcttagaaggatgacaataactcatcctagctcttcatctctgccgtggtgaagggcgtgagacaaacgcagcaccggcttcgtggctcggtgagtcggccacagcagcccacagggacgttccagcatctcctcactagatggcgacgacctcacaagttcctaatccattgagccagcacctgtcccaaggccagcaactgcttccagcagtttctttaggaaaaatatcctgagcagtgccttgccttgtggctgaaaccatcc

SEQ ID NO: 725824 - DNA, 889 bp, Homo sapiens
tcaggcacaacacacacccaggcacagtgctcactcaggcacagtactcacccagacatagtgcttgcccgcccaggcacagtgctcacccaggcacagagctcacccaggcacaatacacacccaggcacagtgctcactcaggcacagcactcacccaggcacagtactcacccagacatagtgcttgcccgcccaggcacagtactcacccaggcacagcgctcaccaaggcacagcactcacccaggcacagcgctcacccaggcacagtactcacctaggcacagtgctcacccatgtaggtacagtgttcacccgcccaggcacagtgcttgcctgcccaggcacagtgctcacccaggcacagtacttgcccaggcacagtgcttgcctccccaggcacagtgctcacccacctaggcagtgctcgccaggcccgtgccaggctccacaatgccactcagcactgtgttcttcagaactgattccacgaccacgtgccccatcaattgccagtgccttcttggcattgccttcctcaaaggtgtttgtgtgttcctttttaaaaaagcgaggagctacctggagagacctgcctggtgagcctgaaagcacacattcttagaaggatgacaataactcatcctagctcttcatctctgccgtggtgaagggcgtgagacaaacgcagcaccggcttcgtggctcggtgagtcggccacagcagcccacagggaygttccagcatctcctcactagatggcgacgacctcacaagttcctaatccattgagccagcacctgtcccaaggccagcaactgcttccagcagtttctttaggaaaaatatcctgagcagtgccttgccttgtggctgaaaccatcc

SEQ ID NO: 725825 - DNA, 1556 bp, Homo sapiens
gcttcctttctgtgagtgttaactgagcactttctgtatgcctggcttcctttccgtgactgttaactgagcactttctgtatgtctggcttcctttccatgagtgttaactgagcactttctgtatgcctggcttcctttccgtgagtgttaactgagcactttctgtaggcctggcttcctttccgtgactgttaactgagcactttctgtatgcctggcttcctttccgtgagtgttaactgagcactttctgtaggcctggcttcctttccgtgastgttaactgagcactttctgtaggcctggcttcctttccgtgactgttaactgagtgctttctgtatgtctggcttcctttccgtgagtgttaactgagcactttctgtatgtctggcttcctttccgtgagtgttaactgagcactttctgtaggcctggcttcctttctgtgactgttaactgagcactttctgtatgcctgacttcctttgggtgaagctgtggtaaacaccgtgaaggaccctcagctccagttgggagaggagaaagacccttagaggatttaaaggactatttgctaatgttgtccagaggccatttgtccccagggaacagaaaggcagggactggagggagctgagctgccagggctttgctgtttgaattgtgtccaccgagtgccgcaggcttcccgggaggaggaaagaacccagtgccatgggggatggatggggaagctgaggcagggctgggaaactggctagcctggagtggagggcctgttttggaaggttgtaaatgagaatgattgcatataggggaaggagaggtgatatctgtggtttccagtctgacattgaccttttggatgaagccattaagcgtttgcttccacggatgctgcacgcagagcaggtggtgaggtccatggcccctccctccatccagggtgggcctttgcaacttcctaggaccactgagcgtggtggacctagagtagcccccaccttatccatggggatacatcccaagacccccagcagatgcctgaaatcacatagtacctgacccctacgtgtgctgtgtttttcctatagagtgacaggcgagacagcgcagagtctggttacactggactaagggatgatttgtgtctcaggatacagaggcacagcccagatttcataacactgctcagaactgaccacaacttaaaacttaaaattgatttgtttctagaactttccacttaatatttttggaccaagattgaccgcaggtcactgaaaccgtggaaagtgcaattgtggacaagggggctactgtaatgctctggatttcctagaattcgccgtagcatggtctatgttttcatgttgctttttggggatgcttggaggaagcccacaggaagtgtggatgtgggggccacgtggggaacccctgaggcccgtggcctgcagcctgtaccaccttgccagccatgcggttaagagactttagggggacccctccagcctccacctgagtcgtcgcagctaacaccacacaga

SEQ ID NO: 725826 - DNA, 1556 bp, Homo sapiens
gcttcctttctgtgagtgttaactgagcactttctgtatgcctggcttcctttccgtgactgttaactgagcactttctgtatgtctggcttcctttccatgagtgttaactgagcactttctgtatgcctggcttcctttccgtgagtgttaactgagcactttctgtaggcctggcttcctttccgtgactgttaactgagcactttctgtatgcctggcttcctttccgtgagtgttaactgagcactttctgtaggcctggcttcctttccgtgagtgttaactgagcrctttctgtaggcctggcttcctttccgtgactgttaactgagtgctttctgtatgtctggcttcctttccgtgagtgttaactgagcactttctgtatgtctggcttcctttccgtgagtgttaactgagcactttctgtaggcctggcttcctttctgtgactgttaactgagcactttctgtatgcctgacttcctttgggtgaagctgtggtaaacaccgtgaaggaccctcagctccagttgggagaggagaaagacccttagaggatttaaaggactatttgctaatgttgtccagaggccatttgtccccagggaacagaaaggcagggactggagggagctgagctgccagggctttgctgtttgaattgtgtccaccgagtgccgcaggcttcccgggaggaggaaagaacccagtgccatgggggatggatggggaagctgaggcagggctgggaaactggctagcctggagtggagggcctgttttggaaggttgtaaatgagaatgattgcatataggggaaggagaggtgatatctgtggtttccagtctgacattgaccttttggatgaagccattaagcgtttgcttccacggatgctgcacgcagagcaggtggtgaggtccatggcccctccctccatccagggtgggcctttgcaacttcctaggaccactgagcgtggtggacctagagtagcccccaccttatccatggggatacatcccaagacccccagcagatgcctgaaatcacatagtacctgacccctacgtgtgctgtgtttttcctatagagtgacaggcgagacagcgcagagtctggttacactggactaagggatgatttgtgtctcaggatacagaggcacagcccagatttcataacactgctcagaactgaccacaacttaaaacttaaaattgatttgtttctagaactttccacttaatatttttggaccaagattgaccgcaggtcactgaaaccgtggaaagtgcaattgtggacaagggggctactgtaatgctctggatttcctagaattcgccgtagcatggtctatgttttcatgttgctttttggggatgcttggaggaagcccacaggaagtgtggatgtgggggccacgtggggaacccctgaggcccgtggcctgcagcctgtaccaccttgccagccatgcggttaagagactttagggggacccctccagcctccacctgagtcgtcgcagctaacaccacacaga

SEQ ID NO: 725827 - DNA, 1556 bp, Homo sapiens
gcttcctttctgtgagtgttaactgagcactttctgtatgcctggcttcctttccgtgactgttaactgagcactttctgtatgtctggcttcctttccatgagtgttaactgagcactttctgtatgcctggcttcctttccgtgagtgttaactgagcactttctgtaggcctggcttcctttccgtgactgttaactgagcactttctgtatgcctggcttcctttccgtgagtgttaactgagcactttctgtaggcctggcttcctttccgtgagtgttaactgagcactttctgtaggcctggcttcctttccgtgactgttaactgagtgctttctgtatgtctggcttcctttccgtgagtgttaactgagcactttctgtatgyctggcttcctttccgtgagtgttaactgagcactttctgtaggcctggcttcctttctgtgactgttaactgagcactttctgtatgcctgacttcctttgggtgaagctgtggtaaacaccgtgaaggaccctcagctccagttgggagaggagaaagacccttagaggatttaaaggactatttgctaatgttgtccagaggccatttgtccccagggaacagaaaggcagggactggagggagctgagctgccagggctttgctgtttgaattgtgtccaccgagtgccgcaggcttcccgggaggaggaaagaacccagtgccatgggggatggatggggaagctgaggcagggctgggaaactggctagcctggagtggagggcctgttttggaaggttgtaaatgagaatgattgcatataggggaaggagaggtgatatctgtggtttccagtctgacattgaccttttggatgaagccattaagcgtttgcttccacggatgctgcacgcagagcaggtggtgaggtccatggcccctccctccatccagggtgggcctttgcaacttcctaggaccactgagcgtggtggacctagagtagcccccaccttatccatggggatacatcccaagacccccagcagatgcctgaaatcacatagtacctgacccctacgtgtgctgtgtttttcctatagagtgacaggcgagacagcgcagagtctggttacactggactaagggatgatttgtgtctcaggatacagaggcacagcccagatttcataacactgctcagaactgaccacaacttaaaacttaaaattgatttgtttctagaactttccacttaatatttttggaccaagattgaccgcaggtcactgaaaccgtggaaagtgcaattgtggacaagggggctactgtaatgctctggatttcctagaattcgccgtagcatggtctatgttttcatgttgctttttggggatgcttggaggaagcccacaggaagtgtggatgtgggggccacgtggggaacccctgaggcccgtggcctgcagcctgtaccaccttgccagccatgcggttaagagactttagggggacccctccagcctccacctgagtcgtcgcagctaacaccacacaga

SEQ ID NO: 725828 - DNA, 1556 bp, Homo sapiens
gcttcctttctgtgagtgttaactgagcactttctgtatgcctggcttcctttccgtgactgttaactgagcactttctgtatgtctggcttcctttccatgagtgttaactgagcactttctgtatgcctggcttcctttccgtgagtgttaactgagcactttctgtaggcctggcttcctttccgtgactgttaactgagcactttctgtatgcctggcttcctttccgtgagtgttaactgagcactttctgtaggcctggcttcctttccgtgagtgttaactgagcactttctgtaggcctggcttcctttccgtgactgttaactgagtgctttctgtatgtctggcttcctttccgtgagtgttaactgagcactttctgtatgtctggcttcctttccstgagtgttaactgagcactttctgtaggcctggcttcctttctgtgactgttaactgagcactttctgtatgcctgacttcctttgggtgaagctgtggtaaacaccgtgaaggaccctcagctccagttgggagaggagaaagacccttagaggatttaaaggactatttgctaatgttgtccagaggccatttgtccccagggaacagaaaggcagggactggagggagctgagctgccagggctttgctgtttgaattgtgtccaccgagtgccgcaggcttcccgggaggaggaaagaacccagtgccatgggggatggatggggaagctgaggcagggctgggaaactggctagcctggagtggagggcctgttttggaaggttgtaaatgagaatgattgcatataggggaaggagaggtgatatctgtggtttccagtctgacattgaccttttggatgaagccattaagcgtttgcttccacggatgctgcacgcagagcaggtggtgaggtccatggcccctccctccatccagggtgggcctttgcaacttcctaggaccactgagcgtggtggacctagagtagcccccaccttatccatggggatacatcccaagacccccagcagatgcctgaaatcacatagtacctgacccctacgtgtgctgtgtttttcctatagagtgacaggcgagacagcgcagagtctggttacactggactaagggatgatttgtgtctcaggatacagaggcacagcccagatttcataacactgctcagaactgaccacaacttaaaacttaaaattgatttgtttctagaactttccacttaatatttttggaccaagattgaccgcaggtcactgaaaccgtggaaagtgcaattgtggacaagggggctactgtaatgctctggatttcctagaattcgccgtagcatggtctatgttttcatgttgctttttggggatgcttggaggaagcccacaggaagtgtggatgtgggggccacgtggggaacccctgaggcccgtggcctgcagcctgtaccaccttgccagccatgcggttaagagactttagggggacccctccagcctccacctgagtcgtcgcagctaacaccacacaga

SEQ ID NO: 725829 - DNA, 1556 bp, Homo sapiens
gcttcctttctgtgagtgttaactgagcactttctgtatgcctggcttcctttccgtgactgttaactgagcactttctgtatgtctggcttcctttccatgagtgttaactgagcactttctgtatgcctggcttcctttccgtgagtgttaactgagcactttctgtaggcctggcttcctttccgtgactgttaactgagcactttctgtatgcctggcttcctttccgtgagtgttaactgagcactttctgtaggcctggcttcctttccgtgagtgttaactgagcactttctgtaggcctggcttcctttccgtgactgttaactgagtgctttctgtatgtctggcttcctttccgtgagtgttaactgagcactttctgtatgtctggcttcctttccgtgagtgttaactgagcactttctgtaggcctggcttcctttctgtgactgttaactgagcactttctgtatgcctgacttcctttgggtgaagctgtggtaaacaccgtgaaggaccctcagctccagttgggagaggagaaagacccttagaggatttaaaggactatttgctaatgttgtccagaggccatttgtccccagggaacagaaaggcagggactggagggagctgagctgccagggctttgctgtttgaattgtgtccaccgagtgccgcaggcttcccgggaggaggaaagaacccagtgccatgggggatggatggggaagctgaggcagggctgggaaactggctagcctggagtggagggcctgttttggaaggttgtaaatgagaatgattgcatataggggaaggagaggtgatatctgtggtttccagtctgacattgaccttttggatgaagccattaagcgtttgcttccacggatgctgcacgcagagcaggtggtgaggtccatggcccctccctccatccagggtgggcctttgcaacttcctaggaccactgagcgtggtggacctagagtagcccccaccttatccatggggatacatcccaagacccccagcagatgcctgaaatcacatagtacctgacccctacgtgtgctgtgtttttcctatagagtgacaggcgagacagcgcagagtctggttacactggackaagggatgatttgtgtctcaggatacagaggcacagcccagatttcataacactgctcagaactgaccacaacttaaaacttaaaattgatttgtttctagaactttccacttaatatttttggaccaagattgaccgcaggtcactgaaaccgtggaaagtgcaattgtggacaagggggctactgtaatgctctggatttcctagaattcgccgtagcatggtctatgttttcatgttgctttttggggatgcttggaggaagcccacaggaagtgtggatgtgggggccacgtggggaacccctgaggcccgtggcctgcagcctgtaccaccttgccagccatgcggttaagagactttagggggacccctccagcctccacctgagtcgtcgcagctaacaccacacaga

SEQ ID NO: 725830 - DNA, 1556 bp, Homo sapiens
gcttcctttctgtgagtgttaactgagcactttctgtatgcctggcttcctttccgtgactgttaactgagcactttctgtatgtctggcttcctttccatgagtgttaactgagcactttctgtatgcctggcttcctttccgtgagtgttaactgagcactttctgtaggcctggcttcctttccgtgactgttaactgagcactttctgtatgcctggcttcctttccgtgagtgttaactgagcactttctgtaggcctggcttcctttccgtgagtgttaactgagcactttctgtaggcctggcttcctttccgtgactgttaactgagtgctttctgtatgtctggcttcctttccgtgagtgttaactgagcactttctgtatgtctggcttcctttccgtgagtgttaactgagcactttctgtaggcctggcttcctttctgtgactgttaactgagcactttctgtatgcctgacttcctttgggtgaagctgtggtaaacaccgtgaaggaccctcagctccagttgggagaggagaaagacccttagaggatttaaaggactatttgctaatgttgtccagaggccatttgtccccagggaacagaaaggcagggactggagggagctgagctgccagggctttgctgtttgaattgtgtccaccgagtgccgcaggcttcccgggaggaggaaagaacccagtgccatgggggatggatggggaagctgaggcagggctgggaaactggctagcctggagtggagggcctgttttggaaggttgtaaatgagaatgattgcatataggggaaggagaggtgatatctgtggtttccagtctgacattgaccttttggatgaagccattaagcgtttgcttccacggatgctgcacgcagagcaggtggtgaggtccatggcccctccctccatccagggtgggcctttgcaacttcctaggaccactgagcgtggtggacctagagtagcccccaccttatccatggggatacatcccaagacccccagcagatgcctgaaatcacatagtacctgacccctacgtgtgctgtgtttttcctatagagtgacaggcgagacagcgcagagtctggttacactggactaagggatgatttgtgtctcaggatacagaggcacagcccagatttcataacactgctcagaactgaccacaacttaaaacttaaaattgatttgtttctagaactttccacttaatatttttggaccaagattgaccgcaggtcactgaaaccgtggaaagtgcaattgtggmcaagggggctactgtaatgctctggatttcctagaattcgccgtagcatggtctatgttttcatgttgctttttggggatgcttggaggaagcccacaggaagtgtggatgtgggggccacgtggggaacccctgaggcccgtggcctgcagcctgtaccaccttgccagccatgcggttaagagactttagggggacccctccagcctccacctgagtcgtcgcagctaacaccacacaga

SEQ ID NO: 725831 - DNA, 1022 bp, Homo sapiens
atgatgtgttaaatctaccaaaaatgaattagtggatgatttgtagcattgcaaagtcttctttatctaaaaagattttaccttatgacaccttaaagactgagccctacagtgcatttaagcactttttctaaagattattaactggaaaagagtaaactttaaattattcagagcttgaatcagcaccaatcagaaaaagcaaattcttaaattttaattccaatgatctatcataataagatagtgttatgtatctagatacactctgtgcttaaatacagttttaatgtattacaaggtccactaatgacagtggattttaaaattagtaatatttactgatttcctgcattgaaataagtcacaaagttactgtttgtatcttaacaccaaaggtcccaatctacaaggcacgaytgggttgattttataagcccattttctccctgaatgtagacaacgaagtgaactagagaccaaaagccaaaataaatatttaatgttggcactaatgattggcaatataaatctccaaattttgaactactgggaatgagtactcctttcacatgaatttagctcagcggccattactgttcaattgtttatcatttctcatgctaaatagtaaaatgcaacattcaatgttacattctttatcatgtaaggaggttataaaaacggaagaccacataaaattctaaaaattgtttgcctctatatcaagagttaaacaatagctatgagatactatagattctaagaatattttaaaatttatatatcattaaaaatgctttcaaagctaaatgttaaattatgatctattgattccaaacagctagtgtgaaaaataatttcatttggtctatgtcacgtcattagagcaaagaaaacaatataaaatcagtactgaagttcaaatttttacgtacctgtggcttgttattttcacttccttcaagcctttctggctcttgctctgacgtcacttttaaatcttgttctgctgacaaatc

SEQ ID NO: 725832 - DNA, 1443 bp, Homo sapiens
ccgacactcaatgaataccttaaaattctgtctaaacaaataagtacctgggaaatatttaagaaaaaaacatataaaattcagctagctctcaattaagtgttatattggtctaaattgaataaattcatataggttagtcaaacaaattttataggaaaagtttctctagaaattaaaattaaaatataacaaattttacatgagctattttctttatagcatcattattaaaaattcaagcacatactgtagatgcagtacttttaaaaagagttttaaataaaaaacattgtcaactattttataaaaatacttgaaagctctggtgtggaaaacaaacttaaaagtagataataagcatgattgtatgtaaatgcttatatcagagacaaatgggaaaaagtttattaaaatcttaaaaatacagttaaataaaatttgttttaaaaaggcatgtttaatcgcaggaaattttatggatagtctattaataaatgaacataatataaaagttgttatcctaaattctcagttccataaacaatataaattctctggtaaaattctcatctttgacatatggcctaaaaatttcagcagattactttaccacataaactttttgttgttgttgtttctaacaagtgttcttttgagcgttaattttgaacaatcagtccctgaaacccgctatcccagcatgttgtctactattataaaactatgttattcaagggaggaaaaatatctatcaacatacctacttaaattttctacttatggaaatttttgtaaggaaatttcaagtcagaagtaaataaatgacagatcagtgccagagtcacatagttcctattggtaacaagatagaaatctaacatttctatttcaaatgacatattctaaaatacagaggtacattttggagtcaggatttagtagttattagaataacatccccatatggccaagaacaaatacaattttatcatcaataagatactagataaaggcaactagaaataatgcctgattacctacaaaggtaaccccatsaggctaacagtggacttctcagcagaaaccataaaagccagaagagactgggggcctagtttcagcattcttaaagaaaagaaattctaatcaagaatttcacaccctgccaaactaagcttcataagtgaaggagaaataaagtctttctcagacaagcaatcactaagggaattcattgccactagaccagccttacaagtgttctttaagggagttctaaacatggagatgagcaatatctgctcccataaaactatacctaagtacctagcccacagacactttaaagcatctacacaatagaaactacaaaacacaatctgacaactttatgatagaatcagaacctcccatatcaatattaatcttgaatttaaatgg

SEQ ID NO: 725833 - DNA, 2270 bp, Homo sapiens
actgagaccacattaaaaggtgatacttattttgcagttttgcttcaggaaatttcatgtgaaagaacttttcatrgcttttctcacttcataatttaaattaaacacttctctgtctccaaattgagtccaattacagagtcattataggcttgcaaaattgttagtttgtggcagaaatttaagcttgctatagatccattctcaaggtcctgcactcttccccaataagactgcaattttatgtatacagaaaaggtgagaccctctcaaactcaggagaaaggtcagtctcccatgggaaacttggagttaatctgcattaaagagacgttagtttgtaagagtaaacctttatattgaacttttttttttttttacctaatttctcagtatcactacaactttcatcaaccagtcatcaacattgaaaccgtaagcattgccctccgttcctgtttcgtcaatctgtttccctggtatgactctaatgtatgagacctccaaggttcaactgtttgtggatgggaagagaaaaagcagatttttgtctgctcccagtgttctctgaaatatgtgacaagccctgcaggagataacattttggatgccaaactctcattaccacattaattgcctctgtcatgacagtttgggccggagcaaatggctgggaacctgctgtgctcctcaagagagcaacacaggccaagggaaagtgggtctgaagtttcccaagcagtcggctgaaaggtgctgttatcagagcatagtctggatttgtctttacgtcttgagtcactgttaaattggtgggggagtggctctcaaaaatctttgttcctaaaacttatgaaagatattcatgtaaacaagtaaaaatcgggttaaattctgttttatcagcaggacattttcaccataagtgattgtccaattgactgtcaaagcaacaaaaggtgaaggaggtgagtgtatagtctaaagataaaagctccaaatgggctttcagtgtcccttcatctccaagctgaatgaacaggatgtaatcacagcagcgcatgagagggcaatttgaacagagtggatactaagtaacatttgaagtcaaagcaaaatcaaaagaaaattctcttaatactccctcctcccaatataattaacgttaaagtattctttttaattaacataattagaggcttaattattgaaagtcgggttaaagatgaaaagtatcatataattaaaataattatttttctttaacctccaaaggaaaacaaagcagtttttctctcatagtcatttaaacttcagtaatatttcttatataaaagtagttataagatttaatacagacattggtaaaggagtggggtgaatagagtttgtgaagactcttactgtacacaacgagaagatgtttttaatctctctttggtcacaaaggagttcaataatttaggttttaatgatagtactattgtcatgcacagaacatgtcaaaataaattggtacaatcttttcataaagagatttaaaaataaaggttctaaaaaattcaaaatacagaataaaaactatgaacatacatgcatcacagccttactcgtaatatagaaattctggtaaaaaatattgcacattattggaataaagactatgctactgtaataacaatgccctaaatacagcttggataagagagaagtttattcatgtcttacacaagagtctggttaataacttagacaattttgttcataagaacagaaagtactgttcttaatagacagttatgttctataagattcagaaacttaggttgttttaattttcctcctctgctgcctccatgtgtaatttctctctctagatagtcaaagctgggtcactaccacctctggcattcagcctgaggaaagaggaaggagcatgagcaaagattgcttttaagatgcaggtttgggctggtcgcagtggctcacacctgtaatcccagcactttgggaggccaaggtgggtggatcacctgaggtcaggagttcgagaccagcctggccaacatggtgaaaccccatctctactaaaaatacaaaaattagccgggcgtggtggcacatgcctgtaattacagctactcgggaggctgaggcatgagacttgcttgaacccaggaggcggagcttgcagtgagtcgagaacgtgccactgcacttcagcatgagtgacagagcgagactgtctcaaaaaaagaagaaaaaaaaaa

SEQ ID NO: 725834 - DNA, 2270 bp, Homo sapiens
actgagaccacattaaaaggtgatacttattttgcagttttgcttcaggaaatttcatgtgaaagaacttttcatggcttttctcacttcataatttaaattaaacacttctctgtctccaaattgagtccaattacagagtcattataggcttgcaaaattgttagtttgtggcagaaatttaagcttgctatagatccattctcaaggtcctgcactcttccccaataagactgcaattttatgtatacagaaaaggtgagaccctctcaaactcaggagaaaggtcagtctcccatgggaaacttggagttaatctgcattaaagagacgttagtttgtaagagtaaacctttatattgaacttttttttttttttacctaatttctcagtatcactacaactttcatcaaccagtcatcaacattgaaaccgtaagcattgccctccgttcctgtttcgtcaatctgtttccctggtatgactctaatgtatgagacctccaaggttcaactgtttgtggatgggaagagaaaaagcagatttttgtctgctcccagtgttctctgaaatatgtgacaagccctgcaggagataacattttggatgccaaactctcattaccacattaattgcctctgtcatgacagtttgggcckgagcaaatggctgggaacctgctgtgctcctcaagagagcaacacaggccaagggaaagtgggtctgaagtttcccaagcagtcggctgaaaggtgctgttatcagagcatagtctggatttgtctttacgtcttgagtcactgttaaattggtgggggagtggctctcaaaaatctttgttcctaaaacttatgaaagatattcatgtaaacaagtaaaaatcgggttaaattctgttttatcagcaggacattttcaccataagtgattgtccaattgactgtcaaagcaacaaaaggtgaaggaggtgagtgtatagtctaaagataaaagctccaaatgggctttcagtgtcccttcatctccaagctgaatgaacaggatgtaatcacagcagcgcatgagagggcaatttgaacagagtggatactaagtaacatttgaagtcaaagcaaaatcaaaagaaaattctcttaatactccctcctcccaatataattaacgttaaagtattctttttaattaacataattagaggcttaattattgaaagtcgggttaaagatgaaaagtatcatataattaaaataattatttttctttaacctccaaaggaaaacaaagcagtttttctctcatagtcatttaaacttcagtaatatttcttatataaaagtagttataagatttaatacagacattggtaaaggagtggggtgaatagagtttgtgaagactcttactgtacacaacgagaagatgtttttaatctctctttggtcacaaaggagttcaataatttaggttttaatgatagtactattgtcatgcacagaacatgtcaaaataaattggtacaatcttttcataaagagatttaaaaataaaggttctaaaaaattcaaaatacagaataaaaactatgaacatacatgcatcacagccttactcgtaatatagaaattctggtaaaaaatattgcacattattggaataaagactatgctactgtaataacaatgccctaaatacagcttggataagagagaagtttattcatgtcttacacaagagtctggttaataacttagacaattttgttcataagaacagaaagtactgttcttaatagacagttatgttctataagattcagaaacttaggttgttttaattttcctcctctgctgcctccatgtgtaatttctctctctagatagtcaaagctgggtcactaccacctctggcattcagcctgaggaaagaggaaggagcatgagcaaagattgcttttaagatgcaggtttgggctggtcgcagtggctcacacctgtaatcccagcactttgggaggccaaggtgggtggatcacctgaggtcaggagttcgagaccagcctggccaacatggtgaaaccccatctctactaaaaatacaaaaattagccgggcgtggtggcacatgcctgtaattacagctactcgggaggctgaggcatgagacttgcttgaacccaggaggcggagcttgcagtgagtcgagaacgtgccactgcacttcagcatgagtgacagagcgagactgtctcaaaaaaagaagaaaaaaaaaa

SEQ ID NO: 725835 - DNA, 632 bp, Homo sapiens
ttcacagaactaccaagcagcttatagatataatgcaatatattgaacctaatgcaaacaataaatagatgtagccaggcatggtgtttcatacctgtagacccagctaattgggaggccgaggcaggagaatcacttgagcccaggagttcaagaccagcctgggcaagatagtgagaccccatctcaaaaaatcaattatttattaattaagaaaagaaatgtaattcctttcttctattagattacgacctataagaaagaatagtaaacactacaaatctgactgtattatgggttataatgaaagacatacaatgcaccaatatgatgtatacataatttaattatatatattttatcaggcagagtggacaagccttaaccaaacctgtctsagttactctaaagactacactctaggtggagccaagatagccgactagaaacagcggcaatcaaaggctcctatgaaaaagaaccataattggtgcgtaaatccttcatgggcaaccaagctacccaggttctctcatcaggactgacttaggcacctgatgtgatccatgataaggaaggaagagcagtggagtgtggcagccacctaagagccacacggggcaggggagttc

SEQ ID NO: 725836 - DNA, 632 bp, Homo sapiens
ttcacagaactaccaagcagcttatagatataatgcaatatattgaacctaatgcaaacaataaatagatgtagccaggcatggtgtttcatacctgtagacccagctaattgggaggccgaggcaggagaatcacttgagcccaggagttcaagaccagcctgggcaagatagtgagaccccatctcaaaaaatcaattatttattaattaagaaaagaaatgtaattcctttcttctattagattacgacctataagaaagaatagtaaacactacaaatctgactgtattatgggttataatgaaagacatacaatgcaccaatatgatgtatacataatttaattatatatattttatcaggcagagtggacaagccttaaccaaacctgtctcagttactctaaagactacactctaggtggagccaagatagccgactagaaacagcrgcaatcaaaggctcctatgaaaaagaaccataattggtgcgtaaatccttcatgggcaaccaagctacccaggttctctcatcaggactgacttaggcacctgatgtgatccatgataaggaaggaagagcagtggagtgtggcagccacctaagagccacacggggcaggggagttc

SEQ ID NO: 725837 - DNA, 622 bp, Homo sapiens
taattctttcaatttttgatttacagatttaaaactatattttgaagtatattcaaatttagaatcattgtgactttctaatagatggatccttttatcattattaaatatatctctttatttttagtaatgctttctcaattaagatcaacttgtcagataattgcatagctgtacttactttcatttggttgatatttgaagggtatatcgttttctattattttactttcacactttccagattcttacacctaaccatatattaggatgtctcttttgtaagcagcttagtgtcgctattattaaaaaatccaatctgatgatcattgtgttttaattggaatatttatttaatttacatttaatgtgatttcaaatatatttaaatctaaatttatcatttaccctttgtttcctatttgctatgttttaaaatttcctttttcttctcctttcttggcttcttttgaattaatgtttttatgatttctatttccttctstatcattccctttgtgattggcctagagagtataccatccatctgtatcttattatcagtcttctatatatcataatcttcctgaacaactctagaacttcacaacattttaactcc

SEQ ID NO: 725838 - DNA, 1409 bp, Homo sapiens
  misc_feature 78, 79, 80, 81, 82, 83, 84, 85, 86, 87, 88, 89, 90, 91, 92,93, 94, 95, 96, 97, 98, 99, 100, 101, 102, 103, 104, 105,106, 107, 108, 109, 110, 111, 112, 113, 114, 115, 116, 117,118, 119, 120, 121, 122, 123, 124, 125, 126, 127, 128: n = A,T,C or G
  misc_feature 129, 130, 131, 132, 133, 134, 135, 136, 137, 138, 139, 140,141, 142, 143, 144, 145, 146, 147, 148, 149, 150, 151, 152,153, 154, 155, 156, 157, 158, 159, 160, 161, 162, 163, 164,165, 166, 167, 168, 169, 170, 171, 172, 173, 174, 175: n = A,T,C or G
  misc_feature 176, 177: n = A,T,C or G
ccgggcgggcgggggcggcgtgttcgcgtgtcccggggtgtgcgcgtccccggcgggtgtgcgcgtgtacccctgtgnnnnnnnnnnnnnnnnnnnnnnnnnnnnnnnnnnnnnnnnnnnnnnnnnnnnnnnnnnnnnnnnnnnnnnnnnnnnnnnnnnnnnnnnnnnnnnnnnnnncgggcatggctccccgctacccacttcccgagtggggacgacgggcggaggagtgtgccgggcgccgcagggagtacgtgcgggtctcagggagtgtgtgtgtgcacgtgtgtgcattccaaagtgatttgtgtgcaagcacatgcgtgagcctagaagggcgaaagtrtgcctgtgtgggtgtgagtataacgagtgtgcagggccgtgcgagcgtgtttattactgaggttgaggggccggccccctttgcgcccaccaggcctttgcacagtgatggcccccgagccagggagcccgtggagagagaagcggcctggcatgggctgggggtcggggctgggcctgatccggtgaaccaggggccaggagggcagactcagagcctggctgggcctgacagaggcaaaggtcttagagccaggctgcggcagggccactggcaggaccctctctgcatacacaggctgggcgagcggaggctgtggtgggcccctcggccgggcacccgaggacgtgtgttttcctaaatatcctccaggctctcctgtctttgttcttgtctctctccagccaggcctggggggctgaccctagacttgcctgtgtatgtgggggcctctctgcctgccctgctaagtagacggatcttttgatttatttatacctctcctaggctccaagtgtgaatcccaggacagtaacaaattgatcacagcgggcttgggacaccagcttccgaggtctgtccttgcagttttgactgacaggcttttgtgtgtgtgcgtgctctctaactgttgaaaatctttgcagctgaaagtcttaattgctttaaggcaaactttagaaattccagagctccctagttggtctgacttttccaaattcagcttgccttttttgggggaaaatgtcgccttagtttggtgtacagtacgtgcaggcaggtcttggaggcacgtttaaaaaccctgtcgttaatggaagaagaatttcattgaaagggacgcagagccgtctggaagcgcctgccccggactcagcgagtttggactcagcgagtttgagcttaccgaatgaactttggacgtcttcttttagcaaacaaaacctggaaggaagcaaaaaagacccacattctttttcttttttctcctgaaaatgaaaaaaagaaaacaccttctgggtttgctggaaatgccccctctccttcccccatcaaggccaag

SEQ ID NO: 725839 - DNA, 1005 bp, Homo sapiens
tggtgcagaccttgggctgtggtgccgatccctgagtgcccctaacaggaccccagctcatgcagcagccttgctctgccctttcttcggaagtcttctaatgagatgtgcatgcagtgcccccacttttgcctcttacaatcactcaggagatgacggcaggtgtactttcctgcagaaatagagagattgtaatcttctctattctttactaaytggctaataagacaaaatgtcatgaactcaagaggggccttcacattccaaaagaactatcacacggctgggctgtgaaccaggtttgactcctctgttctccttaagctgctggaaaacttcgtggccatgaaatgctttggtcatctttcatagtggccaactcttggccatgtgcttaatgcgaggagaactggaattaggtggataatattttatgtgaatcaggaaactctttaggcatgaagttattatcaagtcagctctgaatattctataaatatttattctctcagaggaaaatattacttcaagactgcccagtttttcttagattttatagccttctcagtattttctggctacatatatggggtttctaaagaggctgttacctaagcaatgacctgtgtgtgtgtatgcacatgtattagtcacattaaacaccctagtggtatttaatacccaatggaattgaagaacaatggaaccaattgcacaataaaccatcttataagttaaaatggtctccatctaatcaggccataaatgttgtgaagagtgtgtagtttgatgtttctcctatatctcaagcttctaatgtaaatgaagagaacttggagatgacagacagtgaaaatgacttgcaggaaaatcctgaagactgttaagtaacaggagagtttcatgtttgacagtgtctggaaatgttgaatctgtttcactggctgaccttggctttcatgcgtgtttgtaagaaggctgcctcatttttacccagaaaaaaat

SEQ ID NO: 725840 - DNA, 760 bp, Homo sapiens
tgagtgcaatccaatactcctttatataatcytgtgccggtggaagaaaattaaagtttaatgcaataacggctgacacaaatcacttttgttgcccagaagcagattaaagaatagttaaaatcatacaaatctaatttcttttgttgttgttgttgttgttgctttattctgtaacatcttgatgctttaatccttagcatcagttttttattattaaacatatattaccaacataagaaagattgtgggaaaaacagtgacagccaggaaatgattcgtgctcaaatggtacatgttaaagctctttcaaaatccataaatttttcataggttcatagaggtccgtgcctttaatcaattcgtgtcaaggggattttaaaataagcataaaggtaatggaatgctatcaatcataattggggctggaaagaaccatcacagcccatcagctaccgctcttgcattgtgtatgtctgtgtgtgtgtgtgtgtgtgtgtgtgtgtgtgtgtgtgtgtgtgtgttacgtgcacatatgtgttggcatggtgcatttctgttttctatttttgattactgccatcaatgggacaatttgaggactttatatacagatagacatgaatttaaaaataaaacttaattgtggctgcaatttcttcctttcttgccccttttataataattactatatctgtggtgatagtgacttgtctcatctgtgcaatagactagcttcatcagaacaaaagcattttca

SEQ ID NO: 725841 - DNA, 964 bp, Homo sapiens
tgaaaggccacaagattaggattatgggaggggtctgaattctgctaagatgtaggaatagcttgcctttctataatctatgctggaggtcacaagatttgtgacttccccgtttgctcttgtaaataacatcactattgtagaacccaagattcgtcttttgagatgattttcagaactgtgcattctgggcaccaactgacttcacttggactcacgactcatgactcagccagtcctgtggcccccaccctatggtggactcagcacatgaggattgtttgccatgcttttatccccaatcagcagcacccattccctaactccctgcctgccaacttatccataaaaaccctagcctctgagttctcagagaaactgatttgaataatgaactcttgtctttcatgtggccagcccttgccttaattaaactgtttctttactgcaatactgctgtctcagtgaattggctctatctgtccagcatgcaagaagtatagtatagtagaaacaagtagactttgtgggcttagacaaatgtatttgcaaagcataattttcaaaaagttaaaaacaattctcatgcaaakttgtagtgagcatgcatcaaagattaaataattagtggagttttaggtactgaagtgtgttctcccaaagtccataggttgaaattttaactgccaggacactcagaatatgactatatttggagataaagcctttaaagaagtaattaaggttggccaggcatggtggctcatgcctgtaatcccagcactttgggaggccgaggcaggtggatcacttgaggtcaggagttcgagaccagcctggccaacatggtgaaaccccgtctcaactaaaaatacaaagaaaaaaaaaattagctgggcatggtggcggatgcctgtaatcccagctactcaggaggctgaggcagtagaatcacttgaaccca

SEQ ID NO: 725842 - DNA, 964 bp, Homo sapiens
tgaaaggccacaagattaggattatgggaggggtctgaattctgctaagatgtaggaatagcttgcctttctataatctatgctggaggtcacaagatttgtgacttccccgtttgctcttgtaaataacatcactattgtagaacccaagattcgtcttttgagatgattttcagaactgtgcattctgggcaccaactgacttcacttggactcacgactcatgactcagccagtcctgtggcccccaccctatggtggactcagcacatgaggattgtttgccatgcttttatccccaatcagcagcacccattccctaactccctgcctgccaacttatccataaaaaccctagcctctgagttctcagagaaactgatttgaataatgaactcttgtctttcatgtggccagcccttgccttaattaaactgtttctttactgcaatactgctgtctcagtgaattggctctatctgtccagcatgcaagaagtatagtatagtagaaacaagtagactttgtgggcttagacaaatgtatttgcaaagcataattttcaaaaagttaaaaacaattctcatgcaaatttgtagtgagcatgcatcaaagattaaataattagtggagttttaggtactgaagtgtgttctcccaaagtccataggttgaaattttaactgccaggacactcagaatatgactatatttggagataaagcctttaaagaagtaattaaggttggccaggcatggtggctcatgcctgtaatcccagcactttgggaggccgaggcaggtggatcacttgaggtcaggagttcgagaccagcctggccaacatggtgaaaccccgtctcaactaaaaatacaaagaaaaaaaaaattagctgggcatggtggyggatgcctgtaatcccagctactcaggaggctgaggcagtagaatcacttgaaccca

SEQ ID NO: 725843 - DNA, 1970 bp, Homo sapiens
ccacgcccagccttatcagatggttttaaatcatgttctgtgtgagcaaatacgtatttctccaaagactcagaaaattcaaaactcaaaacaaatttttaaattaacattatagttatacctttattttaccaatatccaataattttttcagaatgaaggtattacctccaaatttcttgatggctttctccactgcagcactgatctgctgttcatctctcacatcaacaatacatggcaaggcctttcctccaactgcttcaacttatataaaggatacaaaatgaaaaagcgttaaagcatttaaatattatacctttaattccaatatcacagtcaaaagaaaaaagtaccctgttttcagaaaatcaatataaataactctatcttaccaccagtgactctaccatatagcaggacagactagctaggctaacactattaaaaaacaaaaacgaaggtttggtgggggtttctttgtaatttttttaaaaagctaaaaaaaggaagttttttgtttgtttgtttttgtttttcagacagggtctcactctcttgcccaggcttgggtgaagtggcacaaacacagctcactgcagcctcaatctcccaggctcaaaggatcctcccacctcagcttcccaagtagctgggactataggcatgcaccaccacgccaggctaatttttctattttttgtagagacacggttttgccatgttggtcaggctggtctcgcactcctgacctcaagtgatccacccgccttggcctcccaaagtgctgggattacaggcwtgagccacctcacccagttgaaagtaatttttaaaaactttttattgtggaaatattctaaactatataaaaatgtaaagatgctgtaataaactaacaggaatccatcacctatcttcaacgattgttagttttgtcagttaatatgtttatctttcctgtcccctgttttattttttgctggtgtgttttaaagcaaatccctgacatcatttcactcataaacacttcacatgcattcctctaacataaccacagtgctctgaacatgattaacaaaactagcaatgtcaactgaacttgaatttttaagccctctctcctggctctgtgcctagcgctatgccttaaatagaagtatgtgataattatttgtcaactaaaagtattaaaatgatgacttgcaaattgtacagagaataaataacacagaacgctttctcaaagagttcatgccactcaccaatcaaattctctcctctctactccacttccctactccccctcccatccaagaaccactgccctcaagaaccaagatttttttttttttaagagatggagtctcgctctgtcacccaagctggagtgctgtggcatgatcttggctcactgcaacctccacctcccaggttcaagtgattctcctgcctcagcctcccgagtagctgggtgaaattacaggtgtgagtcaccacgccccgccatgaaataagatttttaactggagtttctcacattgcttaaaagtgctggtggagaaaaacggtcagaagcactgccccaaggtgacaacataaatacttctttcactagataaaattatgttcagggtagctttcaaatagctttaactaaactctccagcaaattctctatgtattgaaaccactagaaagacattttatcaaatggcactgtcacactcactttcttcagcagcagtatagattgtgcctagaagttttggatgtggctgggcggtctttgcagcaataacaatatttgctccatcctttgctgctttcaatgcaatagctttgccaatgccacggcttgcacctgtgataaaaactgtacatcctgccagcctcctacaacagaacaaatacgaccttattagaagacccaatgttttatttactgacaggtatcagaacctcatgca

SEQ ID NO: 725844 - DNA, 1241 bp, Homo sapiens
tgtaagtacctgggtcctgttatgaactcactaccaaaactaccacacttctagttaagcacaatctcaggttctattcagaattaatgtgcccacagaaaccctaaatcacaacccatgatccggcaaaaaaaggcaaaaactttctaataaagctagtgtggcagaaacactgcagactctatctgcatttatccagctgtgtttacaagaaaaaaaaaaaagcagtagcttgagcaagcaaaaacttctgaaattttaatactaaagaaaataatatcagcactgcaaaaagaggccatatttttcccagtaaaaaaagtaacggaaccttgtgcaacccccaagtacccaggtagtcacaaacatgtataaacacgtaacacatcaggacacactacacatataaaattatccttaattaccaygaagaaaaaacattctaacatttgttttttgttttgttttgttttgaaacagagtctcgctctgtcacccaggctagagtgtagtggcgtgatctcggctcactgcaagctctgcctcccaggttcatgccattctcctgtctcagcctcccgagaagctgggactacaggcgcccgccaacacgcccagctaattttttgtatttttagtagagacggggtttcaccgtgttagccagaatggtctcgatctcctgaccttgtgatccgcctgcttcggcctcccaaagtgctgggattacaggtgtgagccaccgcgcctggcctctaacatttgtttttacaaattgccacagtactctataaatttcatttttctccatacttcagattttaccaaaagctttaccctatagttcaaaaattactttatagaaacacaatttgttcattcttaattatatccattatatgagttcagcggtcttctgtctctttgatactaagggacactcaaatgctagaatttggtgacacatttcaaaggaaagggatacatacgcatcgttctctgtttgatcccccctcactgctgtttgtcagcttaagtcgaactttttattgccctgacctatacactcacaaagcaaagttcctgtctgctccagtaaacaagcaatctttcctacagctgcctggatcccgtgctttgcctttcatcaggcatcctgtcccacctttcatcacctgaccactcaggccatttacctaaatcacagtatttctctgaatgaaatgaaagtaaacatcctt

SEQ ID NO: 725845 - DNA, 1241 bp, Homo sapiens
tgtaagtacctgggtcctgttatgaactcactaccaaaactaccacacttctagttaagcacaatctcaggttctattcagaattaatgtgcccacagaaaccctaaatcacaacccatgatccggcaaaaaaaggcaaaaactttctaataaagctagtgtggcagaaacactgcagactctatctgcatttatccagctgtgtttacaagaaaaaaaaaaaagcagtagcttgagcaagcaaaaacttctgaaattttaatactaaagaaaataatatcagcactgcaaaaagaggccatatttttcccagtaaaaaaagtaacggaaccttgtgcaacccccaagtacccaggtagtcacaaacatgtataaacacgtaacacatcaggacacactacacatataaaattatccttaattaccatgaagaaaaaacattctaacatttgttttttgttttgttttgttttgaaacagagtctcgctctgtcacccaggctagagtgtagtggcgtgatctcggctcactgcaagctctgcctcccaggttcatgccattctcctgtctcagcctcccgagaagctgggactacaggcgcccgccaacacgcccagctaattttttgtatttttagtagagacggggtttcaccgtgttagccagaatggtctcgatctcctgaccttgtgatccgcctgcttcggcctcccaaagtgctgggattacaggtgtgagccaccgcgcctggcctctaacatttgtttttacaaattgccacagtactctataaatttcatttttctccatacttcagattttaccaaaagctttaccctatagttcaaaaattactttatagaaacacaatttgttcattcttaattatatccattatatgagttcagcggtcttctgtctctttgatactaagggacactcaaatgctagaatttggtgacacatttcaaaggaaagggatacatacgcatcgttctctgtttgatcccccctcactgctgtttgtcagcttaagtcgaactttttattgccctgacctatacactcacaaagcaaagttcytgtctgctccagtaaacaagcaatctttcctacagctgcctggatcccgtgctttgcctttcatcaggcatcctgtcccacctttcatcacctgaccactcaggccatttacctaaatcacagtatttctctgaatgaaatgaaagtaaacatcctt

SEQ ID NO: 725846 - DNA, 699 bp, Homo sapiens
tgactccttctctgggaagagagcttgtttcgcctctttaacacctgtcagccaccaccaaacacrtgcacacattcttgtgggtattcactgaaccaacaataccactgattatacagtgcaccattactttagggaccactaaggaaacaaaaaagctgccaattaaattatgatatatcatctattgtaagaaacagactggtatctgagatgtacaaatataaagcatgggcatctcagaatcaatgaaagtagtataaactctttcacctagtcagtgaataggttccttgaaaaacactcaataaatattggttggatttctgggggtcctttttaaattcacacaacactgttttgtagaaaatattagaaaatagctaggtgcggtggctcacgcctgtaatcccggcactgtgggaggccgaggtgggtggatcacttgaggtcaggagtttgggacaagcctggtcaacatggtgaaaccccatctctactaaaaatacaaaaattagccaagcatggtggcgagcgcctgtagtcccagctacttgggaggcagaggtaggagaattgcttgaacctgggaggcagaggttgcaatgagctgagattactccactgttctccagcctgggtgacagagcgagactccgtctcaaaaaaaaaaaaaaaaagaaaaaaagaaaagaaaga

SEQ ID NO: 725847 - DNA, 699 bp, Homo sapiens
tgactccttctctgggaagagagcttgtttcgcctctttaacacctgtcagccaccaccaaacacatgcacacattcttgtgggtattcactgaaccaacaataccactgattatacagtgcaccattactttagggaccactaaggaaacaaaaaagctgccaattaaattatgatatatcatcyattgtaagaaacagactggtatctgagatgtacaaatataaagcatgggcatctcagaatcaatgaaagtagtataaactctttcacctagtcagtgaataggttccttgaaaaacactcaataaatattggttggatttctgggggtcctttttaaattcacacaacactgttttgtagaaaatattagaaaatagctaggtgcggtggctcacgcctgtaatcccggcactgtgggaggccgaggtgggtggatcacttgaggtcaggagtttgggacaagcctggtcaacatggtgaaaccccatctctactaaaaatacaaaaattagccaagcatggtggcgagcgcctgtagtcccagctacttgggaggcagaggtaggagaattgcttgaacctgggaggcagaggttgcaatgagctgagattactccactgttctccagcctgggtgacagagcgagactccgtctcaaaaaaaaaaaaaaaaagaaaaaaagaaaagaaaga

SEQ ID NO: 725848 - DNA, 699 bp, Homo sapiens
tgactccttctctgggaagagagcttgtttcgcctctttaacacctgtcagccaccaccaaacacatgcacacattcttgtgggtattcactgaaccaacaataccactgattatacagtgcaccattactttagggaccactaaggaaacaaaaaagctgccaattaaattatgatatatcatctattgtaagaaacagactggtatctgagatgtacaaatataaagcatgggcatctcagaatcaatgaaagtagtataaactctttcacctagtcagtgaataggttccttgaaaaacactcaataaatattggttggatttctgggggtcctttttaaattcacacaacactgttttgtagaaaatattagaaaatagctaggtgcggtggctcacgcctgtaatcccggcactgtgggaggcygaggtgggtggatcacttgaggtcaggagtttgggacaagcctggtcaacatggtgaaaccccatctctactaaaaatacaaaaattagccaagcatggtggcgagcgcctgtagtcccagctacttgggaggcagaggtaggagaattgcttgaacctgggaggcagaggttgcaatgagctgagattactccactgttctccagcctgggtgacagagcgagactccgtctcaaaaaaaaaaaaaaaaagaaaaaaagaaaagaaaga

SEQ ID NO: 725849 - DNA, 699 bp, Homo sapiens
tgactccttctctgggaagagagcttgtttcgcctctttaacacctgtcagccaccaccaaacacatgcacacattcttgtgggtattcactgaaccaacaataccactgattatacagtgcaccattactttagggaccactaaggaaacaaaaaagctgccaattaaattatgatatatcatctattgtaagaaacagactggtatctgagatgtacaaatataaagcatgggcatctcagaatcaatgaaagtagtataaactctttcacctagtcagtgaataggttccttgaaaaacactcaataaatattggttggatttctgggggtcctttttaaattcacacaacactgttttgtagaaaatattagaaaatagctaggtgcggtggctcacgcctgtaatcccggcactgtgggaggccgaggtgggtggatcacttgaggtcaggagtttgggacaagcctggtcaacatggtgaaaccccatctctactaaaaatacaaaaattagccaagcatggtggcgagcgcctgtagtcccagctacttgggaggcagaggtaggagaattgcttgaacctgggaggcagaggttgcaatgagctgagattactccactgtwctccagcctgggtgacagagcgagactccgtctcaaaaaaaaaaaaaaaaagaaaaaaagaaaagaaaga

SEQ ID NO: 725850 - DNA, 620 bp, Homo sapiens
ccaagggcacagctaggatcacagctttcatgtgcaaagcaacaagtctcaagtctatagatccagccacctccttctctaactcttacacacaaagccaattattttctctgtcctaaatcaccccagggccaggtaccaaacaacgggagaccatccctatgctccaaagtccatggaaattcayactagccaatcctaaacagtttaccttgcctttcctgaggaaaccccaataaaagctctacttagctttctttcatccctacttacgcttgccaaacctggtaattcccttgtggccctgtgtggattgacatgtccccttctcttgggaaatttaaatcctaagtttttctttcaatggcactgacctttctgtgtcactccgataaagtaacatcctgtgggtataattttattataacatccatatgctaaaaatgaacctcaacctgtaccttaaaccttacacaaaaattaagcccaaacggatcatatatctatatgtaaaactattgaaattttagtagaaatcacaggatgaatctttatgatcttgggttaggtaaagcactcttaggtataaccaaaagcatgactcataaaagaaaaaactg

SEQ ID NO: 725851 - DNA, 1841 bp, Homo sapiens
  misc_feature 970, 971, 972, 973, 974, 975, 976, 977, 978, 979, 980, 981,982, 983, 984, 985, 986, 987, 988, 989, 990, 991, 992, 993,994, 995, 996, 997, 998, 999, 1000, 1001, 1002, 1003, 1004,1005, 1006, 1007, 1008, 1009, 1010, 1011, 1012, 1013: n = A,T,C or G
  misc_feature 1014, 1015, 1016, 1017, 1018, 1019, 1020, 1021, 1022, 1023,1024, 1025, 1026, 1027, 1028, 1029, 1030, 1031, 1032, 1033,1034, 1035, 1036, 1037, 1038, 1039, 1040, 1041, 1042, 1043,1044, 1045, 1046, 1047, 1048, 1049, 1050, 1051, 1052: n = A,T,C or G
  misc_feature 1053, 1054, 1055, 1056, 1057, 1058, 1059, 1060, 1061, 1062,1063, 1064, 1065, 1066, 1067, 1068, 1069: n = A,T,C or G
taatgctatgactgctgataatctctgaaagttattcattgtgtataactgaaactgtatatacattgaacagcaactgcctaattccccttccctgcagccctgggcagctaccattctactttctgtttctctgaatttgactatgttagatatcctatatgagtgaaattatgtaatatttgtcattatgctgctggctaatatcaattagcatcatatcctccaggttcatctatgttgtagcatgtgacaggattttcttgtttttttaaggctgaaaaatattccatggtatgcatttaccacattttcttcattcaaccattaatggacatttagtttatttgtatatcttagctactgtgaatagtgctacagtgaacatgaaatcctttctcaaaaaaagtaaaaatagaactaccatgtgcatttccactctgcaatctcactcagattacataacccaaaaaaattggaaacaagatcttaaaccacttttttttaacaaatggtgatttgagtcaagagagtagtaacttgagagatcacatagctaagaaatggtggagttagaaatcagatccagatgtgtctaactctagtatgtattcttaaacaaaacattaataattgtttcagaaataagtaatatatatctttttatcattttttaaaaaactgtgaatgcataatagcagattacctgatgaccatatgagcctgtcagaaaatgaatttgtagtgtctgttttagcataaggaataaaggaatataaatgtacagaaacacttatgtaaatcccattgtgctggcagaattggctaactggaagaaaatgctgaccacttactgcatatcattaaaaaaattaaattttaaatggtctcaagctccaaaatatgaagagcgataattaagaaagtaaggctgatgccatgtctcagcctgtacctccaacactttggnnnnnnnnnnnnnnnnnnnnnnnnnnnnnnnnnnnnnnnnnnnnnnnnnnnnnnnnnnnnnnnnnnnnnnnnnnnnnnnnnnnnnnnnnnnnnnnnnnnnaaaattagccgggcgcggtgttgggtgcctgtagtcccagctactcgggaggctgaggcaggagaattgaattgctggagcgcaagaggcggaggttgcagtgagccaagatcgcaccagtgcactccagcctgggcaacagagcaagactctgtctcaaaaataaataaataagaaagtgaaaaactaaagagttcaggggaacatcttaaaataatggaatggagcctactgaagcaggatgtgattacaaatgaatttgaattcatttatatgacaatatgaattgggtacttaccatgtatcagacactcttctaggtactagggttatggtatgaacaaagcagacaataatacctgtatgtggaatttatattttactggggaaaagacatgataaatacaataattaagaaaaataatatgaaatggtgattagtgctaaagagaacaaaaagaaaatgggacagagaatgctggagcaggactgatggattttcactgagatggacacgagaagcagtcctgcaatgggacgtttaaacagagatctgaacaaggcaagggagtgtaccatcgcggtaagtggcgaatgagctctcccaggagagaggygcacatgaagtcctggaggtaacagtataagtaccaagctggagcaaagttagcaatggggaggggctagtatgcacagagctgctcctatattttaatggttgcagagctgccgagaagtccgtgtgcacatatttttcttaataattaataat

SEQ ID NO: 725852 - DNA, 1237 bp, Homo sapiens
gtgagcctattcaggcagagggctgaaaactttacatttaacattggattattgttcgttgttcatttaataagcagtaaaaaacatgagaaaacttttgttccatctcctgatttttttgaaatttccacttcattttgttaggaagacagagatacagtgatgcccaggctaggtgggccttcacacaatatggtgccttaaccatattgctacacagagctgtagctattccagagaaaatgcagcagagaccacagagtgtctgccaggcttcctcaattttactgaaacacatgtactacctgcatgcgctaatgagaaataaaaagatttcatagtcatttggagattcaaaatgctcaccatcaagagtgactactgtaaacgaaggagccaaggacaattgccagggaaagagtcagatgaaaaaaataaaggaagaaagaagaaaggaaggaagaaaggacaaaaggaatggagggagggagggaaagagggagaaagggagaaatgaatgaaggagaaagaaaaggaagtgaatggtgtcaaacagaaaacttgcaaaagaaagtgggtggtttgaagtttaggataaagggaataaaagatccagataaattttttaacaagcaaattaaagttatgaaatgctaagtgaaagaaaactgaaatcagcctaaggagcagaacaatattgctcagcaggggatggtggttttcaaggtatctgtcttagtcaattcaggctgctataacaaaacatcatagactgggtggcttaaaccacaaacatttattttccacagttctgaaggctgggaagtccaagattaaggcrtcaacaggtcttgtgtctgctgagggctgtctccctgatttgcagatgtctgctttcttgctgtgtcctcacatgggaaaaagagagagaatttgctggtattcctttttataaggacactaaccccattcatgagggtcccaccctcatgacctcgcctaaacctataacctccaaggactccatttccaaataccagcaaccacatgtgtgagcttagaagaggatccttccccaggtgagccttgagatgaccctggcctgtgacttgatggcagcttttgagagactgagccagaggcctccaggtaagcccttctcagattcctgaaccacagaaactgtgagataatcaattttattgatatcttgtggatattgatatccccagtttta

SEQ ID NO: 725853 - DNA, 1016 bp, Homo sapiens
ttattgaagtttttatttaaatggcatttatttcttaatacattacaggcaactgaattgctttttgaaataatattaataaaaatgcataaatcatttaataatcatttattgttcattaatattattaaataatcaactgaattttagaagactcaacaaataagtgtaaacataaaattcataagtggttgccacaggaaatgtttaccttatttgtgtaatgttataattgctaagaaggacatgatgtgtatatttggagttattatgttagttaggcagtaaaactgacactatgtcaaaagaatagtatgatgtataagtggttcagtataagacacagccaaaaccctaggattttccctagaggtatgtgatgtatgtatagcagatgaaaacgcacaataattattagctgcacaartgttcattaggagataatcaattaccacagttagggttttacagtcatttgcatactagaccagcagtggcataaaggttacaaaggaagacacatattaagttaaagtctgtgtttctcgttaaacttgattgttcctaactggatgttctctagcattgtatgcagcatattttacataactcacacaatatgttgtgccacttcttagtgataggaacattgatgcagatttcaaggatagtaatactttcctctagtaatcagtctaaagagttttaatcaatcctgtagtaatcaatctaaagagttttaatcactttcctctagtaatcaatctaaagagttttaatatatttaatcaatatattctgcagttagaacctgacgtgttgggattaagataaagttcaccctttagttgttgtgttttataatcatatctgcttctgtatatattttatcagcaacaaataatttatttttgctgttctgaaacaagagaaaacatttattccacagcctttgaccatatgtttcacttaccacatatataattctccctccatgattccaatgaaaaagtttt

SEQ ID NO: 725854 - DNA, 614 bp, Homo sapiens
aaggcagaaagagaacaagctagctttctggtctcttcttctaagagcactaatctcattcatgagggtggagctctcagacttaattacctcttaaagtccccatttctaaatactgcacattggaaattcaatttcaacatatgaagtttgtggttacactaatattcagtccataacaaacctttgagggaaatttacatttactgtacatgctcatattgggaaatagtttgtttaatgttgacattatttcttccttaaaatgtttagtagaactctacagtgcatctgtccaggccaagaactttcagttgtgggtattgtagaattgaatttctttgacacataaagggattttcagacttcctatttcttctttgtctgttctggtaatatgagtattccaagcattgtctattttatctctataattgaattttaattggcatcaaatcatcaatamtttatattttttcatccttttaatgtctgtggtatttatactaggacttttaagttttctaataactgccagctctagagtccaaaggctaagtcactacaaccttagagtcaagaaggatcaccactgctctcttccctcttctttt

SEQ ID NO: 725855 - DNA, 748 bp, Homo sapiens
gaattcaggaattggaatcaggtcttaaagaataagttctgctgtggtggctcatgcctgtaatcccagcattttgggaggctgaggccattggatcatgaggccaggagttcaagaccagcctggccaagatggtgaaaccccatctctactaaaaattcaaaaattagcccagcatggtggtgggcacctgtaatcccagctacttgggaggctgaggcaggagaatcgcttgagcccgggaggtggaggttgcggtgggccgagwtcataccactgcactctagcctgggcaacagtgcgagactctgcctcaaacaaacaaaaaaagagaataagttcttccaagcactcatctatagagctatggatgaacacggtgcgcctgctcaaagggaaaccaggccaggctggaggaaatggtcaagctggaggggtggggagaaacggaggtcagacgagtgggctaagccccagctgcagatgcctgcggtagcacagactacaagccggggaatcccagtgtatctgaaggaaaccgcattttcatttccctgccgtccagaggtgtttgtgagacatgcctgccgagagaaaattcttggaggagggctgaggcaagaggtttctcttcacactgcctccctcaccttcagggaggttggaaaaccatgaaaaaaagggttgtgaaaaagagtgtgagggccgctggcttccagaactactgatgtaccattatgtacgcgtc

SEQ ID NO: 725856 - DNA, 748 bp, Homo sapiens
gaattcaggaattggaatcaggtcttaaagaataagttctgctgtggtggctcatgcctgtaatcccagcattttgggaggctgaggccattggatcatgaggccaggagttcaagaccagcctggccaagatggtgaaaccccatctctactaaaaattcaaaaattagcccagcatggtggtgggcacctgtaatcccagctacttgggaggctgaggcaggagaatcgcttgagcccgggaggtggaggttgcggtgggccgagatcayaccactgcactctagcctgggcaacagtgcgagactctgcctcaaacaaacaaaaaaagagaataagttcttccaagcactcatctatagagctatggatgaacacggtgcgcctgctcaaagggaaaccaggccaggctggaggaaatggtcaagctggaggggtggggagaaacggaggtcagacgagtgggctaagccccagctgcagatgcctgcggtagcacagactacaagccggggaatcccagtgtatctgaaggaaaccgcattttcatttccctgccgtccagaggtgtttgtgagacatgcctgccgagagaaaattcttggaggagggctgaggcaagaggtttctcttcacactgcctccctcaccttcagggaggttggaaaaccatgaaaaaaagggttgtgaaaaagagtgtgagggccgctggcttccagaactactgatgtaccattatgtacgcgtc

SEQ ID NO: 725857 - DNA, 814 bp, Homo sapiens
ataaatacttcaaggaacatttaggatagatttaggatatatgaacatgtggcagggttggaaagaacataattctttcccagaaggggaagggggagctatacttaatcggatccagctacaacatcactggaagtcattttctcgccaaaaagtatctccacggcaaaatctgatggataaattctccgtgctttttgtttatgtagattatccaattcattttttggtagataaagcctaagaatagaaaaaaattattacattttatattggggctcactgaaaagccacacagttgggtacccacgttagagctggaagaaacaaaaaaagracctcaccatgaatagaacctcagccctttttttgtgtctcagttggctccttccacctttttactgagacataaaaatactttaatcttcagcaacacatcagtaacacatgctgactctcttagcattgctttatatggaattaatgacatccaagtttaataaaatatctaaatttctctctgtgacagaaatcagtcaggatagacatgaatgaaagcccagtaataaaatactatatctcttttaatttatgtgtgaggttgcaattttttgaatttttacaatcagaccttggaaatgaccttgagcagtaggatataactcccacatgctgagtgttccaataatggaacactaggcataaattggttaacccatttatgcctcgtgttctcaatgatagaagttagcatttttagctaaacaacaatctcataacaaaaacagctttaccaagtaggatgtaaatttaa

SEQ ID NO: 725858 - DNA, 1242 bp, Homo sapiens
acagttgagcctgccctgagttctgacctaagtaaatgggtgctgttttaagatattaagtttatggtagttgctttataataatagataacaaatagagcagcatttcaaggccctccatgctttggtctctgccaaatcactattagatttttaagatttttttttacacattatacttacattacacaatgtcttaacactatgaagtaaaaatgtaaatattttaaactctggcttggaaatgaggaggcagaatctcagaaattttcctaaaataaaataggagaggcaagctttctgagtccacaaaartgccctctacctattgggtcaaagaaaaagtaatttctctatttgtaacaacatacataaattataaaccctgaagaaataggtccctaatagctataatctttaacataaccataaataaaaacatgaataaatctgactacataaaaatgtaaaaacttctatgtggtgagaacacacattacagaaaaaaaaatcaaatgacaaaaaataacctccaatttggattacaaatatctagtatcctggatatatacaaataaagcatgtaagttataaaaatgagtataattttaaaatagacaaggatactttatagaatttcataatttaaggaagacataaagttagccaataaactatgggtaatatgcaagaatcagtaagcattattatttgccagcagctaagccaagtactttataagaattactttattcccatctatgccaggcacagtggctcacgcaagtaatgccaacacttcggaaggcagaggtgggtggatcacctgaggtcaggagatttagaccaccctggccaacatggcgagaccacgtttctattaaaaatacaaaaattagctgggcctggtggcaggtgcctgtaatcccagctacttggaaggctgaggcaggagaatcagttgaacccaggaggtagaggttgcagtgagctgagatcatgccactgcactccagcctgggcaacagagtgagactccatctcaaaaacaaaaacaaaaacaaaaacaaaaacaaagaaattactttattcccatctaaccaccaccactttaggtagatatcactatttttcattttacaaatgaagcagagaggttaaatttccttgttcaagtccatagagtcaggaaatgaaaaaggaactgaactcaaggagttcataattatttatatacaagta

SEQ ID NO: 725859 - DNA, 637 bp, Homo sapiens
gcataatttgttaattatatactgtattcttaaagaaagagaaaagaaaattctattaagaaaatcataaggaggagaaaatatgtttactattcattaagtgaaagtggatcatcataaaggtcttcgtctgcatattcatgttgagcagcctgaggaagagaagaggagaagttgatcctgttgtctcaggggtgggagaaacagaaggaaatttgcatataagtgaacttgtgcatttcaaatccatgctgttcaaggagcaactgtacataaactagtcacatggtcatttattatcattamcaagtatgacatatggtacataattagatgtgctaacctttaatgccactgacaaatgtagtgggtttgcttataccagcctcactgcaaacacatgagtaatgcgttgtgctatgatgtcatcatggccacagtgttactagatggtaagaatttttcagctctgttatcttaagcgaccaccattgtatgcagtgtagcatttaccaaaaaaccattatgccacacaggaccatatttggggcttttagtgtcccctgtccccaagatccttctattcaaaatgtgagctcatgcatggtttaaaatttgtgatggtgtgcagtggaca

SEQ ID NO: 725860 - DNA, 963 bp, Homo sapiens
tctggtgatttcagagtacagtgtggtatatatctgtgtcatcagattgcagtcagaataaaatacaatgcaagataaactccaatcatttttttcattgtggtgttagccccaaagctcccccattttacccaaagacaaatggacaacaaatggtgttctgttattggtacagaactcaaactgaatgggatttatcaggattttgtrtctaatctctcttcttaagggctctggctgttagctttgacgaagagaatggaaaccagatgtttagataccagaggcagagttcctaggttaaaaacaaagtttaaaaatgccttttatttttatgtattttcatatgtcattctaagtatgaacatttctcactgatattagtggatttgaattatggattaaatagccaaccactccccaaataaaaccaaactgtgttaactacatctttagcaataagtatatctgtccttgttattacagaaaataaagccagtactgaaatttctaaataatactaataaaaaacatattcaagaagtagaacacttttatttaaaaattccagtaaaatgcattccctccttgcatggaatttttctgctcatgaaaacactttcaaagcctccagctgttcctgattattttcccccatcagctccacactatcatcttaaaaaggcacaataggactttcccaaataatcacaatgcatgatgaaactacttctacagatctaagaactccagcaaagaatttgtaggggattactatctcattttccaaaagtgtcttattcagatgtagctacaaccaccctacagttagagcaataatttttttcttgtcacacttcagggggtctccagttatgttaacaactgtcatgaaactctaaaagaaaaaaaaaattaatgtatacttgctctcataaacaaaagactaaaatgtattctatt

SEQ ID NO: 725861 - DNA, 963 bp, Homo sapiens
tctggtgatttcagagtacagtgtggtatatatctgtgtcatcagattgcagtcagaataaaatacaatgcaagataaactccaatcatttttttcattgtggtgttagccccaaagctcccccattttacccaaagacaaatggacaacaaatggtgttctgttattggtacagaactcaaactgaatgggatttatcaggattttgtgtctaatctctcttcttaagggctctggctgttagctttgacgaagagaatggaaaccagatgtttagataccagaggcagagttcctaggttaaaaacaaagtttaaaaatgccttttatttttatgtattttcatatgtcattctaagtatgaacatttctcactgatattagtggatttgaattatggattaaatagccaaccactccccaaataaaaccaaactgtgttaactacatctttagcaataagtatatctgtccttgttattacagaaaataaagccagtactgaaatttctaaataatactaataaaaaacatattcaagaagtagaacacttttatttaaaaattccagtaaaatgcattccctcctkgcatggaatttttctgctcatgaaaacactttcaaagcctccagctgttcctgattattttcccccatcagctccacactatcatcttaaaaaggcacaataggactttcccaaataatcacaatgcatgatgaaactacttctacagatctaagaactccagcaaagaatttgtaggggattactatctcattttccaaaagtgtcttattcagatgtagctacaaccaccctacagttagagcaataatttttttcttgtcacacttcagggggtctccagttatgttaacaactgtcatgaaactctaaaagaaaaaaaaaattaatgtatacttgctctcataaacaaaagactaaaatgtattctatt

SEQ ID NO: 725862 - DNA, 618 bp, Homo sapiens
tttttcaaatgtctttatatagtcacttggagatgatgattaactgtattagtttcttcaaaacacacttgggaaggttttaacgaagttatataagtaccagtgttcacagtatggcaggagaattttatcttagcaactggtattagtgatctaaaaatgtttcgcccttctatgagcaccctaaaatctgttcttacacacaccctccagattttttccaacttaaattagcaagtctttgactctktttatgtatatgacatcaaccaaacttgcaagtttttaatttgtagtttattccctttgctatactgacaccaaactctagtgacaggtgtggacaaagtagggataagagagacgtgtgggtaatggactgtttctttaaggaaatcactatggtgaggcggcaacaaaataatcctcaagcaatggagaaagaactctcagacaagaaaaagaaatctgcttttgaaggtaggagatgcttcatggaaggtgggcgaaaaccacctatagatctgatttctggttcttgaatttagatatttgggtttaaaattccctccctttacaccatctaattctactagagtcatgccaccatacaggtct

SEQ ID NO: 725863 - DNA, 644 bp, Homo sapiens
tgttaatcggggatagtaagtgaaatatcacattctacctgtttatctccttaaacatattcctatttcatattcaaagggacatggtaagagaactaaaccatggtcaacatttgcagtaggaagaataggtacttttagctttagactctcaaaacatataacatttaaatgaatcttgttaagatttcatttaactgatgctcaccatcaggtaatatagaagtcagcagaagaaaagcttccagaaatgcctggaagagacattaacctctaattcaacagtagtttttgctccaataaaacaataatcttcatttttctctttttgttttttgtttgtttgtttgagacagagtcttactctgtcacccaggctggagtgcagtggcgtgatctcagctcactgcaacctctgcctctagggttcaagygattgattctccttcctcagcctcctgagtagctggaaatacaggagtgtgccaccacgcctggctaatttttgtgtttttagtagagacagggtttcaccatgttggccaggctagtcttgaactcctgacctcaggtgatccacctgcctcagcctttcaaagtgctgggattacaggcttgagccaccgcacccagcctcatcttca

SEQ ID NO: 725864 - DNA, 2300 bp, Homo sapiens
aatgggaaatgttctttttctgaggtgactcagtaaactcatgaatctttccctcaaacacacacacacacacacgcacacacacacacacacacacacctatataaaatggaagaatagcctttcaattagaaaacacataaaaaagaagatacaaagaaaatatatgtagcacttatgagattaagcccagtttttcattaaaacatctgctcttcaagtttccatcccttggctctcacttaagtattttattttcaacttatggaagcaattacttgaatgcaaactccagggaagtaaatggccgcagcatatagctcattcaatgtacatttttgcattatcttatatacaaggcaaattagttttcaggttagtaaaaataatcttaacttcatatttttattgcttgtgggaattattccagatgaagtagcatgcaaatttcattgttttacatgttttttttttctagcatatatttcatctggggttgcataatggaaagatctatttttttctaaaaccttttgtcgtagtttgaaaggatcaacggctcctccctgtgattcagtttcacatggcgatttcctatgagccctgaaaacgtggaacctcaatgcatttgtttctgcttaagaattataaatcttcttactctattctgtgattataccatcccttgacaatggttttgctaaaagattttcaaaagccgagttctgggagtagaaggaggttcaactttgaatgctattttctgatcaattggagcttcttaatcctcttcctttactggactgtgctctggtaaatagctgtcagcaagggaaggagttcaatacctgtgggccatgacccacttaaaggcttcttcttttgggaaaaaaatccaagacagccttaaatgtcagtattcttctggaatgcccttgtgtcagcttcaggggttcaattgccatgcgtatctataaattccagccttttcaaataaaatactggaagttattacatctgtcaggtgaagcagaggtaaatgcaagccttgaatataaagatttgattcatatatacaccgtcaacaataagaaagccagagaggccttctagtatttggacatacatgatacattcttcagttgtgtatgatattcattaaaaattcgctgattattcttatcctacccattttaagataatccacaattaatcactggccaagcattacaatgcaatgttctatcaaatttatgcaaaagattctcttttttttttaaaatacactgaatcctccytttttatttcagatgtggtgttttgttaaggattttattgtaatacagttcttcagttccctgaaagtttagatatatgtaaaaactcatttcttaataaaaagcccatcataaacatgaaaagggtaaaatgacataatgtgacaaatgttgctattagcttatctgttgttatggaattatttttactgtacacagttcaccaaaaaataaaaaactgtcaaaaagctactgaactaaatgtctgtttttattttagtgaattgatcatagatttgtctgcccttttttttttgagttgttaatcaaatataaaaaccagtcacgattttgtgcaaaactacaaatacatgcagttttaaaatgtagagacactgaaaataaaagccaatttacttctcaggagggataaatcttggtttcagcaacaagaagcattgaggtgtttaagctgctttggggacagcattatagaagggcagaagagccctgtgtgcttacatgagctctggtttgtctttctctctacaattttctgcaattacaaaatatattttgagaagagcttatgcttttttggacagctaacatgtttcacttgttattaaatttactttttctctcttctactctgttttctatactttcctggtggaaaaggttcagtttttgtatgactgtccaagatgaaaacagaagatactacacatttttgactcagtgagtttagagccaaagatgattgtcaatcaatgtcaaagttcacagtcatggcatgcataagacatgcatgacatgcatgcataattttatgcatgcataattttatgtatgcaaatgcaaacttatgcatgcataattttattttctcattgtgattcttgcttccagttgatgtggttcaattcaaaaaaagattcattatgattttactcgagatcaatagctacatccgaattttttggaaatcaatgcaggactgagaaactactttccacattg

SEQ ID NO: 725865 - DNA, 640 bp, Homo sapiens
tctgtggtcagaaattggaggggaggagatgaaaggaaaaaaagggctccgaagttgcttttattcatgactgcacctctccctcactgactctgaagctcactgttgttgatttccctgtgatccttgatttccttgtgatatttcaaaccaytccagtctctagatggaaggtttatgttggccttgttgtggtactatccgatagaattttggatgatgtttctgtcctacaattctgaaaattgccattaaacaaaggttataatgtagttaaataaggcatgtaggaataaagcaaaatcaagtctggaggatgatacaactcttctgcatggttaagtatgttgtaacaatgattctagagggagagatcagtgtcgagtgggtattgatataatggtaagtaacccatttctccaaatctcttgacactgttcactcctgctttcttgtgccttatctactctcctcccacttcaactcctctcttaaaattctctcctcttcctccccttcccttcattatattcttaatgtttattttcattttttttcctggtgaagacatttaacaaatcaagaatggattccaagaatgctgaaagcttcctagttttttcctatatgaaaattatgc

SEQ ID NO: 725866 - DNA, 640 bp, Homo sapiens
tctgtggtcagaaattggaggggaggagatgaaaggaaaaaaagggctccgaagttgcttttattcatgactgcacctctccctcactgactctgaagctcactgttgttgatttccctgtgatccttgatttccttgtgatatttcaaaccactccagtctctagatggaaggtttatgttggccttgttgtggtactatccgatagaattttggatgatgtttctgtcctacaattctgaaaattgccattaaacaaaggttataatgtagttaaataaggcatgtaggaataaagcaaaatcaagtctggaggatgatacaactcttctgcatggttaagtatgttgtaacaatgattctagagggagagatcagtgtcgagtgggtattgatataatggtaagtaacccatttctccaaatctcttgacactgttcactcctgctttcttgtgccttatctactctcctcccacttcamctcctctcttaaaattctctcctcttcctccccttcccttcattatattcttaatgtttattttcattttttttcctggtgaagacatttaacaaatcaagaatggattccaagaatgctgaaagcttcctagttttttcctatatgaaaattatgc

SEQ ID NO: 725867 - DNA, 642 bp, Homo sapiens
tttatacaggaaaactttctttaaagtttagagtaagacaataatcaaatatcacattatcatgctgaaaaaagatggaaagtctattaatatatatgcctatatatttatttgttaagcaaacaatatgtattttttctatcatgctatgttagaatttttgtgtctagctatgatggagtaatcatgaacatctatgaaactacaraatataggaggtaaagatttttcagtattttacagcaggtaggagcaggacaggatgtgatatttgagagaaatacatagagagaggtgaatcccatattggcccctgattttggtctaagagaagtttctcagcgaaagtgttgtaagcttttttcaaattttgaatcttacctcctcttcagcacaacttgcctgcctacatgtggagaaagttctgtgtttaaaatctcacgtgattagattgggcccgccggaataagctccctatcttaaagtttgtaaccttaattatatacagaaccctcacaattgttttcttctcttattctcttaaatgactgccatcagtttaaagcaaaaaaaaaaaaaaaaaaagataaaatgactttatttcgttttgagaggagaagccacctggacttcctgagtcaa

SEQ ID NO: 725868 - DNA, 642 bp, Homo sapiens
tttatacaggaaaactttctttaaagtttagagtaagacaataatcaaatatcacattatcatgctgaaaaaagatggaaagtctattaatatatatgcctatatatttatttgttaagcaaacaatatgtattttttctatcatgctatgttagaatttttgtgtctagctatgatggagtaatcatgaacatctatgaaactacagaatataggaggtaaagatttttcagtattttacagcaggtaggagcaggacaggatgtgatatttgagagaaatacatagaragaggtgaatcccatattggcccctgattttggtctaagagaagtttctcagcgaaagtgttgtaagcttttttcaaattttgaatcttacctcctcttcagcacaacttgcctgcctacatgtggagaaagttctgtgtttaaaatctcacgtgattagattgggcccgccggaataagctccctatcttaaagtttgtaaccttaattatatacagaaccctcacaattgttttcttctcttattctcttaaatgactgccatcagtttaaagcaaaaaaaaaaaaaaaaaaagataaaatgactttatttcgttttgagaggagaagccacctggacttcctgagtcaa

SEQ ID NO: 725869 - DNA, 617 bp, Homo sapiens
aatgtaaagtttatcatattatggcagattcatagaataattttatcaaagatataaacctattcttaatgattctacatgatatattagacaaatttttttaacctcaggacaacacgtatttatattactttttctgtgtttcactcaatttttattctgctatgccaacagcaaataatgttatttgctacttgtatttatgttttcacttttattatgcctatttcaaaataattcaaaggttaatgcattgaattattatgtactaaaatgaatctaaactactagactgctgtgaatgaaaaataattctgtgtaatatatatttaaatcatcaaggcagactgattttaggcttatttgtcatataaatttaatggggaatgcatatgtgtgtcacagaatctttctataatttttttaagcaagggcatmaagcatatttagtataatttgataatgtacagattctaatacctaaaaatttaatatctatttcatacaaataaaataattctcacattatttttaaacagagaattaaaagtacattgtcatagaaacaaaggtctaggaaatgtaagctaagtttttaattactgtcttaataacca

SEQ ID NO: 725870 - DNA, 617 bp, Homo sapiens
aatgtaaagtttatcatattatggcagattcatagaataattttatcaaagatataaacctattcttaatgattctacatgatatattagacaaatttttttaacctcaggacaacacgtatttatattactttttctgtgtttcactcaatttttattctgctatgccaacagcaaataatgttatttgctacttgtatttatgttttcacttttattatgcctatttcaaaataattcaaaggttaatgcattgaattattatgtactaaaatgaatctaaactactagactgctgtgaatgaaaaataattctgtgtaatatatatttaaatcatcaaggcagactgattttaggcttatttgtcatataaatttaatggggaatgcatatgtgtgtcacagaatctttctataatttttttaagcaagggcataaagcatatttagtayaatttgataatgtacagattctaatacctaaaaatttaatatctatttcatacaaataaaataattctcacattatttttaaacagagaattaaaagtacattgtcatagaaacaaaggtctaggaaatgtaagctaagtttttaattactgtcttaataacca

SEQ ID NO: 725871 - DNA, 617 bp, Homo sapiens
aatgtaaagtttatcatattatggcagattcatagaataattttatcaaagatataaacctattcttaatgattctacatgatatattagacaaatttttttaacctcaggacaacacgtatttatattactttttctgtgtttcactcaatttttattctgctatgccaacagcaaataatgttatttgctacttgtatttatgttttcacttttattatgcctatttcaaaataattcaaaggttaatgcattgaattattatgtactaaaatgaatctaaactactagactgctgtgaatgaaaaataattctgtgtaatatatatttaaatcatcaaggcagactgattttaggcttatttgtcatataaatttaatggggaatgcatatgtgtgtcacagaatctttctataatttttttaagcaagggcataaagcatatttagtataatttgataatgtacagattctaatacctaaaaatttaatatctatttcatacaaataaaataattctcacattatttttaaacagagaattaaaagtacattgtcatagaaacaaaggtctaggaaawgtaagctaagtttttaattactgtcttaataacca

SEQ ID NO: 725872 - DNA, 631 bp, Homo sapiens
tgaggatatagcaagaagagagccctctgaaaaccaggaagaggacacttaccacacacctaatagaccagcatctcagtcttggacttcccagcccccagaactataagaaataaatgtatgctgttaaaactacctagtatttgttatagcagcccaagctgactaagatatttgggaataaaccctttcagttatctgaatacagttctttgatctaacagaatttaggctctactttaagctctttsagaaaaaacaatgactcaattaaaataatagaataataaacattctctatttagattagcaaactcttcttgttcaaagtgtgtaaaatagagaacaacttctccaaacatagttttatttatttattcatttatttttgagacagagtctcactctgtcacccaggctggcatgcagtggcttgatcagggctcattgcagccttgacctcccaggctcaagtgagccttctgcctcagtcccccaagtagctggggcaacaggtatgcacaaccacgtcctgctaattgtttgtagttttagtagagaccaggttttgccatgttaccaaggctggtctttaactcctacactcaagggatccacccatcttagcatc

SEQ ID NO: 725873 - DNA, 607 bp, Homo sapiens
gttggaggaaattaaaacaaaaatatggtttataaaatagcttaactaaatttgttggtagtctgaaatcaaaatgttgcggtacatttctgtaggtgtataatttattgctgaaaataccttttccataaaatgcctagttggctgtcattcttcctttctctctgtttactgagtaaatggaataaaattatgagawcagctccaaactatgttccagatctaaacttgtatgtttaaccatagaaggatcaatgcttactcaaagctaaaagtctagactatttgtgatccgaaagtttactgggttcaggaaactatcgaagtggcagatgggagtttcatattgttttctggaaagatacaggaaagaatgaggtttgtagccaacatacattaatacaaccagctctgattctacttgctgtggcattgtatacattccctaaaatcctttaaggatttcaatctccaggtttaagtaagataagtctcaaagagcatttgatggcagattattttatttcatacatgttgaaactaataaacaaaagtagagaaaatgtcacctacatattattaacataatacacaagaaactgcctaa

SEQ ID NO: 725874 - DNA, 607 bp, Homo sapiens
gttggaggaaattaaaacaaaaatatggtttataaaatagcttaactaaatttgttggtagtctgaaatcaaaatgttgcggtacatttctgtaggtgtataatttattgctgaaaataccttttccataaaatgcctagttggctgtcattcttcctttctctctgtttactgagtaaatggaataaaattatgagatcagctccaaactatgttccagatctaaacttgtatgtttaaccatagaaggatcaatgcttactcaaagctaaaagtctagactatttgtgatccgaaagtttactgggttcaggaaactatcgaagtggcagatgggagtttcatattgttttctggaaagmtacaggaaagaatgaggtttgtagccaacatacattaatacaaccagctctgattctacttgctgtggcattgtatacattccctaaaatcctttaaggatttcaatctccaggtttaagtaagataagtctcaaagagcatttgatggcagattattttatttcatacatgttgaaactaataaacaaaagtagagaaaatgtcacctacatattattaacataatacacaagaaactgcctaa

SEQ ID NO: 725875 - DNA, 619 bp, Homo sapiens
gtttcttatgaataaattagcaccattctcttggtgctgtcctcgtgctagtgagtgactttcatgagatctggctatttaaatgtgtgtagcatttcgcgctctctctcttgctcctgttttcaccacgcaacatacctgttctctctttgccttccaccatgattggaagtttcctgaggcgtcctcagaagcagatgccactatgcttcctgtacagccttcagaactgtaagccagtaaaacttcttataaattacccagcctcaaatgtttgtttattgcaatgcaagaatggcctaatacattttataatcataagtaaataaatataagtaagactactatgaaatattttcaaataaaataacttttccactaacattgtgacaaacatttgggatcatagatgtttttaagccaatatattccatttctrtatgtgtcatgctacaagcatattttacttaaatgccaaataaatatgcacatgttaccaatcatgagatttggggagggggtagttaagtaataagttgaaaatactataatgattttgtggtgatattttatataaaaatatttttcttgagaacaagaatagttggattattttaaa

SEQ ID NO: 725876 - DNA, 604 bp, Homo sapiens
cctctatctctggggctcaagccatcctctcacctcagccacccagagtagctaagaccacaggcatgtgccaccacgctcagctaattttattttattttattttttagagacagggtctcaccatattgcccaggctggtctagaactcctaggcccaagagattctgcccccttggccgtccaaaatgccaggattacagacatgagccaccgtgcctggccaatattttaacttttgatctaggtagtggttacttggctcattggttcataatacttttttgattttcacatctttcttttgtatcattttaatcaaactgcttttaaaaagagtcaccaaaatcaattaccaacatgttcaggttaattatacgtttggattttactcctgtttcccagtgtaattgttgataatgctgacttgtgctccctaaagttttctcatttggacaataaattacatggttttctataagtagcctacaagcattgtagtatttttaaagctgaaataaaccttagaggtcaactagggcccagtggtttccaaaatgttgccaagaaagcattctgaaatgtgtggtaargtttttggttg

SEQ ID NO: 725877 - DNA, 1145 bp, Homo sapiens
atttcattttgaaaaataactacaaatctattttaattttacaaagttagactcatagcattttagatatcaatgtcttcatttaacagaagtgaagatggagcaaacgctcaatcagcgtctgtatttattcgctcctgttgtgccagggtgcgtttttgccgagcggttgcctttctttactcacaaaacccccttgatgtctgtcctccacgttttacgagggagagccggatcttttgaagtttgtatcatctaaagcaggtatattgggatgactatggatagaatttaacctgaaaacactgaagttgacagctgacaaagatataagaatccaaagtatgttaaaaattaaggagctgaggcycacagaagtgaagttacttttccagcatcacacagcagatctaggaccctgtgtgatttgaaaaggccaaggtatctaatgatgctcataatttagtttacattttgtgtcaaatagatgaggtcaagtggacattatgtgtatattccaaagccaaaattactgcttgtaatatccattcatctctccgaagacgtagtgcctcttttatatggctttaacctaatgtataatcgaagtgaattagggcagccagacttttaatcacaggactgatcttttaaaaacgggtatatgtaaagttaattgcttatctatgtgaacagtaatatacactataaaaagttttcaaggcaacttcctgcctgtggtttaatttgatagtcacaatgataggaaattggcagggttaggtggtggtatctacattttgcccatgaggacttgtggctcagagaatttgagttttttctagtaaggtcactaggtccctagtgcacagcctgcttttaggtacggatgtgggatgggggtgtcggcagaccacagggttttgactctcagtttgggctcatttccatgactccttgctgcctccctgatttctgtcaaatgaccaaagcacatttagtaattacttctgctgcaaggactactccttattaggctgtgataagtaagtttcctcacatagtgggtcagctcactctggccacaggacccagcttcctaaccacacacattaagaaagagaaaaattagcactgtctgagac

SEQ ID NO: 725878 - DNA, 1175 bp, Homo sapiens
gtttcacaaaccacatttttcttcagactctgacaatggtagttacgtacttctgatccttaattccctcaggactgattattgggaataggaaataaattagtagtttttatctttaaaagcctagtgacctcttgatgcaagtatgtttaagaagagttcgcttaaagccattaaagtatgaaatctagatgaaggattaggaaatagattttaacaaaaaatatttttgattctgattgtttttatcatgtatatttgaaaaatgattctctttaaactacctgagaatgatagtagtagtttcttgcaatactggttttcacagaagatcgaagttgagttgtgctttttctttaagctgtactttgattgaattttgatatagattgtaatagattcagtaagaaacagaagcagttatgtaatatgacagtgtcttagagctgtcattttagwctgaggttatttcgtaaagggctaattccattttgaatagataaataaaagtatatcttatagagagtactgcacacataatgaaataactgtttttatggcataatttcttggcttaattataatttaattaggtataatcaaattataatttaatagtttaaatgtgttttaaactatccagaattaaatcaaaatcagaattttgatttaattctggatagttgaggagcctttgtattaataaattatttatttttattttttattttttccataggaattacagttcttaacacctttatactaggagcttaaaatattcaggatttgggtttttcttcatctcatttaaaatgaaatttagaatttaatggttaatttaatttagtaaatttggcataatttttaacacatctactttgtcctttaaaaagaaaaactgagtcagtaaataataattttaatttgcttagaaggattttttaaaattccaaggataggtagctgctcatttatactctgcctagtctaatttttattgtttcgtattggtaatttttatttttatttatctatttattttattgtggtaagaactggtacttctttttttctaatgatgtttataggtagggtttgtgtgtgtgtcttattttttataaaattattttaaacttgtagaaaagttgcaagactagtaaaagaattcttga

SEQ ID NO: 725879 - DNA, 1224 bp, Homo sapiens
cataagcgaacactaaacaaaaatggctagaaatgtctttttctttcttttctctctttgttgtttaaggtattaagcacgaattattacatgagactggcagatagctattaatcctcttacagatttgagaaagttgattctcaaatatttatgcaccttctccttcattgttttctttaaatctgtcctcttaaaaagcttcttaagagctcagttaatgcttttgacttaactaggagaaaaaggcatgataatacaggcaagatggcattgttagcaattctggtagtggtttggaatgaatcctaagaggcagggatcttaaggacaaggaagagaagagagagagggagggatctttgatctctttctctggtaatcttaatgcataattttactaawacatgttctcaattcattcatattattaagctcttcctgcagttgatatctgagcagagtaagatttgtatttccatttttacttttttgaaagagaatatatggacagattattagtacaatttgggcactgtggttttaagaatatctgagtaaaataacaatatgaaataataaacagaagctctaacgtcaggtaacaaatagacagcaagaaaggttttgcaccatcctcttacggcctagagagttgacaagttgcttgtagttttaaaaaaataataaagtatacccttctggtatatcatcaagagcttaagaatcttggctttcatatttaaaatgcttttggggagacatatattaaaattttagccaagatgatagacatgtctcaattatatatgtgtgtgtatgtttttaaagctaaaaacattacttttagatccctagaatgaaaatttttttctcatctatgcaattcccatatggtttttttttaaatcatattttattcattttctccctttagcaattttcattttatttctcataatttgaacagagacagttctcatacatgatcagatgctttttttttcttcttaccatcatttatgcatgacataggtaatgtgactaatttctccagttgattcaagaaactcattactttgcctcaaattatatgtaaaatatttgttttacttaggttacagttatcagaaaggtagtttttttcttctattaaaatataacattgtgaaagaaaataaaatttatgctattctttgctttgtttttataaatgaatttttc

SEQ ID NO: 725880 - DNA, 1125 bp, Homo sapiens
tcttttcaagtttgtgtagctctatgggatagtatatgatgatcatcttcaatctttagcatgtgtaagaaatatctacaggacttgttgggygccactacaagaaactctgaattgataggtctggtttggtgcccgaaaatttgtattttgaagttttcaggtgcactctttcagtaaaatcacccaaggaaatctttgccctgtatgtacttgaccagattatatgctccatgttagattttagaatagtgatgttttgtattatatttgtagacttatgacctatgtttttcttctgctgctaacctaactgggaagaccaactatcattttaagatagagtcagagggccgcgcgtagtggctcacgcctgtaatcccagaactttgggaggccgaggcaagtggatcacctgaggtcgagagttcgagaatagcctgaccatgtggtgaaaccttgtctctactaaaaatacaaaaattagccgggcatggtggcatgcatctgtagtcccagctactcaggaagctgagacaggggaattgcttgaacctgggaggtggaggttgcagtgaaccaagatcacaccacggcactccagcctggccacagagcaacaaagcaagatctgtctcaaaaaaaaaaaaaaaagaatcagagaaaaaataaaaaagtgcatgctttgtaatacctgtagatttatggcaactggtagaatggaggatagaaaattgcataatattggattgtgcaattgcataattaatctcaggaaacagcagtaattcttgttttattacaaacatcatgtggttttaaaaattatcttcaatgtgattttatatattacatttttagaaaaatatttttggtctttttgtgagcataatagtatgcatgttagggaaataagctgaaaagagtgaaagtaagtattccacttgttcttttttatttttttccttaatgattctcttgaataagttaggcattcaaatcggtttcttggaagttcagagttctttcttgaaaagtttatctttcctctttgccttttctcttgctaactttgactaagatttaaaattgagcaaaaaaccactggattctttgtagcctgtt

SEQ ID NO: 725881 - DNA, 1125 bp, Homo sapiens
tcttttcaagtttgtgtagctctatgggatagtatatgatgatcatcttcaatctttagcatgtgtaagaaatatctacaggacttgttgggtgccactacaagaaactctgaattgataggtctggtttggtgcccgaaaatttgtattttgaagttttcaggtgcactctttcagtaaaatcacccaaggaaatctttgccctgtatgtacttgaccagattatatgctccatgttagattttagaatagtgatgttttgtattatatttgtagacttatgacctatgtttttcttctgctgctaacctaactgggaagaccaactatcattttaagatagagtcagagggccgcgcgtagtggctcacgcctgtaatcccagaactttgggaggccgaggcaagtggatcacctgaggtcgagagttcgagaatagcctgaccatgtggtgaaaccttgtctctactaaaaatacaaaaattagccgggcatggtggcatgcatctgtagtcccagctactcaggaagctgagacaggggaattgcttgaacctgggaggtggaggttgcagtgaaccaagatcacaccacggcactccagcctggccacagagcaacaaagcaagatctgtctcaaaaaaaaaaaaaaaagartcagagaaaaaataaaaaagtgcatgctttgtaatacctgtagatttatggcaactggtagaatggaggatagaaaattgcataatattggattgtgcaattgcataattaatctcaggaaacagcagtaattcttgttttattacaaacatcatgtggttttaaaaattatcttcaatgtgattttatatattacatttttagaaaaatatttttggtctttttgtgagcataatagtatgcatgttagggaaataagctgaaaagagtgaaagtaagtattccacttgttcttttttatttttttccttaatgattctcttgaataagttaggcattcaaatcggtttcttggaagttcagagttctttcttgaaaagtttatctttcctctttgccttttctcttgctaactttgactaagatttaaaattgagcaaaaaaccactggattctttgtagcctgtt

SEQ ID NO: 725882 - DNA, 1125 bp, Homo sapiens
tcttttcaagtttgtgtagctctatgggatagtatatgatgatcatcttcaatctttagcatgtgtaagaaatatctacaggacttgttgggtgccactacaagaaactctgaattgataggtctggtttggtgcccgaaaatttgtattttgaagttttcaggtgcactctttcagtaaaatcacccaaggaaatctttgccctgtatgtacttgaccagattatatgctccatgttagattttagaatagtgatgttttgtattatatttgtagacttatgacctatgtttttcttctgctgctaacctaactgggaagaccaactatcattttaagatagagtcagagggccgcgcgtagtggctcacgcctgtaatcccagaactttgggaggccgaggcaagtggatcacctgaggtcgagagttcgagaatagcctgaccatgtggtgaaaccttgtctctactaaaaatacaaaaattagccgggcatggtggcatgcatctgtagtcccagctactcaggaagctgagacaggggaattgcttgaacctgggaggtggaggttgcagtgaaccaagatcacaccacggcactccagcctggccacagagcaacaaagcaagatctgtctcaaaaaaaaaaaaaaaagaatcagagaaaaaataaaaaagtgcatgctttgtaatacctgtagatttatggcaactggtagaatggaggatagaaaattgcataatattggattgtgcaattgcataattaatctcaggaaacagcagtaattcttgttttattacaaacrtcatgtggttttaaaaattatcttcaatgtgattttatatattacatttttagaaaaatatttttggtctttttgtgagcataatagtatgcatgttagggaaataagctgaaaagagtgaaagtaagtattccacttgttcttttttatttttttccttaatgattctcttgaataagttaggcattcaaatcggtttcttggaagttcagagttctttcttgaaaagtttatctttcctctttgccttttctcttgctaactttgactaagatttaaaattgagcaaaaaaccactggattctttgtagcctgtt

SEQ ID NO: 725883 - DNA, 615 bp, Homo sapiens
ataatactgatttacagttggggaaactgatgtaactattttacagtggcaggtagagggctctgtcaagttgtctggctctgaatctctctctctctcttttttttgtaaataaagtttttgttcccccagcttaaagtaaaataaaaatggtayatatttatggtatgcagcatgattgatatacatatattataaaatgattaccacaatcaaatatattcgtcacctctcccagttatcatttttcaatgagaaatttcagatctactctcttagcaaatttcaagtatacaatacggtactattaacagtcaccatgctgtacattagatttctataacttatttatcctgtctaacaaactttgtactctttggccaacatctcaccatctccccctcacccaggccctgacaaccactttttaagatttcacgtatatatgagattatggaatatttgtctttctgtgtctgatttatttacttagcataatgtcctccagcttcatccatgttgcacatgacagaacttccttatttcttgaaggctgaataatattctattgcagagaggtagataatcacattttgtttctgcaaccattaatga

SEQ ID NO: 725884 - DNA, 592 bp, Homo sapiens
tttattcaacatgtaaaacattcttttaaatacatctcatggaaacatttgaattcctccagttacaggtatatttactgcatctctactctcttttgatagtactctgaagtacttggagttaggatttatggtgcaagaatttgcaagaaaccacaattcagcccatgacaatatccagatgtaaacaaatgaacttcaatatgtacctcaacatatgtccatgcatctatattgcaaatcttttcatgcagatctatgaaaagtctactagagctataatggcctttagttatatctgcatgcaaatttttgcattgagatcttcacagcagcattattcataattgtattaaaaagattscattagaaagaattgcgttttctatttatacagttgctgatttcttatttctttgataaacaggagttgaattttatacaaatcatggctttttttgtgtaagatattgaggaaatcactgtgaattcaaaacggttcatgttcttaaggagctggatagttattaggtaggcagatacttagataactaccagtaataaagatttgcagtagctagttattggaaca

SEQ ID NO: 725885 - DNA, 592 bp, Homo sapiens
tttattcaacatgtaaaacattcttttaaatacatctcatggaaacatttgaattcctccagttacaggtatatttactgcatctctactctcttttgatagtactctgaagtacttggagttaggatttatggtgcaagaatttgcaagaaaccacaattcagcccatgacaatatccagatgtaaacaaatgaacttcaatatgtacctcaacatatgtccatgcatctatattgcaaatcttttcatgcagatctatgaaaagtctactagagctataatggcctttagttatatctgcatgcaaatttttgcattgagatcttcacagcagcattattcataattgtattaaaaagattgcattagaaagaattgcgttttctatttatacagttgctgatttcttatttctttgataaacaggagttgaattttatacaaatcatggytttttttgtgtaagatattgaggaaatcactgtgaattcaaaacggttcatgttcttaaggagctggatagttattaggtaggcagatacttagataactaccagtaataaagatttgcagtagctagttattggaaca

SEQ ID NO: 725886 - DNA, 606 bp, Homo sapiens
tgtactatggactccccgcccacttttacatacttttttttctcatccctacctccttaattctaatcttcatttgaccattcctccatcctaaatatcactaataaaaacaatgagaaaaaaactgaagttatcacttatttcgcctgcagatatcatccaaattctttttgagtaactatttcctgtattcatattttgtctactcactttattcctcaaaatttttcaaactaatatatctactgttttatctcaggttcttagcctcaactattcagtagcattcaatctattaaactgtctttaawttatccctgcttctataatcatcccattggtggaaacatttattttccataattcacttagaaagctcagcatagatttgtcctctcattcggcattttctttcattttctttggttaaatgtgcacctccagtggagaacatatacaggtactgcgatggtatttaactatatgcaccaacttggctaagttgtggtgcctaattgtttagtgaaacactaacccagatgttgctgtgaaagcagttggtggatatgaacgacatttataatcagttaaataaagatttccctc

SEQ ID NO: 725887 - DNA, 581 bp, Homo sapiens
aagttgtataaaatagtgcatctactttataattttagattaatacaaccataatcattggtttatttctaaaaataaaaaatgcttattatttttaagaacaacaatatttattatttcttaaaatagcatttatcttttaatgtagtctgttgagcatgtttcatatttaaaatattagatttctagaagagatattgagctaagtgaaactattgcttggaggaaaatggggagagaaaatgggaaagcaagtagaggtactaacatgaacyaggaaaagctgaatcacgtctacctgcaaatgacctgagtatcacaagtgttcttcagttagaaaacaggttattgatagggtatcctatcaaggtggaaaaggagagcatctaaaccacaagtttctgacatagctgttgacaaaggcttgagcaatacagctttattccagaacaagatggcctcagccttcataaatggcccccaaaatgaaaataagcatataaatcagcatagaagattagatgtcaaagccaagtttcgccaaagttaatgattccatttaaatatggctattgaatgtg

SEQ ID NO: 725888 - DNA, 581 bp, Homo sapiens
aagttgtataaaatagtgcatctactttataattttagattaatacaaccataatcattggtttatttctaaaaataaaaaatgcttattatttttaagaacaacaatatttattatttcttaaaatagcatttatcttttaatgtagtctgttgagcatgtttcatatttaaaatattagatttctagaagagatattgagctaagtgaaactattgcttggaggaaaatggggagagaaaatgggaaagcaagtagaggtactaacatgaaccaggaaaagctgaatcacgtctacctgcaaatgacctgagtatcacaagtgttcttcagttagaaaacaggttattgatagggtatcctatcaaggtggaaaaggagagcrtctaaaccacaagtttctgacatagctgttgacaaaggcttgagcaatacagctttattccagaacaagatggcctcagccttcataaatggcccccaaaatgaaaataagcatataaatcagcatagaagattagatgtcaaagccaagtttcgccaaagttaatgattccatttaaatatggctattgaatgtg

SEQ ID NO: 725889 - DNA, 577 bp, Homo sapiens
tggtggtatgaatatttattattgagacatgaacatatttgtgtctacattaactgatattttaaatttccataccccatttccatactattataaaatgtttaatagtaattracttgatatttcaatatttaagctccaggatatatcaggggaaattcagccagatatcgggcaaaattcacccgatatttcacataggttcttttctattttccctaagcgttggctggtttgagaaataaagggactgagtacaaaagagagaaattctaaagctgggcatccggggggagacatcacatgtcggtagtttccatgatgccccacaagccgcaaaaccagcaagtttttattagggactttcaaaaggggagggagtgtacgaatagggtgtgggtcacagagatcacgtgcttcacaaggtaatagaatatcacgaggcaaatggaggcagggcaagatcacaggaccacaggaccggggcaaaattaaaattgctaatgaagtttcaggcaccattgtcactgataacctcttatcaggagacagggtttgagagcaaccagtctgacca

SEQ ID NO: 725890 - DNA, 577 bp, Homo sapiens
tggtggtatgaatatttattattgagacatgaacatatttgtgtctacattaactgatattttaaatttccataccccatttccatactattataaaatgtttaatagtaattaacttgatatttcaatatttaagctccaggatatatcaggggaaattcagccagatatcgggcaaaattcacccgatatttcacatrggttcttttctattttccctaagcgttggctggtttgagaaataaagggactgagtacaaaagagagaaattctaaagctgggcatccggggggagacatcacatgtcggtagtttccatgatgccccacaagccgcaaaaccagcaagtttttattagggactttcaaaaggggagggagtgtacgaatagggtgtgggtcacagagatcacgtgcttcacaaggtaatagaatatcacgaggcaaatggaggcagggcaagatcacaggaccacaggaccggggcaaaattaaaattgctaatgaagtttcaggcaccattgtcactgataacctcttatcaggagacagggtttgagagcaaccagtctgacca

SEQ ID NO: 725891 - DNA, 1290 bp, Homo sapiens
ggcctaaattctaatattctccctctgaaactaagcagggctctctgtaggcctagtatgggttctggtcttcactgagacagcatattcccagatgcactccagatccatcagtggctgtgtgatggttcactttacgtgtcaacttgggctgggccatagtgcccagacagttggtcaaacttattctggatgtttccatgagggtattttttggctgagatcaatacttaaatgggtggacattgaataacaagtatcctccataatgtgggtgggcctcatccaatcagttgaaggccttaacaggacaaatgctgacctttcctgagctaaaaagaattctgccagcagacagaattacctttgtctttggacttaggcagcgttcttccctgggtctgcagcctgccagcttaccctgaagattttagacttaccaagctttcacaatcacatgaaaaaaattccttgaataaatccttccccctctctctctctctctmtatatatatatatatatatttacacatgtacagttggttctatctgtctggagaaccctgactaaggcaggcatataaagtttatttggtggttcttcatttagacagcttttgtgattgactatgaaagagttctccccaaaaccttgcaaagcagtagtgtagacttttcacagctgtggtattccccatttgtcactgcaaagagccatctgtttctagctttctggcttaaagagaggtgcaaccaattctatttctttctcctcttttatcagtttcaatagtattcaataaatcagtctagcacacaaaaacatgtgttttcatcttcatcactagagtataaacccctcaagggcacgaactaatatataccaccactgtagcacctctggggctacctcacacgttgtagatgctccataaggaaaaaagacaaggttgagcaaattgtactgagaaactggatgagaatggttggcctaattttaccccaagaattaacccaagcatgcaggtgtatctggtttaattttgcataccttccgtgaaaaatgacttaccaagcagaacttcacacattgcggttatgagaatgcattttttcattggctccagttcacatggtttaaatagcatttcatttcactatgagctttattttaatttgaaacttcacaaatacgaaaccatttgaatcaaaccagatgcaagcactcagaatatcctgctcgttcctgtcagcctgcttcacttgagaaacaattcaatttctcttgac

SEQ ID NO: 725892 - DNA, 693 bp, Homo sapiens
acaaaagctgtaaataagatcaaaaaactgcaattttatgaaggattgaagtattacaaggctaagaaaaactaattttttctactccatctcctatgaactgtttgagcaaacatattttcactgattagatgttttcactgattagatattttcatgaatatattttctatgaactgtttgaacaaagacattttcactgattagatattttccctgattagatattttccctgactagatagatcaattatgtttttaaaaagacamactatatcttgcatacctaccccgaccaaaccccacatgggtggcgaatgaaatccatcaccaaaacttatcagaattcacattatcccatggttttgcatattctttataagatcaaccaaaatgtaagcattcatgtgtttttttaatctctgaaatgttcacctcctaatattatttcatattttaattcatgcaaccattgctcaaattattgttggaagtcatctttctgaatggcctctagtagtaattcatgaaccaccagagaaaatctaaactatgctttttagttaaaattacccttttaatgaaatgctacatgactgtcttagtctgtttgtgttactattgcaaagtatcttagtctgaataatttataaacaacagaacttatttcttaccattctggatgctgagaat

SEQ ID NO: 725893 - DNA, 614 bp, Homo sapiens
ccatggaatactatgcagccataaaaagaaaacaaaatygtatcctttgcaccaacgtgcataggaaatcttatcctttgcaccaacatggataggacatcttatcctttgcaacaaggtgctttcagaagcaggatgagcactgcaattgaaggctaagaggaaatggctcttggccaatttaactgatcagtctgtaagaaattaaaaggaacataaccagagagagatagggtatctcttatgagaacatcagaggagcgtctatggctgtgtaatgttgacattctcttctcaacgtggatgcagctggaggcatttcctaaatgaattaacacaggaacagaacagcaaataccacatattcacacttctaagagggagctcagtattgtgtatgcatgaacataaagatggtaacgatgctgaggactactagagtgaggagagagggacaggagcaagggctgaaaagctacctattggctaccatgctcactacctgggtgacaggatcattcaaaccccaagtctcagcatcacacaatacagtcatgtagcaaacctgcacatgtaccacctgaatctacaatgaacattgaaaaatgtaaaat

SEQ ID NO: 725894 - DNA, 614 bp, Homo sapiens
ccatggaatactatgcagccataaaaagaaaacaaaattgtatcctttgcaccaacgtgcataggaaatcttatcctttgcaccaacatggataggacatcttatcctttgcaacaaggtgctttcagaagcaggatgagcactgcaattgaaggctaagaggaaatggctcttggccaatttaactgatcagtctgtaagaaattaaaaggaacataaccagagagagatagggtatctcttatgagaacatcagaggagcgtctatggctgtgtaatgttgacattctcttctcaacgtggatgcagctggaggcatttcctaaatgaattaacacaggaacagaacagcaaataccacatattcacacttctaagagggagctcagtattgtgtatgcatgaacataaagatggwaacgatgctgaggactactagagtgaggagagagggacaggagcaagggctgaaaagctacctattggctaccatgctcactacctgggtgacaggatcattcaaaccccaagtctcagcatcacacaatacagtcatgtagcaaacctgcacatgtaccacctgaatctacaatgaacattgaaaaatgtaaaat

SEQ ID NO: 725895 - DNA, 614 bp, Homo sapiens
ccatggaatactatgcagccataaaaagaaaacaaaattgtatcctttgcaccaacgtgcataggaaatcttatcctttgcaccaacatggataggacatcttatcctttgcaacaaggtgctttcagaagcaggatgagcactgcaattgaaggctaagaggaaatggctcttggccaatttaactgatcagtctgtaagaaattaaaaggaacataaccagagagagatagggtatctcttatgagaacatcagaggagcgtctatggctgtgtaatgttgacattctcttctcaacgtggatgcagctggaggcatttcctaaatgaattaacacaggaacagaacagcaaataccacatattcacacttctaagagggagctcagtattgtgtatgcatgaacataaagatggtaacgatgctgaggactactagagtgaggagagagggacaggagcaagggctgaaaagctacctattggctaccatgctcactacctgggtgacaggatcattcaaaccccaagtctcagcatcacacaatacagtcatgtagcaaacctgcacatgtaccacctgaatctamaatgaacattgaaaaatgtaaaat

SEQ ID NO: 725896 - DNA, 2216 bp, Homo sapiens
tgcattccctatgaactgtgcatctgtctaccctggggccacctaatgtcacaaccaaccaaccttagccaacagcaccactgatggctaaaccactyagtggtttaacttccaatctcttcctcactgcaccttcctacagaggcagatcatgcatataccatgtgcccagtttttctgtctttccccaccctctagccatttactgtcacttcaggcggccttttttcacacttcactctctacttcattccatgtagaaaatgatctcaggaaaatctccatccattccaaccataaaccaaaaatttattttattctttagctcctatttgagtctcaccttgtattataaaacacattaaatatgtatcatttcacttgattctccaaacaaccttgtgagatagatatcacttatcacaatttacagagaagacaagtgccttttgccagagagtttagctagtaagtgaaagaacaggtctacaaaccaaggcctcttgattcccaaacactttgtccttctagggtaaaacaatagtactaatggttcacctgctataaataagaaaggagaatttttacattttgacatgaaattaacataagaaaccaaaacttccaacagcaatatcatgtaaaactattcagaagtctccttcagcatctagacaatgttctgacttagatagctttttctcaagaagggtgtctaagattgatgtaatcaatgctattttctacttatggtaaataattcacttaataacttttgttctatcattcattgcaaatacaatattttagtttcatcatgttgtacatggaatagcctggatagttagtattgctttgaactctactacacatactgctattcttgcattaatttattcagcaaatgtctattaaatattttctatagtaaagatgctacaccgtacagtattaggaatatcaaattatgccagcacactctaagtcgatctatttataaggtgtcatccatgcttaattcaggtatcatgtaagtgattcaaactaaatgacaggaatgaagagaacccaattatggttaaattttttaaataataaaaccaattggcacatttttatgtatttataagaatatttcataccatgggagcagaatggaggaaaagatgaaagggaaacaaattttagtttgtttccttaaagaaatatatgttagattttctcattcctgcctgccccattcctctgtctgctgaacagaatcaatgatagcagcagccgagatcccagtggaccctctggccaaatgcagctgcatgagtaagcccaggtaaagacaacaaaggaactcccctgcccaaatacagatgtgttagttttaaattgtttaatttaactttgttgtttaaatttgttgttgttaaatcactgttgtctgcagatgagaagttgcagggtagtttgctacacaacaatcgacagcagatagaacaaaacagaattccctaaagactgcagggccagaagaaagaattgagttggtcaggacaaaagagtggataacagtactgactaggataagcgtagacgtaaggccaagagggggtttccatgaaggagtgtgaggagggcattctgggacagcagaaacagagtttgttcaggagcttttcctgggtataagagacagactgcaaccagaggaaatacagcagataaggctatgcattaggaatgaatttctccattccatcattttctcagtaaactgagtaaagatctcaattgctttcaattgtttattataaatgaaaatttgctttgagattcattttaaatatgcattctcagtaattctttttactttaggggcagaggatgtataacggatgattttcctcttagccatatggaagagttggacaaataaactaagtaagattctaagaagaaggaagattaaatacagctagattgtgatcctaagacaaaaatgaaggagctaaggcatgcagactagctggtcagttatttgctgacaccttagtattctagtgtagatggaagactgaataggaggccaagaaaacaacagaacaagaaaggcaggagccatgattaagaatgagttgctctgtgcaatcatgttgggcgggacaaaaagagaaagtcaatttttggacttaagaactagaaattaagaggcaaatatgatc

SEQ ID NO: 725897 - DNA, 2216 bp, Homo sapiens
tgcattccctatgaactgtgcatctgtctaccctggggccacctaatgtcacaaccaaccaaccttagccaacagcaccactgatggctaaaccacttagtggtttaacttccaatctcttcctcactgcaccttcctacagaggcagatcatgcatataccatgtgcccagtttttctgtctttccccaccctctagccatttactgtcacttcaggcggccttttttcacacttcactctctacttcattccatgtagaaaatgatctcaggaaaatctccatccattccaaccataaaccaaaaatttattttattctttagctcctatttgagtctcaccttgtattataaaacacattaaatatgtatcatttcacttgattctccaaacaaccttgtgagatagatatcacttatcacaatttacagagaagacaagtgccttttgccagagagtttagctagtaagtgaaagaacaggtctacaaaccaaggcctcttgattcccaaacactttgtccttctagggtaaaacaatagtactaatggttcacctgctataaataagaaaggagaatttttacattttgacatgaaattaacataagaaaccaaaacttccaacagcaatatcatgtaaaactattcagaagtctccttcagcatctagacaatgttctgacttagatagctttttctcaagaagggtgtctaagattgatgtaatcaatgctattttctacttatggtaaataattcacttaataacttttgttctatcattcattgcaaatacaatattttagtttcatcatgttgtacatggaatagcctggatagttagtattgctttgaactctactacacatactgctattcttgcattaatttattcagcaaatgtctattaaatattttctatagtaaagatgctacaccgtacagtattaggaatatcaaattatgccagcacactctaagtcgatctatttataaggtgtcatccatgcttaattcaggtatcatgtaagtgattcaaactaaatgacaggaatgaagagaacccaattatggttaaattttttaaataataaaaccaattggcacatttttatgtatttataagaatatttcataccatgggagcagaatggaggaaaagatgaaagggaaacaaattttagtttgtttccttaaagaaatatatgttagattttctcattcctgcctgccccattcctctgtctgctgaacagaatcaatgatagcagcagccgagatcccagtggaccctctggccaaatgcagctgcatgagtaagcccaggtaaagacaacaaaggaactcccctgcccaaatacagatgtgttagttttaaattgtttaatttaactttgttgtttaaatttgttgttgttaaatcactgttgtctgcagatgagaagttgcagggtagtttgctacacaacaatcgacagcagatagaacaaaacagaattccctaaagactgcagggccagaagaaagaattgagttggtcaggacaaaagagtggataacagtactgactaggataagcgtagacgtaaggccaagagggggtttccatgaaggagtgtgaggagggcattctgggacagcagaaacagagtttgttcaggagcttttcctgggtataagagacagactgcaaccagaggaaatacagcagataaggctatgcattaggaatgaatttctccattccatcattttctcagtaaactgagtaaagatctcaattgctttcaattgtttattataaatgaaaatttgctttgagattcattttaaatatgcattctcagtaattctttttactttaggggcagaggatgtataacrgatgattttcctcttagccatatggaagagttggacaaataaactaagtaagattctaagaagaaggaagattaaatacagctagattgtgatcctaagacaaaaatgaaggagctaaggcatgcagactagctggtcagttatttgctgacaccttagtattctagtgtagatggaagactgaataggaggccaagaaaacaacagaacaagaaaggcaggagccatgattaagaatgagttgctctgtgcaatcatgttgggcgggacaaaaagagaaagtcaatttttggacttaagaactagaaattaagaggcaaatatgatc

SEQ ID NO: 725898 - DNA, 2216 bp, Homo sapiens
tgcattccctatgaactgtgcatctgtctaccctggggccacctaatgtcacaaccaaccaaccttagccaacagcaccactgatggctaaaccacttagtggtttaacttccaatctcttcctcactgcaccttcctacagaggcagatcatgcatataccatgtgcccagtttttctgtctttccccaccctctagccatttactgtcacttcaggcggccttttttcacacttcactctctacttcattccatgtagaaaatgatctcaggaaaatctccatccattccaaccataaaccaaaaatttattttattctttagctcctatttgagtctcaccttgtattataaaacacattaaatatgtatcatttcacttgattctccaaacaaccttgtgagatagatatcacttatcacaatttacagagaagacaagtgccttttgccagagagtttagctagtaagtgaaagaacaggtctacaaaccaaggcctcttgattcccaaacactttgtccttctagggtaaaacaatagtactaatggttcacctgctataaataagaaaggagaatttttacattttgacatgaaattaacataagaaaccaaaacttccaacagcaatatcatgtaaaactattcagaagtctccttcagcatctagacaatgttctgacttagatagctttttctcaagaagggtgtctaagattgatgtaatcaatgctattttctacttatggtaaataattcacttaataacttttgttctatcattcattgcaaatacaatattttagtttcatcatgttgtacatggaatagcctggatagttagtattgctttgaactctactacacatactgctattcttgcattaatttattcagcaaatgtctattaaatattttctatagtaaagatgctacaccgtacagtattaggaatatcaaattatgccagcacactctaagtcgatctatttataaggtgtcatccatgcttaattcaggtatcatgtaagtgattcaaactaaatgacaggaatgaagagaacccaattatggttaaattttttaaataataaaaccaattggcacatttttatgtatttataagaatatttcataccatgggagcagaatggaggaaaagatgaaagggaaacaaattttagtttgtttccttaaagaaatatatgttagattttctcattcctgcctgccccattcctctgtctgctgaacagaatcaatgatagcagcagccgagatcccagtggaccctctggccaaatgcagctgcatgagtaagcccaggtaaagacaacaaaggaactcccctgcccaaatacagatgtgttagttttaaattgtttaatttaactttgttgtttaaatttgttgttgttaaatcactgttgtctgcagatgagaagttgcagggtagtttgctacacaacaatcgacagcagatagaacaaaacagaattccctaaagactgcagggccagaagaaagaattgagttggtcaggacaaaagagtggataacagtactgactaggataagcgtagacgtaaggccaagagggggtttccatgaaggagtgtgaggagggcattctgggacagcagaaacagagtttgttcaggagcttttcctgggtataagagacagactgcaaccagaggaaatacagcagataaggctatgcattaggaatgaatttctccattccatcattttctcagtaaactgagtaaagatctcaattgctttcaattgtttattataaatgaaaatttgctttgagattcattttaaatatgcattctcagtaattctttttactttaggggcagaggatgtataacggatgattttcctcttagccatatggaagagttggacaaataaactaagtaagattctaagaagaaggaagattaaatacagctagattgtgatcctaagacaaaaatgaaggagctaaggcatgcagactagctggtcagttatttgctgacaccttartattctagtgtagatggaagactgaataggaggccaagaaaacaacagaacaagaaaggcaggagccatgattaagaatgagttgctctgtgcaatcatgttgggcgggacaaaaagagaaagtcaatttttggacttaagaactagaaattaagaggcaaatatgatc

SEQ ID NO: 725899 - DNA, 653 bp, Homo sapiens
gggaattacaacaagctattcctaatcgacacaacttgtcagaaatttggaggctgccgtcagctcagtagcttctcaaacaaagcagtatcagagtatgttttgagtccctgattctttcaactgggtagatgcttctgtacgactttacattgttttatttaaaagctgtgctttttttttctccgaaactagtgtatttataggtgctacatgctttaaaagtctctgactttgaatccctgattctttcggctgggtagatgcttctgtacgactttacattgttttatttaaaagttctgctttcttttctctgaaactaatgtatttataggtgctacatgttttaaaagtctacaactgtgaaaaatgatgtaacactgaaacaagcaaaaccttgaaggaaagttgaaattgagattgtccaaaaactcagccagtacatagtgtttccgcctactctgatttttcagcagttttgtgatttcttttcccttgtttgtttttgagtacactcatcagtatgtcccatggcatagtgtctgttttccaaaaatccagaaacatgagtcagctgttcaactattatatacaaatttggtaaagtacygtattcatggaatctgagtgtgttttccaggaattacgtc

SEQ ID NO: 725900 - DNA, 616 bp, Homo sapiens
tgtattagtctgttctcgcattgctataaagaattacctgagactgggtaaagaaaagaagtttaattggctcacggttccacaggccgtacaggaagcatggctggggaggcctcaggaagcttaaaatcagggcacaaggtgaagaggaaggaggcaygtccacatggttggagcaggaggaagagagcgaagagggagtgctacacacttttaaacaaccagatctcgctaagaactcactatcacgacaacagcaaggagcaagtctgcccccatgatccaatcacctctcaccatgcacctcctccaatactaggggattaaaattcaacatgagatttgagtggggacacaaatccaaaccatatcagtgtccatgtctattcctaattagcttttaactttgtactcagcgtattaatttctgagagctactgtaacagtgtcaccaactgggtaactgtttgttgtaaaacaaacacatcctctcacagttttacaactgtttgttgtaaaaccaatgcattctctcacagttcttgaggctaggtgtctgaaataaaggtgtgggctggaccatgctccctctgaagccttgaaggaagaatccttg

SEQ ID NO: 725901 - DNA, 616 bp, Homo sapiens
tgtattagtctgttctcgcattgctataaagaattacctgagactgggtaaagaaaagaagtttaattggctcacggttccacaggccgtacaggaagcatggctggggaggcctcaggaagcttaaaatcagggcacaaggtgaagaggaaggaggcacgtccacatggttggagcaggaggaagagagcgaagagggagtgctacacacttttaaacaaccagatctcgctaagaactcactatcacgacaacagcaaggagcaagtctgcccccatgatccaatcacctctcaccatgcmcctcctccaatactaggggattaaaattcaacatgagatttgagtggggacacaaatccaaaccatatcagtgtccatgtctattcctaattagcttttaactttgtactcagcgtattaatttctgagagctactgtaacagtgtcaccaactgggtaactgtttgttgtaaaacaaacacatcctctcacagttttacaactgtttgttgtaaaaccaatgcattctctcacagttcttgaggctaggtgtctgaaataaaggtgtgggctggaccatgctccctctgaagccttgaaggaagaatccttg

SEQ ID NO: 725902 - DNA, 616 bp, Homo sapiens
tgtattagtctgttctcgcattgctataaagaattacctgagactgggtaaagaaaagaagtttaattggctcacggttccacaggccgtacaggaagcatggctggggaggcctcaggaagcttaaaatcagggcacaaggtgaagaggaaggaggcacgtccacatggttggagcaggaggaagagagcgaagagggagtgctacacacttttaaacaaccagatctcgctaagaactcactatcacgacaacagcaaggagcaagtctgcccccatgatccaatcacctctcaccatgcacctcctccaatactaggggattaaaattcaacatgagatttgagtggggacacaaatccaaaccatatcagtgtccatgtctattcctaattagcttttaactttgtactcagcgtattaatttctgagagctactgtaacagtgycaccaactgggtaactgtttgttgtaaaacaaacacatcctctcacagttttacaactgtttgttgtaaaaccaatgcattctctcacagttcttgaggctaggtgtctgaaataaaggtgtgggctggaccatgctccctctgaagccttgaaggaagaatccttg

SEQ ID NO: 725903 - DNA, 654 bp, Homo sapiens
atttgcctaggcttgtgcctgtcacctttctctttcatagctatctgttttatagattggtttaatatatcttttaccagtactacaagaaagtggcttacatgattatggaggctaagaggtcccatgatctgtcatctataagctggagacccaggaaggcctgtggtataattcagtctgaatccaaaggcttgagaaccagggaagccagtgatgtaaatccatctgaggacagaagatgagatgtcacagctcaaacaatgaggcaggaaaaaaaaggggggkgaattcttccttcctctgccttttattttatttacgccctcaacaaactggatgatgtccacccaccttggggatggctatctcctttactgagtcccccagttcaaatgcaaatcttgtctgtaaacacactcaagacacttcagaataatgtttaaacagatatttggcaccctgtggcctattcaagttgacatataaaattaaccatcacaagtttacccttgtcaacttggcacccataaacatctctttaaaccatacttaactgccacataaagacaacaacaaggtcataattccatctaacacgattaacaatccagcattccaccagaaacactttaacccgtttcccagaagagg

SEQ ID NO: 725904 - DNA, 654 bp, Homo sapiens
atttgcctaggcttgtgcctgtcacctttctctttcatagctatctgttttatagattggtttaatatatcttttaccagtactacaagaaagtggcttacatgattatggaggctaagaggtcccatgatctgtcatctataagctggagacccaggaaggcctgtggtataattcagtctgaatccaaaggcttgagaaccagggaagccagtgatgtaaatccatctgaggacagaagatgagatgtcacagctcaaacaatgaggcaggaaaaaaaaggggggggaattcttccttcctctgccttttattttatttacgccctcaacaaactggatgatgtccacccaccttggggatggctatctcctttactgagtcccccagttcaaatgcaaatctygtctgtaaacacactcaagacacttcagaataatgtttaaacagatatttggcaccctgtggcctattcaagttgacatataaaattaaccatcacaagtttacccttgtcaacttggcacccataaacatctctttaaaccatacttaactgccacataaagacaacaacaaggtcataattccatctaacacgattaacaatccagcattccaccagaaacactttaacccgtttcccagaagagg

SEQ ID NO: 725905 - DNA, 654 bp, Homo sapiens
atttgcctaggcttgtgcctgtcacctttctctttcatagctatctgttttatagattggtttaatatatcttttaccagtactacaagaaagtggcttacatgattatggaggctaagaggtcccatgatctgtcatctataagctggagacccaggaaggcctgtggtataattcagtctgaatccaaaggcttgagaaccagggaagccagtgatgtaaatccatctgaggacagaagatgagatgtcacagctcaaacaatgaggcaggaaaaaaaaggggggggaattcttccttcctctgccttttattttatttacgccctcaacaaactggatgatgtccacccaccttggggatggctatctcctttactgagtcccccagttcaaatgcaaatcttgtctgtaaacacactcaagacacttcagaataatgtttaaacagatatytggcaccctgtggcctattcaagttgacatataaaattaaccatcacaagtttacccttgtcaacttggcacccataaacatctctttaaaccatacttaactgccacataaagacaacaacaaggtcataattccatctaacacgattaacaatccagcattccaccagaaacactttaacccgtttcccagaagagg

SEQ ID NO: 725906 - DNA, 654 bp, Homo sapiens
atttgcctaggcttgtgcctgtcacctttctctttcatagctatctgttttatagattggtttaatatatcttttaccagtactacaagaaagtggcttacatgattatggaggctaagaggtcccatgatctgtcatctataagctggagacccaggaaggcctgtggtataattcagtctgaatccaaaggcttgagaaccagggaagccagtgatgtaaatccatctgaggacagaagatgagatgtcacagctcaaacaatgaggcaggaaaaaaaaggggggggaattcttccttcctctgccttttattttatttacgccctcaacaaactggatgatgtccacccaccttggggatggctatctcctttactgagtcccccagttcaaatgcaaatcttgtctgtaaacacactcaagacacttcagaataatgtttaaacagatatttggcaccctgtggcctattcaagttgacatataaaattaaccatcacaagtytacccttgtcaacttggcacccataaacatctctttaaaccatacttaactgccacataaagacaacaacaaggtcataattccatctaacacgattaacaatccagcattccaccagaaacactttaacccgtttcccagaagagg

SEQ ID NO: 725907 - DNA, 654 bp, Homo sapiens
atttgcctaggcttgtgcctgtcacctttctctttcatagctatctgttttatagattggtttaatatatcttttaccagtactacaagaaagtggcttacatgattatggaggctaagaggtcccatgatctgtcatctataagctggagacccaggaaggcctgtggtataattcagtctgaatccaaaggcttgagaaccagggaagccagtgatgtaaatccatctgaggacagaagatgagatgtcacagctcaaacaatgaggcaggaaaaaaaaggggggggaattcttccttcctctgccttttattttatttacgccctcaacaaactggatgatgtccacccaccttggggatggctatctcctttactgagtcccccagttcaaatgcaaatcttgtctgtaaacacactcaagacacttcagaataatgtttaaacagatatttggcaccctgtggcctattcaagttgacatataaaattaaccatcacaagtttacccttgtcaacttggcacccataaacatctcyttaaaccatacttaactgccacataaagacaacaacaaggtcataattccatctaacacgattaacaatccagcattccaccagaaacactttaacccgtttcccagaagagg

SEQ ID NO: 725908 - DNA, 1303 bp, Homo sapiens
tttatcccagttttgctgtgctgttattggatgtatctttcagcttttgctgcaataatgctgyataagaagcaataccaaaatctcattgacttataacaactgaaatttgtttgtcacacatggatctgtgaggtagccatggtgactatgctccaggctatatatctggttcctgttcctcagtctaagacttataacatcgctcaaaggctgatgcagctgtagccacctaaagaagtttttatcatggcagagggaaggaacacaagagaaaaaaagcaacgacataaacaaattgaaaaccttatttgaacaggaagtaggtcacttctgctcacatttcattgaccaaaataaatcacatgaccaggtccaatagctatgtaacaaggaagtacatgcctcctgtgctggtatggtcgagggcagtatttgctgaacaataatacaatcaatcacacttgccaaactaccagggttccatccatcaaattcaagacatatactgaccacttcaattaaccgtgtattagtgatataggtctcaaatgttgaagagcatcaaaatcacctggggaaattgttaaaaagtataaatgacctggccttcccacagtgattctaatgtaatgcatttgaggatgggacctaggatctgtattgttaccaatctcatcaataatcccatcatacaccaaagtttgagaatcactggtttgcagaaagctatgcctagagattaggacaagtcactattcagagcaggtgcctactttttgacttgctgtcccagggaagaagggaagatgacacaacaacattcccacttgtagaaagaagagaataaactgggctgggtgcagtggttcatgcctgtaatccagcactttgggaggccaaggtgggccaatcacttgaggtcaggagtttgagaccatcctggtcaacatggtgaaaccctgtctttaccaaaaatacaaaaattagccagatgtggtggtacacatatgtaatcctagcaactcgggagggtgaagcaggaaaatctcttgaacccaagaggcgggggctgcagtgagccgagatcacaccactgcacttcagcctgggtgacagagtgagactcaaaaaaggaagagaataaactgaagtttctgatggattggatgttggctcccaattatttcccctctgtgttttcatatctttgccatttgactttgcagttcctcccactgtttccctaccttgtggttagacttaaccatgtgactcacttggccagtgagatgtgggcgaa

SEQ ID NO: 725909 - DNA, 1336 bp, Homo sapiens
tttcaaatattgtggaaaaaaaaagctaatacataatagaagtagaaaaatatttacatagtgtggattttttttcaccaaatggtagttgtaaaattttgtttttgacctatgttatctatattttaagagtggtaagaaaagtgtaaatgataaaaatctgaaaaagacagtggaggatgaagatcaagatagtgaggaagaaaaagataacgacagttacataaaagagagaagtgatattccttctggaacaagtaagcacttacagaaaaaagcaaagaaacaagccaaaaagcaagccaaggtgggtaattaggaggaaaatcatatgcttgtaattttatattttgagctattgagtttgtagtctgaatgacattggttagacatgtctgttattttagatacagcactttcatttgacaattacagaatttagctcatttagtattctctgcagggaaattgctttgagtatatgtgaagaaaacgtcgtgcttctttttttttaaatcctgcattgcttgtaacaagtatttgtagtaagtttaattaacttaattttcgagttaatattattgacatccacaaatttaaaaatatataaaggtaaacaataagtccccctcccaccactgttttttttttccaacccgagatggagtcttgctgtgtcgcccaggccagagtgcagtggcacgatctctgctcactgcaacctccatctcctaggttcaagcaattctcgtgcctcagcctcctgagcagtcaggactacaggtgcatgccaccaagcctagctaatttttatatttttagtagagacagggtttcaccattgttggccaggctggtctcaaactcctgacctcaagtgatcctccctcctcagcctgccaaagtgctgggattacaggcatgagccaccgcgcccggccgaccaccactttccttttatgacaaagataaacatttttgttttttcttacgtatccttctggagtttcttttggaaaatatgagcaaatacaaatatgcagtcttggtttttttccccctttctcaccattcacaccattctggattgtgttgtttgtttatacttagattcttggagtcctttccattttagtatataaaacttcttcattctttttttttttttttttgagatggtgtctcactctgtcgcccaggctggagtgcaratggcgagatcttggcacactgcaacctctgcctcccaggttcaagtgattctcctgccacagcctcccaagtagctgggattacaggcatgtgccaccgtacctggctaacttttgtattttta

SEQ ID NO: 725910 - DNA, 2207 bp, Homo sapiens
gcaaatcaagttgattcttcacctttcccatggatgacttaaacccactgatgtgctaagccagctctcattcttatgtctgctttccaaacccagactttgtattgcctcctctccaatcctccacgtccttaaagctctgtcttctttcattgcaaaatcttttgttaggtcaggcacggtggctcacacctgtaatcccagcactttgggaggcctaggcgggaggatcacctgacgtcaggagatcaagaccatcctggccaacatggtgaaaccccatctctactaaaatacaaaaaaattagccaggtgtggtggcgtgcacctgtagtcccagctactcaagaggctgaggcaagggaatcgcttgaacccaggaggcagaggttgcagtgagctgagatcacgccattgcactccagcctggcgacagagcaagactctgtctcaaaaaattaaaataaaataaaataaaacataaaaaaatctttcattatagtttttggaaggactgaaattagatgcactcttcaatccttacagcagcaaatttttcttttattactttgttttatgtgtcttccttgcaattagtattaacctaggattttttaaaaaacccactctctgctttgtagtttaatgattgatgtattagattttatctcatatatctgactttatatttatttattttatacatttttatgttattttcttttttccctttctttggtaggtttgatcaagttcagtttctttcttttcccttgataattagtatattttttcattctgtgttcccttcctgtctctcataattacatagatctttctttatgatttttgaaaacaagataccaattatttccctaatccagatgtcttttaaacttcatgctttctccctccatcagaatacatttcttcattcttctgcctttcctcccagcaaacgagacctttggaaattttttttttttctttttttttgagatggagtctcactctgtttcccaggctagagtgcgcaccactgcaacctctgcctcctgggttcaagcgattctcctgtctcagcctcccgagttgctgagattacaggcctgtgccacaacacccagctaatttttgttacttttagtagagacgggttttgccatgttggccaggctagtctcaaactcctcacccgccttggcctcccaaagtgctgggattacaggcgtgagccactgcgcccggccccatytatctatatcttattttcttttcctcttcctctgtgccttggaatttcattatgatttaaactggcaggtggtttggatataggatttttggattgtgaccattttctctcaaaattctttttcttcataatttccatcgtgtatatttttgctttgtgctttaagatatttattctattaaatattttatgccactattttggacctcaacgtggccttcctttcttccaactcatgcaatattagttgggaaattgtaatttttagctccagactgacttcagacttgaatttggacttccttcactgttctcccagaggccttcccccatctctctttctcttggcatgtgtaaatctgaacaatccacctggttgctcgctctgtgctcactgcggctggagtgcagtggcatgatctcagctcattgcaacctctgcctcctgggctcaagcaattcttgtgccaggctggagtgcagtggcacaatctcagctcactgcaacctctgcctcccaggttcaagcaattctcctgcctcagcctcccctgtagctgagattacaggtgtgccaccatgcccagctaatttttgtatttttagtagagatggggtttcaccatgttggtcagagtggtctcaatctcctgacctcaggtgatgatctgcctgcctcggcctcctgaagtgctgggattacttgtaggcatgagccaccacgcccggccatataatgcctacttaagcatcaattgctggcctgttcagtgttgctcatatggttctggtctgcactgggcgagggcatttggcaatgaggaaggagtgtgcttggtttagaatagcagcttctgtggttctttttagaggtatcatttctgcccaaatctggggtgccttttcattgatctatatttgggagttaaataaaaggagagttttattctaa

SEQ ID NO: 725911 - DNA, 633 bp, Homo sapiens
ggtttcttgttgctagaaaatgacagccagttcttggcatagatttcaagacctccctggggatgccttggaacctctgtagaacttccaatctcatccctcaacttcagctacattggcctcctcacttctcccggggcaggaggtgggtcctccagtcactgagcccctgttcacaccaagctcttggcctaacaggcccctttcttccttttttttttttttttttttgagacaaagtcttgccctgtcacccaggctggagtgcagtgatrcaatcatagctcactgcagcctcaaccccctgagctcaagcaactctcccacctcagcctcttgaatagctgggacgacaggtgcatgccagcatgcccagttaattaaaaaaatttttttaaagagatggcatcttgctatgttgcccaggctggtctcaaactcctgacctacagcaatccttccacgtcagccgcccaaagtgctggtattacagagtcaatatcagcaataaaggactgctaggaggaaaattgctcgaactcgggaggtggaggttgcagtgagcctagatcacaccattgcactccagcccgggtgacagtgcgagactccatttaaaaaaaaaaaacaaac

SEQ ID NO: 725912 - DNA, 633 bp, Homo sapiens
ggtttcttgttgctagaaaatgacagccagttcttggcatagatttcaagacctccctggggatgccttggaacctctgtagaacttccaatctcatccctcaacttcagctacattggcctcctcacttctcccggggcaggaggtgggtcctccagtcactgagcccctgttcacaccaagctcttggcctaacaggcccctttcttccttttttttttttttttttttgagacaaagtcttgccctgtcacccaggctggagtgcagtgatgcaatcatagctcactgcagcctcaaccccctgagctcaagcaactctcccacctcagcctcttgaatagctgggacgacaggtgcatgccagcatgccsagttaattaaaaaaatttttttaaagagatggcatcttgctatgttgcccaggctggtctcaaactcctgacctacagcaatccttccacgtcagccgcccaaagtgctggtattacagagtcaatatcagcaataaaggactgctaggaggaaaattgctcgaactcgggaggtggaggttgcagtgagcctagatcacaccattgcactccagcccgggtgacagtgcgagactccatttaaaaaaaaaaaacaaac

SEQ ID NO: 725913 - DNA, 594 bp, Homo sapiens
tataaactcagcattggctgaatccaatttaaagaatcgcttctggcttatgaccaatgatgtacgagaggtttgttatatttttactgattttttttttcttctccgtgtgaaaaaggtgggaaggactttcttgaaagctttgaaaaattaccaagaattctgatatctttaaagaactcctgctatcatttttatctaattctttctaggccttttgcatgtgaatagacattttaatataattgcatatacagtaacrtggaatgtataacatgattttttccgtaaatattataagcatttttctacaacatacctagctttttgtgtatgtaatatgaaagtcattgaaatgagatatagacattttatggcttttgaaatctatcaccaaatttagaaaaaataaaataaaaaaatgaaatctattaccaaattgtttgacagaaatttttaaaagtatattattaagctacaatcaactgtaaagtttgctttgttccagataaagcattttatctcatccagtagagaaaccacttatttatttttttggtatgaaatattgtattgggtactttggtgtttaga

SEQ ID NO: 725914 - DNA, 603 bp, Homo sapiens
agagagaagagaaggaacatctgaacgctgagaggagctcagctgggggtggttggaggggagtttgactgctggatggccaaactccaggggaagatcatcttcccactccatcctcctcccagctccccatccatcctgctkagagccacctccatcactcagtaaaaccccacattcatccttcaagcccgtgggtcacctgattcttctgggatgctgagcaagagctagggatacagaaagctgccatactggtcctctgcccttgcaaaaaggggccgcaggcacccacccctagatacggggctggagcccaaggcacttgccccagctcctacacctgtcagtctgtgtgtttcccctcccatcaggggtttgagcaatggtgacaactgaagagcagtggtgtcgactgaacaggcgagccatacctctgttgcatgtcctgcgagagggatcaggaaactttcccgtttcaatctggggcaactgcctgggtcatttctgtcactagggatgggaaaatagaggagaggcaggagaaaatgtggggcagtgggaagtgatggtcttggtgaggaacagaatgaaaagtcatac

SEQ ID NO: 725915 - DNA, 1094 bp, Homo sapiens
ttgaagaattgggtgtggaggggaagcaaagtaggaagtgagtggcaagagactgcagccttgattcagcatgtggcctgaaaaccctctcactcaccctgttacatgctttgtcacaggggaacatcttgtttttgccttccaaaaaggtagggctcagaagtctgtggattcacgggccctttggttgtatgctgtatggtcactacttcctgtttttttcctcagcctcctttgcgccctggatcctcctccccactggccaaatagaaaatggaagacacagaatagaaatgcttcttgaccgggtgcagtggctcacgcctgtaatctcagaactttgggaggtcgagaggggcagatcacctgaggttgggagttcgagaccggcctgactaacagggagaaaccccttctctactaaaatacaaaattagccgggcgcggtggcgcatgcctgtaatcccagctactcgggaggctgaggcaggagaatcgcttgaagccgggaggcggaggttgcagtgagccgagatcacaccattacactccagcttgggcaacaagagagaaactcagtcaaaaaaaaaaaaagaaagaagaaagagaaagaaagaaaaaaataaagaaggaaagaaggaaagaaggaaagagagagagaaagaaagaaagaaagaaagaaagaaagaaagaaagaaagaaagaaagaaagaaatgcttcttcatgcatttgtcccgtcattctgttgagctgttctgagatgcactaaggacatccatattgtttttctgtgatttatcttatatattcctcctttactcaaaacttcatagcaggactttgcagtattatgacacattttgtagaggaaaatctgcactctgcttaaagaatgagaagggagaaggtatgctttttctttttgttatcctgtttgattttggttcagatttgacagtagttggcaaatattctttatagtttttggtttcaagttttaattattttcttgtgtttttttgttcgtttgtttccttcattataaaattttttctccatccagttttcayatgtatatgtatgtatgtgtgta

SEQ ID NO: 725916 - DNA, 668 bp, Homo sapiens
gatcacagggtcaggagatcgagaccatcctggctaacacgatgaaaccccatctctactaaaaatacaaaaaattagccaggtgtggtggtgggcgcctgtagtcccagctactcaggtgggtgaggcaggagaatggtgtgaacccgggaggcagagcttgcagtgagcygagatcgtgccactgcactccagcctgggtgactgagagagactctgtctcaaaaaaaagtaaataaataaaagtaaaaaaaaaaaaaaaactcccaaactaatacttttattttcttttttagccattgtaaactaagattaggtggtagttgaaagatttgaaaaatgaaaatacgtgctgtaacatacattatatacaaattatatggagaatcagaaaacaaaaatattattaatttcctatccatttcccacaaatctattctgctatttgccattgtgttctttcctacgctacaaccacataagaaggcaaagcaaagagattgaattgagatttaagaaactaaaatcaagattctatgtcttaaaaaagtttagaaatatattgaataaaatgttcgtagcagttaattttaggaaatttgatcatagaagatttgtaatttactgtttatgtctatctcaattttaagttttcttcaagtaacact

SEQ ID NO: 725917 - DNA, 1530 bp, Homo sapiens
tgtaaatattcattacaccaaataaaaccaaatgaaatgtatgctagacatttatgaataaatcaatgaaagaaggagagactattggaaaaaaaatcatccattgttgtaattttgaatacaaatgttggaagccaatcaatgccaacctttagaacacttatattccatttttgtcttattatcatttcattgaatcatatttggaactttaaatgttcagtttggatgattattctggttttttttttttttytttttgatgtgctgtttgaaaagcgtgtgtgtgtgtgtgtgtgtgtgtgcaagcgcacctctgttagttgtgtgagaaatgactttcaggttgaactgtaggtatataaagcatgcactggtgaatcgattcttgtttctgggcttatgagtagctagtgtgacatttgaaaaatgaccttaatgagagtttttcttttctatgccctatcgttgtatgtgacaccacagcccaaggtgacggtgtcttcacttcaatgccatcttttgtcccagaggctatttttgctttagttaccccaactgacattggaatagacctggtgatgttttattcatgaaagcagatcttgtgaatatagctcccaatacaccagagagacaaaaatatcactacgattgcacctaaactaatctgtagttatgtaacaaattgacacataaattaaattttcactgctaatgcctgcttaactctgtaattatactttagtttggaattctactgaagtaattaggttagctgagatttgctcatcaaagatcactgaaagctagaaagtatatggacctctgttcttaagccacatgcttcctgctcaggggagattttaaagctatgtccataactctatgcctattcttttacattttactgaatttgatcagctgctggatactgttttttttttttttttcttgagaatgtatttatcccgttgtggacatgttcctgtctccaattcccccgcacttttcctttgctctttattgaggagtcatccttgtgctgaagaactttctgttttttatatgattgatctttaggtggtaggggagccctcactgaaatgtggtttaaaaaaaaatcacactctttcatcttcggtttcatcttctggaagaaagaagaattgagctattttaccaactgttgtgaactattcaaatttcctctggggagaaaaaccagttgctttcaaagctctgaggagtatcaaaaaaaatgctcctaggctaaatacagtaaataaaaggcaatgtggactttcaaaagactgcttcgggggcctacaagaaagttttagctggtgtgagaatcactgaaaccgaaacctgtgggaaaaaacccaaaaaaacaaaaccagatgaaatcagaaagagtatctataaatttagcctaagtgcagggatacctacattcattgtcctgatgaaataaaacactgaaagaaaatatgggtaatctcttccagagtttgtgaccttgcaagt

SEQ ID NO: 725918 - DNA, 1478 bp, Homo sapiens
gctagagtccagtggcttgatctcagctcactgaaacctctgccttccaggttcaggcgactgtcctgcctcagcctcccgagtagctgggattacaggtgcacaccaccacagctggttaatttttgtatttttagtagaggcgtggtttcaccatgttggccaggctggtctcgaacccctgacctaaagtgatctgcccacctcagcctcccaaagtgttgggattacaggtgtgagtcaccatgcccaaccgctcttttcaccacctctgtgtgatctattttcagttgctctgcttaaaaatgaactccttactgcatagaaattgcctagtatcttagccaattcaagctgctttaacaaaataccacagaccaagtggcttgaacaatggaaatttatttctcattcttctgaagtcccagatcagggtgccagtgtcactgggttccggtgaggacccacttctcagtttatagaaagctgtctttatgagatgacttcacatagcagggagaaagtgtgagctccagtctcattctcttcttataaagacactaataccgtcatgaagatttcactttcatgacctcctctacaactctcaaagtttcactctcaaagacctcacttccaaatcccatcacattgggggttaacatttcaacatatgaatttagtgggtacacaaatatccggtctgtaacatctagctactaacaaattcaagcaataaaatttgcataattctgaagggtctactggtgcttaagaacttcacccatattatatcacccatatcaatatttcatttttccaagatgaaaaaagaatggtgaacatgaattaaaaaatcaataatagaaatagtgtcatggacatgtttttacctttctttcgcttttcattgcattaaaaaaattaaaacctaagtataggatgaattctgatatattttgaaagacaggtctgtgtatttcatgtgatatatttgatgtctctactaaagtactggaaatccagggagataactgaaaaaagcaaaactgtatactgtggaaattttcctataaattaatgagtaatttatatatggagaattgatgatgtgaaataccctaattctaatgatttcaggaaaaattttaaaaaagaaagaatttgctggtaatagcagctactgagtattaaatgttctctatacaatacattctttttatcactctactttrtacttaaaacatttttagaaagcaggggtcattactctccttttataattgaataaattaaaactcaagagagactgccttttttaaggccacacagactttgctggttgaatctacagaaatggaattcagaagcagacctaaagcccacattcttttctgtattgcctaccatctccttaaagagaactagggaaacagaatttcttacattggcatatatggtcagagttaattaagata

SEQ ID NO: 725919 - DNA, 602 bp, Homo sapiens
ctttaccctgtggttgagaaagttctgtaatcaattcataaatttgtgttacagatatttcttataggccatcatcacctccagagattcagctcatgctgacttaacaataccagatatttatcgaccaataagaatttcataaagaaaatggaaagtgctcttctgttttaatggagaatgaaggctcatccatacaactgtccctagagcaaacaggaacagacagcgtgttacgtgcgggccgcataacatttccttgtgtggtctttttttttccactgtattgttacatctgataattgtctatattgggagccagaggtagatagcacttgtatatggaattaaaaggaacagaaaaagtgaaaaggcagcaaaatattgtgtttttttgtgtgtatcctctgaatttgcctctgaagtcattggccttgactgcctaggtaaggctaaattactccttggaaggttctataaaaaatttcttattaagtacactacatttttttaggtcatggaaataaaatgattttgacattygcaataatgctctgatttgagtttagaagaaaacatagcctgcaattgatttcactaac

SEQ ID NO: 725920 - DNA, 593 bp, Homo sapiens
cctgatgagtaatgatactgaccaccattttatatgtgtattggccatttagatattctctttttaaaagtacctgctcatgtatttcgtccatttttaagtgggtttgttatattctagcactgatttgtgggagctttttacatacttggatacaggtattttgtaaaagtttggttttgaaaatattttctsccaacatgtggtttgttttttcactttcaattaatgtttatatgtaaatagattatcttaatatcagataaaatttgttaatatttgtattttatgtttaatgcttttttgtcctaattgagaaacttttgattacctcacatcttattcttaatttctttgtcttgtcttttcagaacctgttccatttttatgaagcatcctaaatcaaaagacagtggctaacttgaatattaaattctcattatttcagttggaagctataaaatcacaaataaacaggtttaatgttatcacgctgcctattttgctctgtcagatctttgctcagttgcggggctaatgatcctatgatgcattttctctagaccaggcgacagcttttccttggaaggaaa

SEQ ID NO: 725921 - DNA, 593 bp, Homo sapiens
cctgatgagtaatgatactgaccaccattttatatgtgtattggccatttagatattctctttttaaaagtacctgctcatgtatttcgtccatttttaagtgggtttgttatattctagcactgatttgtgggagctttttacatacttggatacaggtattttgtaaaagtttggttttgaaaatattttctgccaacatgtggtttgttttttcactttcaattaatgtttatatgtaaatagattatcttaatatcagataaaatttgttaatatttgtattttatgtttaatgcttttttgtcctaattgagaaacttttgattacctcacatcttattcttaatttctttgtcttgtcttttcagaacctgttccatttttatgragcatcctaaatcaaaagacagtggctaacttgaatattaaattctcattatttcagttggaagctataaaatcacaaataaacaggtttaatgttatcacgctgcctattttgctctgtcagatctttgctcagttgcggggctaatgatcctatgatgcattttctctagaccaggcgacagcttttccttggaaggaaa

SEQ ID NO: 725922 - DNA, 1042 bp, Homo sapiens
ggtcagttcgagaccagcctggccaacatggtgaaaacctgtctctactaaaaatatactcacaagaaaaattagctgggtgtggtggcgggtgcctgtaatctcagctacttgggaggctgaggggggagaattgcttgaacccaggtggcggaggttgcagtgagccaagatcacgccactgcactccagcctgggcaacagagtgagactccatctcaaaaaaaaaaaaaaaaagaaaatgtctttgagtattactctaggcatctctctgaacatgcccatcaggcagttaaacataggaaagcacagtttacaaaagagattgcagcgagagatcctaataagtaaagctttcagacttataaaggcaaacacaaagtctttcaaataggaagccatttacaaactcgtaagcacaggtaggagttttcagaaaatctaaaaagaccaagcctaggtctttaacaaggttaaagtcgaagatcagagcccacctttatctatctacatggatagctttaaagggactgttccggcctgtgtcccaatgtgtcgagtattcattcctgctatttgaccaaatctcaataccttcctttgagtcttacaagctttagatctctcagatttaaagtcagatattccaaaggtaggttatactttcagctttcaacatagtttcattataagcaagcaacatataagtaaaaggatagaatatccatccatccttcactgataacttgcatgatgtagcatcttggtaagcctttatatgcattggaggagaaaagtaaggcatttggaagtaaaatgtgaagccctaaggggagcaaagcatataggagaagatattgaagaatcagtgagtttgtccttcacaacccaactatgagcttcaggagagcaggaatagtaatggctttgttttccactgcataaccagcacctcgcatagaaagttgaaacattagaggtattctttatttatttatttatttattttattttatttatttwtttttttttttgagacaga

SEQ ID NO: 725923 - DNA, 653 bp, Homo sapiens
tcatgaggaaactccctttttttctaagacgatatgacaatgctttcccacgacaatgcagaccctgcatggccacaggtgggaatcgtgatagtaagcctggggtcacatatctcatcatgtactttaccttcatcatatatctatgggaatctcaaaagctgtattctctttttttgttgtttgtttgtttgtttgtgacagagtctccctatgtcacccaggctggagtagaggggcatgatctcagctcactaaaacctccgcctcccaggttcgtgcgattttcctgcctcaacctcccaagtagctgggactacaggcacgcaccaccatgccaagctmattttggtatttttagtagagacggggttttgccatgttgaccaggctggtctcgaactcctgacctcaggtgatccacctgcctcagcctcccaaagtgctgggattacaggcgtgagccaccacgcctggccaaaagctgtatactctttcctgatcttccatcaagcttccaaagacttccaaagatatccgggccacacactgtggaacagacaccggagaaactgggctccaacacagagactagatttaactcctgcttggcaacagctggagcctagaagctctgcacaccaatacagagc

SEQ ID NO: 725924 - DNA, 651 bp, Homo sapiens
cgagactgggcaatttacaaaggaaagaggtttaatcgattcatagtmcagcatggctggggaggcctcaggaaacttacaatcatggtggaggggaagcaaacacatccttcttcacatggtggcaggaagaattgccgagcaaagggggaaaagccccttataaaaccatcagatctcgtgaaaattcactcattatcacgagaacagcagcatgggggtgactgcccccatgattcaattacctcccaccaggtccctcccacgacatatggggattatgggaactacaattcaagatgagatttcggttgggacacaaatccaaattgtactaaccactatcatcaccccccactaccaccaccaccaccaccaccatcatcatcattaccatcatcaccaccactaccaccatcatcgtcaaagcttcttttctccattacttcagaaggtcttggggcagcggctttattttcccctttccttcggtaaattcagtcttgtgtgtctgctgcttattaacatctccaccagggggcaggctgtggaagaaaaaggttcaatgcaagactttactctgtccttgaatttcggagctgccagtgtatgaattcttccagactctccctgacagaaaccatctttata

SEQ ID NO: 725925 - DNA, 1387 bp, Homo sapiens
aaaaaaaaaaaaaactcaagaaagcaacagagccaactgtcaaggatgtgaccccaaatggtaacttaagtgtcatcgttcttatgattctgtctcagtgaagatggtgtggcagggtgatgggctacatcctatttccctttccttggaaggaacatggagttcctgagaatttaggaagacttggagccagctacctcggccttgttgcctgtctgctagaccagactgtctgaagcagagatgtaagaaattaaacatcagagaaggaactagggcttctcaggctgggtttctgacattctttcctcccctggcaggtgtaataaaagacacacatgtcaacccttaacagctcagaggcaaagcggtaacatttcactataaagagcacaattatggaaaactgccttatcgagctattttcttgtcccacagaasactcaaagaaattcttctgtgttgctctcttgacaatttcataccagaaaggattttgggttttttgttgttgttgttgttgttgagacggagttcgctctgtcgcccaggctggagtgcagtggcgccatctcggctcactgcaagctccgcctcccgggttcacgccactctcctgcctcagcctcccgagtagctgggactacaggcgcccgccaccacgcccggctatatttttgtgtgtttttagtagagacggggtttcactgtgttagccaggatggtctcgatctcctgacctcgtgatccacccgcctcagcctcccaaagtgctgggattacaggcgcgagccatcgcgcccggccagaaaggatttttacagcagcaagaagcagcctgagagcgattgaattttccaatataaacctgaatccacatcaggaggagggatgataaggctccatggcctgtcactttccaaagatgcctggatatggccatttcggaaggtgaaagccagtgcctgtttcctcatcatattcttctactgagtaaaatagataatcttaggtataaatatacatcatttttttcatggcatttaatataattatttcattttggttggggaaaaaggtcatagcccataagtatattttcttcatctgaattagactgtacttaaaaaaaaaagaaaaagtttttgagtgctggagcacagcaaaaatgtctctgctccctgtttgtaaaatggtcactctgtgattaaaagcctccttctaaatgtgacttcttgtctgtattcttgaatgtagacagtatttagccagtgaatcattagtcatttttttccccacaaatatgattgagcacctgctatgtggaaggtcctgtgctgggcttatcaaaaagaatgtccctatccctgccctccagaagctccca

SEQ ID NO: 725926 - DNA, 576 bp, Homo sapiens
tgtrccccccgccccacttaagatatttctaatttagcattttatattttaagtcaggtgaagaccatgttcgatctattctccatgggatgagattcccttcctccacactaagtgactggaaaatacacgaacaaggtcagggcagtggatttaaaagggagaacaaagaaaagcaagactgatgagctccagagatgcagaaaagaaggtgaggtgctgaaaatgtgtcctcacttgactgagctggaactcggctttggagcatttgtcgccacctgacgtagtatgtattgacttgctgggccctaagaacctgggaggcagcttaggcctggagccagggatgaagccgtggaaatccaccccacctgctcgctgcccctccctgtgcccccagaggcatggggttcagggatattccccagaccaatgtccttccggccaatgccccctgcataaacaagcagaggtgcctataaccaaaggaatccccaaagataggccttggagaggtggataaagattaaggggaaccaggaagagaacgctttgttggagcagcgcttgcctgag

SEQ ID NO: 725927 - DNA, 645 bp, Homo sapiens
agttcgagaccagccttggcaacatagtgggacctcatctctacaaaaaatcaaaaaatgagtggggcacggtggcatacacctgtagtcccagctactcaggaaactgaggtgggggaacggcttgaccctgggaggttgaggttgcagtgaggtgtgattgtgccactccactgcagcctaggtgacagagcgttaccctgtctcaaaaaaaaaaaaaagwttaagatgataaattttatgtgtattttactacaatttaaatatatatgtgtatacatatataaacattcatattcatacttgcagaattaatcactaacactatgaaacccagcccttgcgtggctctgccaatggctggcccagccaccagccccatgtcaattgcctgagtccgtcccactaggatggagcctgcagtcctttccaccctgcagtgaggccattctgggaaaacccggtatacacaagagtatccacggaaaacagaccaaattaaatgagatgcatggtgttggtcgtgcagggacacaggcacatggagcgggtggggtaggcaggaactgaacaataaaaggacccagacaagatcctaaaagaattggagagatgaaaaagtgtcctaactcattaaatcccatt

SEQ ID NO: 725928 - DNA, 604 bp, Homo sapiens
tggcttcttcttcagagctcccgcctgtcgagagccaaacatggctgcctgtctgctggtctgaggattcctttctcactgtaccccagggcccaggagcatttccagtagaayaatgtgtgtgtggggggcaggggtaggtggggggatgagtgtagattgccttgcctgcctgcagggaagccaaggcctcaggctgtagagccaggcagctgctggtcctagctgcaccacttaccagctgtgtcctctggggccagtgtcctcatctctctgaacctctttcgtcaactgtacagtggagctcataacagcgccttcctcacaaggttgctctgaggagtgaaggaatgaatgcaggtgcagggcttagaagagagcttagcacaccgtaggtgctcagttggcagaatgtatgtgaactccctgagggcaggtaccttgattgactcactcataggctctcagctcctaagaccaggcctggcatgacaaagaattgagtgacagtgatgaccaagtgtgaggattggagttggcagattccacagggatttcatccatgtggggctgaaacaagcctcaggtgaccagcaagcctctc

SEQ ID NO: 725929 - DNA, 604 bp, Homo sapiens
tggcttcttcttcagagctcccgcctgtcgagagccaaacatggctgcctgtctgctggtctgaggattcctttctcactgtaccccagggcccaggagcatttccagtagaataatgtgtgtgtggggggcaggggtaggtsgggggatgagtgtagattgccttgcctgcctgcagggaagccaaggcctcaggctgtagagccaggcagctgctggtcctagctgcaccacttaccagctgtgtcctctggggccagtgtcctcatctctctgaacctctttcgtcaactgtacagtggagctcataacagcgccttcctcacaaggttgctctgaggagtgaaggaatgaatgcaggtgcagggcttagaagagagcttagcacaccgtaggtgctcagttggcagaatgtatgtgaactccctgagggcaggtaccttgattgactcactcataggctctcagctcctaagaccaggcctggcatgacaaagaattgagtgacagtgatgaccaagtgtgaggattggagttggcagattccacagggatttcatccatgtggggctgaaacaagcctcaggtgaccagcaagcctctc

SEQ ID NO: 725930 - DNA, 654 bp, Homo sapiens
ggctgaggcatgagaatcacttgaacccaagaggcggaggttgcagtgagccaagatcatgccactgcactccagcctgggtgacagagtgagactagtctcaaaaaaaaaaggtaatagaaaccacttcagactccagatatctgaaacctaagaggaatttattttttttaagtattagtcagctcatagaagctctgggaaaggtgaggaactgagtgtgccactgtactggttctaaaacataagcaaaacttcttagacagtccctcatggaaggaggagtctaatcgccacccctccttgaatatgggctagccttagtgactctctcttaatgaatagcacrtggcggtagagatgctctatcatttccaggtgatacaacttctgcctgactctctctttctctctttttctctctccttctctctgtgtctgtatatctctctgtctctctgtctccctctctctgcatgtgtctctctgtctctctcttctctgtctctctgtctctctctctctctttccttccttccctctctcaatgttctcccttgggacctcgcctccatgttgtgaggaagccaggcagccccatgggaaaaccacatcgaggtgtctggccatggccccagctaaggtcacagccaa

SEQ ID NO: 725931 - DNA, 654 bp, Homo sapiens
ggctgaggcatgagaatcacttgaacccaagaggcggaggttgcagtgagccaagatcatgccactgcactccagcctgggtgacagagtgagactagtctcaaaaaaaaaaggtaatagaaaccacttcagactccagatatctgaaacctaagaggaatttattttttttaagtattagtcagctcatagaagctctgggaaaggtgaggaactgagtgtgccactgtactggttctaaaacataagcaaaacttcttagacagtccctcatggaaggaggagtctaatcgccacccctccttgaatatgggctagccttagtgactctctcttaatgaatagcacatggcggtagagatgctctatcatttccaggtgatacaacttctgcctgactctctctttctctctttttctctctccttctctctgtgtctgtatatctctctgtctctctgtctccctctctctgcatgtgtctctctgtctctctcttctctgtctctctgtctctctytctctctttccttccttccctctctcaatgttctcccttgggacctcgcctccatgttgtgaggaagccaggcagccccatgggaaaaccacatcgaggtgtctggccatggccccagctaaggtcacagccaa

SEQ ID NO: 725932 - DNA, 994 bp, Homo sapiens
tcgggtataaaagattaaaaatagagtgtaaaagataaaaaatggtgcacctgtatagggcccttgccatgaatggagcttacaggactggagtttgctgtaggtgactctgagtgagtggtgagtgaatgtgaggggcattactgcccactcctttataaacactgttatagactttatgaacactgtatggctacactaaatttataaacacatgaagtcattgtgctacaacattacaatggctagcacgtcactgggcgataggaatttttcagctccattatggtcttacgggagctgtggtatacacagcccgttgttgactgaaacgtcgttatgcggcacttgactgtataagaaagggaagatgtagtcccagctactcgggagactgaggcaggagaatcgcttgaacccgggaggcgcaggttgcagtgagccgagatcacaccactgcactccagcctgggcgacagagcaagactctgtctcaaaaaaaaaaaawaaaataaaaataaaaataaaaataaaaaaggaagaatctgtcagtgagcgaggtgtccaaaaggggtaagtacgggatccagagtagagtactggggtgcacaggtgggtctggaggtctggctgcaggaagcaaagctggttcctgccggacagctctctgggagcccgagtgtaaggccaacttaaaggaaggcagagcaggtcaactggggggcttgagaagtgaaaacaaagtggtccactggccagaatgggagagctgacaaggtaaacagaagattctgaggcagacacacgtagcccagatggaagcggggttccgcagacattctgactgcccctcctacgcactcacttttcctggctgactaagccccagggtcaggaatgcaccactgagagaaggtagcccctctctctttctgccggatattggcaattctgctgtaacaaacacccccaagattttagtggcctaaactca

SEQ ID NO: 725933 - DNA, 994 bp, Homo sapiens
tcgggtataaaagattaaaaatagagtgtaaaagataaaaaatggtgcacctgtatagggcccttgccatgaatggagcttacaggactggagtttgctgtaggtgactctgagtgagtggtgagtgaatgtgaggggcattactgcccactcctttataaacactgttatagactttatgaacactgtatggctacactaaatttataaacacatgaagtcattgtgctacaacattacaatggctagcacgtcactgggcgataggaatttttcagctccattatggtcttacgggagctgtggtatacacagcccgttgttgactgaaacgtcgttatgcggcacttgactgtataagaaagggaagatgtagtcccagctactcgggagactgaggcaggagaatcgcttgaacccgggaggcgcaggttgcagtgagccgagatcacaccactgcactccagcctgggcgacagagcaagactctgtctcaaaaaaaaaaaataaaataaaaataaaaataaaaataaaaaaggaagaatctgtcagtgagcgaggtgtccaaaaggggtaagtacgggatccagagtagagtactggggtgcacaggtgggtctggaggtytggctgcaggaagcaaagctggttcctgccggacagctctctgggagcccgagtgtaaggccaacttaaaggaaggcagagcaggtcaactggggggcttgagaagtgaaaacaaagtggtccactggccagaatgggagagctgacaaggtaaacagaagattctgaggcagacacacgtagcccagatggaagcggggttccgcagacattctgactgcccctcctacgcactcacttttcctggctgactaagccccagggtcaggaatgcaccactgagagaaggtagcccctctctctttctgccggatattggcaattctgctgtaacaaacacccccaagattttagtggcctaaactca

SEQ ID NO: 725934 - DNA, 994 bp, Homo sapiens
tcgggtataaaagattaaaaatagagtgtaaaagataaaaaatggtgcacctgtatagggcccttgccatgaatggagcttacaggactggagtttgctgtaggtgactctgagtgagtggtgagtgaatgtgaggggcattactgcccactcctttataaacactgttatagactttatgaacactgtatggctacactaaatttataaacacatgaagtcattgtgctacaacattacaatggctagcacgtcactgggcgataggaatttttcagctccattatggtcttacgggagctgtggtatacacagcccgttgttgactgaaacgtcgttatgcggcacttgactgtataagaaagggaagatgtagtcccagctactcgggagactgaggcaggagaatcgcttgaacccgggaggcgcaggttgcagtgagccgagatcacaccactgcactccagcctgggcgacagagcaagactctgtctcaaaaaaaaaaaataaaataaaaataaaaataaaaataaaaaaggaagaatctgtcagtgagcgaggtgtccaaaaggggtaagtacgggatccagagtagagtactggggtgcacaggtgggtctggaggtctggctgcaggaagcaaagctggttcctgccggacagctctctgggagcccgagtgtaaggccaacttaaaggaaggcagagcaggtcaactggggggcttgagaagtgaaaacaaagtggtccactggccagaatgggagagctgacaaggtaaacagaagattctgaggcagacacacgtagcccagatggaagcggggttccgcagacattctgactgcccctcctacgcactcacttttcctggctgactragccccagggtcaggaatgcaccactgagagaaggtagcccctctctctttctgccggatattggcaattctgctgtaacaaacacccccaagattttagtggcctaaactca

SEQ ID NO: 725935 - DNA, 690 bp, Homo sapiens
ctaataattatatttagaatacacaaaaccttccctttctggttattcttactctgatgcatttctattggattaccctttaagtaacttcagaagaaacaaggggtcttcatctttatacgtaatcttcttcagaagaagtttaacttcagaactttaacttcagtaacttcagaactttttagaagtttaagtaacttcttcagaagaaacatgtaatcttcatytttatatgtccaaacctgtctcccttttacaatcacacatgaatcacagtttggatgggaagagatttctagaattacctcagaatttggtcaatgttctcaatacgtagtcctttgtttttgtttggaagtgtatggaactttctcttcatcttcaagattcaggaatttcaccatgacatgttttgttggctctcttctttagtattcctgccgagtgtttggtgggtccttttgatgtaaacgctgtgcccggctatttcctttctttagtgaaaggaaattttcttttattattttttgcattatggcttctcttctaagtgacattgctactgaaactcacttaagtggctgactcttagatcgcgtctcatgtctcatatcttagtcttaaaatatctatttctttggtttgcatttttggagaatttttaaaagttatttgtacattaaaagttat

SEQ ID NO: 725936 - DNA, 1224 bp, Homo sapiens
caaaacaaagaaaactatgactatcccagagatgcagaaaaagcttttgataaaatttgtcgttcataaaaaatattcttaatggaagagaacttccttaatcttataaaggttatctgggggaacctatggcaaacatatggtgaaatgttgacaggtttctctttgaaaatgagaataagatacagatgtccactctcattcctattaaacattgtgttgaatctcctagacaaacgaagaaaagcaataaaatgaaatgaaagatatatgaagtgggaaggaaaatataaaactcattattcatagatggtatcatagtatacgtaaaatatccaaaagaacatacaggtataaaaattcaaagggcccaaaatagcaaaacactttttagaagaataaaaagatggaaggatttgctctactggatatcaggttatcataaaaccacagccatttacatagtatatatatatatatatatatgcataagtagataaatggatcaatcaaagagaagggagaaatctagaaacagactcatgcgtattttgacactcgatatttcacaaagttttcttcaacaaatagtgctgggactactggatatccatatggaaaaaaattaaacttgatccttatctcacaccatatgtaaaattcaatttcaggtgaattgcagatctaaatgtgaaaggtaaaataaaacttctagttgatagcgtagtataatatcttcctactctagtgtacataaagacttcttaaacagggctcaaaatatattaactattaaaaaaattacatttcactaaaattaagaatttttgttcattaaaagatgacagtaagagggtgaaaaggtaagcaactattcagaatacacacacacacacacacacacacacacacamacacacacacacaaaactcttacaagccagtaagaataagataacccagtagaaaaagggacaagacactgggatgggtacttcataaaacaggctatccagattaataaacctataaatcagaaatcagagaacttatagtttcaatgagattcaactatgcatccatcataatggttacaactaaaaagactgataataataactgttggtgaggatgtaaagcaaagggaattctcatacatggctggtaagagaataaattgacatagccactttgagaaaacagtttagcattctctattaaagt

SEQ ID NO: 725937 - DNA, 1224 bp, Homo sapiens
caaaacaaagaaaactatgactatcccagagatgcagaaaaagcttttgataaaatttgtcgttcataaaaaatattcttaatggaagagaacttccttaatcttataaaggttatctgggggaacctatggcaaacatatggtgaaatgttgacaggtttctctttgaaaatgagaataagatacagatgtccactctcattcctattaaacattgtgttgaatctcctagacaaacgaagaaaagcaataaaatgaaatgaaagatatatgaagtgggaaggaaaatataaaactcattattcatagatggtatcatagtatacgtaaaatatccaaaagaacatacaggtataaaaattcaaagggcccaaaatagcaaaacactttttagaagaataaaaagatggaaggatttgctctactggatatcaggttatcataaaaccacagccatttacatagtatatatatatatatatatatgcataagtagataaatggatcaatcaaagagaagggagaaatctagaaacagactcatgcgtattttgacactcgatatttcacaaagttttcttcaacaaatagtgctgggactactggatatccatatggaaaaaaattaaacttgatccttatctcacaccatatgtaaaattcaatttcaggtgaattgcagatctaaatgtgaaaggtaaaataaaacttctagttgatagcgtagtataatatcttcctactctagtgtacataaagacttcttaaacagggctcaaaatatattaactattaaaaaaattacatttcactaaaattaagaatttttgttcattaaaagatgacagtaagagggtgaaaaggtaagcaactattcagaatacacacacacacacacacacacacacacacacacacacacacacaaaactcttacaagccagtaagaataagataacccagtagaaaaagggacaagacactgggatgggtacttcataaaacaggctatccagattaataaacctataaatcagaaatcagagaacttatagtttcaatgagattcaactatgcatccatcataatggttacaactaaaaagactgataataataactgttggtgaggatgtaaagcaaagggaattctcatacatggctggtaagagaataaattgacatagccactttgaraaaacagtttagcattctctattaaagt

SEQ ID NO: 725938 - DNA, 653 bp, Homo sapiens
tacatatcaaatgaatgaatgacataccatggacagctctcttcctatcctattgctagagcacatgggctcgcaggcaggtgagtgaacacaaacatgtgtgcaccccacacacacacacacgtacaaactcacacatccatcatttacatgcagaagttacattatactttcatgccaccatctgagaattccaaagagaatatcaggtgaaatacgttaaattacttttgcacatgctacaggtcatgagagtatgagttcatgagaaaggagacactgaaactgaattagcaacagagagcagaggttgtgctgaagggaaagcaatgttaatgccaggaaggagtctggtgttgtacgtgggaaatttgggataaactrcatggattttacagccttccagggaggcagagtgctggagtaggttcagaaagcatttctgaaaacctctttcttctagtcaccctgcctaatttcctctgactctgtcctcccctggctgcatttcctgtttctggttagaactctgacctaagtttctttatttcggaactaagcagaattacttgtttcagtgaatacatttgtggaccacagcaatggggagaaaggagcctgagaaaagtgttcctccggcccttgaggtcaaa

SEQ ID NO: 725939 - DNA, 653 bp, Homo sapiens
tacatatcaaatgaatgaatgacataccatggacagctctcttcctatcctattgctagagcacatgggctcgcaggcaggtgagtgaacacaaacatgtgtgcaccccacacacacacacacgtacaaactcacacatccatcatttacatgcagaagttacattatactttcatgccaccatctgagaattccaaagagaatatcaggtgaaatacgttaaattacttttgcacatgctacaggtcatgagagtatgagttcatgagaaaggagacactgaaactgaattagcaacagagagcagaggttgtgctgaagggaaagcaatgttaatgccaggaaggagtctggtgttgtacgtgggaaatttgggataaactgcatggattttacagccttccagggaggcagagtgctggagtagrttcagaaagcatttctgaaaacctctttcttctagtcaccctgcctaatttcctctgactctgtcctcccctggctgcatttcctgtttctggttagaactctgacctaagtttctttatttcggaactaagcagaattacttgtttcagtgaatacatttgtggaccacagcaatggggagaaaggagcctgagaaaagtgttcctccggcccttgaggtcaaa

SEQ ID NO: 725940 - DNA, 653 bp, Homo sapiens
tacatatcaaatgaatgaatgacataccatggacagctctcttcctatcctattgctagagcacatgggctcgcaggcaggtgagtgaacacaaacatgtgtgcaccccacacacacacacacgtacaaactcacacatccatcatttacatgcagaagttacattatactttcatgccaccatctgagaattccaaagagaatatcaggtgaaatacgttaaattacttttgcacatgctacaggtcatgagagtatgagttcatgagaaaggagacactgaaactgaattagcaacagagagcagaggttgtgctgaagggaaagcaatgttaatgccaggaaggagtctggtgttgtacgtgggaaatttgggataaactgcatggattttacagccttccagggaggcagagtgctggagtaggttcagaaagcatttctgaaaacctcyttcttctagtcaccctgcctaatttcctctgactctgtcctcccctggctgcatttcctgtttctggttagaactctgacctaagtttctttatttcggaactaagcagaattacttgtttcagtgaatacatttgtggaccacagcaatggggagaaaggagcctgagaaaagtgttcctccggcccttgaggtcaaa

SEQ ID NO: 725941 - DNA, 653 bp, Homo sapiens
tacatatcaaatgaatgaatgacataccatggacagctctcttcctatcctattgctagagcacatgggctcgcaggcaggtgagtgaacacaaacatgtgtgcaccccacacacacacacacgtacaaactcacacatccatcatttacatgcagaagttacattatactttcatgccaccatctgagaattccaaagagaatatcaggtgaaatacgttaaattacttttgcacatgctacaggtcatgagagtatgagttcatgagaaaggagacactgaaactgaattagcaacagagagcagaggttgtgctgaagggaaagcaatgttaatgccaggaaggagtctggtgttgtacgtgggaaatttgggataaactgcatggattttacagccttccagggaggcagagtgctggagtaggttcagaaagcatttctgaaaacctctttcttctagtcaccctgcctartttcctctgactctgtcctcccctggctgcatttcctgtttctggttagaactctgacctaagtttctttatttcggaactaagcagaattacttgtttcagtgaatacatttgtggaccacagcaatggggagaaaggagcctgagaaaagtgttcctccggcccttgaggtcaaa

SEQ ID NO: 725942 - DNA, 653 bp, Homo sapiens
tacatatcaaatgaatgaatgacataccatggacagctctcttcctatcctattgctagagcacatgggctcgcaggcaggtgagtgaacacaaacatgtgtgcaccccacacacacacacacgtacaaactcacacatccatcatttacatgcagaagttacattatactttcatgccaccatctgagaattccaaagagaatatcaggtgaaatacgttaaattacttttgcacatgctacaggtcatgagagtatgagttcatgagaaaggagacactgaaactgaattagcaacagagagcagaggttgtgctgaagggaaagcaatgttaatgccaggaaggagtctggtgttgtacgtgggaaatttgggataaactgcatggattttacagccttccagggaggcagagtgctggagtaggttcagaaagcatttctgaaaacctctttcttctagtcaccctgcctaatttcctctgactctgtcctcccctggctgcatttcctgtttctggttagaactctgacctaagtttctttatttcggaactaagcagaattacttgtttcagtgaatacatttgtggaccacagcaatggggagaaaggagcctgagaaaagtgttcytccggcccttgaggtcaaa

SEQ ID NO: 725943 - DNA, 1119 bp, Homo sapiens
tgacttcactaataattctagcttgattaaaactggtaatctagaaagtgaatatagtattaagaattaggcttagagttaaacagccaatctaagagaattgcaaatgatttcttattgcctatcaagattcaaataatgctcagaacactcatggctactgggtttttgttgaaaagtgatagctctgggtatgaagaaaaggatgacctcacacacatctttcatccctgtggccttgggaaggaaatcttcagttggaaggtttttaggctacaaataacatgaatgagtagagtcgtagcccttgttttttcctttgtgatttacactgcaatgttctaaggagcgagcaatgaccttcgacatccacatggccttattttacaggggagttgagagccactgaatttatgtccttgtttgagcttccaaaaccaattagcatcagaggcaagccttgatcatgcggctcttggttctcacttctgggctccttccctcaccctgggtgggtcccttctggcagagacatctgctctggagcattcatgcctaaagagtgacatgacatttttcagcacctattacggcctgaaaactggaatccattgtgatgttaagatgctgcactttgtgccaatgagtctttatttcccactttgctttaactcaaaccttgtgtgatacttccaaatgtctgtctcaatccactctgatcttcaacaccagcaagttccaatgggagattttaattcccagtctgctcttgggaaaaggataaaaattaattctcaggttcctcttctcccagtccatgtttgaaactggagatgcaagtggtactcacacaattaaccttctttgtgaccatctctcccaacgccagctttgctgtcaaactctctatacaattcagtgcaagaaacacactattgtggggatcctatataagacrgtggataggagtcaggactagcttacagctcccatgggacagacagagcagtgtgtggagactcacatcccaaacttttgctccaagaatgaccacagaaacatgccaggaaagccgagagaatccatagacccttcaaaggaactgggttcactactgtg

SEQ ID NO: 725944 - DNA, 597 bp, Homo sapiens
atcccctcagcatgcatatggtaaatgccctcaaacacgcaaacagagtccacgtctttgaaaaacactttcaacacaataacagccaggaagaagtggtctatttttatacagcagcccccacatgacacagcaaatcaaacacattatttcactaattcttttttacctgttgcttcaggtgaataaagtcacaatgtgtgtagaacaagtgagtgaccctttacaaagactcttgttccccctagagatttcattgtggcaaggaaatagctctagagtagatcatttttaacctagtgaacagccacaatgaaggtttgataaaagatgaaccaaatgaagtaagaacaggaagcttgagactctctgctctgctcaatccataccatttccagaacgggtcaagcactcagaagtgccctgtggctgtctggcactagaaactcrtggaaggtaaattttttatgttttatttttcattaaaacagactaagaaattgcctaaaggcaagttccatatgtttggctgttgtttaaaccttagtttcttaaatacatttgaataaaactatgacagaagaatcattggtcgct

SEQ ID NO: 725945 - DNA, 1370 bp, Homo sapiens
tttttwaaaaaacttttgagtcaacgtaactttttccctgactgttttgttccttgatgttcttgcctttacctggtgtcaaaacccatctgtgagcacagttagataaggcttctcattgttctcagggtgcataaaatccctctccctcccttccttctctccctctccctgtgcctttctctggctctctctttttctgcctacctcatctctacccttcctccttccagaagctttcaaatacaaattgagaaagaagaaaactccccaaataaaactatacaagcaaatccattcggcataatatctgtgtcattctgtatgaaaatcattaggtaagtgtgacctgagagaattagagaaaataaataggagcaactagaaaccaatgcacctggtataactaataaagaaaacatgagacttttagtgaaaggagttaaataagaccactgaaagttgatgtgataggaaccacatcaggactaagcaccttttaaataaactaatcctgcactttaggaaatcaaaactacagctggcagtatccagttcacatcactgtgctgactgcctaccaaaatgaggttttgtgttcccatgtatatcccactcacaatagcaaagatatggaaccaccctaagtgtctatcaacagatgaatggataaagaaatggtggtatatgtacaaagtggaacactatttggccacgaaaaagaataaaatcctgtcatttgcagtaacatggatggaactggaagtcattatgttaagtgaaataacccaggctcagaaagatgaatattgcatgttctcactcataggtgggagctaagaaaaggggagcacatggaggttgagagtggaatgatagataccagagactgggaagggtgtgtgggtgggaggcgggggcatgaagaggggtaggttaatgggtacaaacatacagttagatagaaggaataagtgctagtgttccatagcagagtagggtggctacagttaacaacagtgtattgtatatttcaaaataactagaagggagaacgaaaatgttcccaacacacagaaatgagaaatacttgggtgatgaatatacaaaaaccctgacttgatcatttcacatttatgcatgtcataaaatttcacatgcaccccataaatatgtacaaatataatatattgataaaataaagtgagtgctatgttacacactggggttggagggctaaatcagaagtgatctctgcccttgaggagggagtcagactaagggttcccctacaagatggtcaacgtgatgacagacacgcaggaagaacagaggactgtacttcaatgtcctggggacagggatgggat

SEQ ID NO: 725946 - DNA, 655 bp, Homo sapiens
ttagcttaagagaagttatgcaagtattttgaaaataaactttaaaaagaagtcaataatttaaataggtaaatagagggcctggccaatgctggcctatagacgtggtctctggttgacatagggtgtgtggataggttggagctggtctgtagagggagccttatgttgttggagctagcagaagactgctggtgggcaaagcatggcctgatgggcacagctgaagctcctctgggaggtcactgggccctagcaaaatagtaacagagtaccagaacttgggctggatttggagcctagagacaataaattggtaactgamtgaatcaaaaaagtcagccaggtgcagtggctctttcctgtaatcttagcactaagggggcccaaaggtggacaaattgcttgagctcagaaggttgagaccagcgtgggcaacatggcaaaatcctgtctctaccaaaaatacaaaaaattagcaaggtgtggtggcatgtgtctgtggtcccagctactcaggaggctgaggcaggaggatcatttgagcctgggaaggtggagtgtgcagtgagccaagatggcgccactgtactccaacccgatgacagagtgagatcccgtctcaggaaaaaaaagaccacgtacagtggcttac

SEQ ID NO: 725947 - DNA, 655 bp, Homo sapiens
ttagcttaagagaagttatgcaagtattttgaaaataaactttaaaaagaagtcaataatttaaataggtaaatagagggcctggccaatgctggcctatagacgtggtctctggttgacatagggtgtgtggataggttggagctggtctgtagagggagccttatgttgttggagctagcagaagactgctggtgggcaaagcatggcctgatgggcacagctgaagctcctctgggaggtcactgggccctagcaaaatagtaacagagtaccagaacttgggctggatttggagcctagagacaataaattggtaactgaatgaatcaaaaaagtcagccaggtgcagtggctctttcctgtaatcttagcactaagggggcccaaaggtggacaaattgcttgagctcagaaggttgagaccagygtgggcaacatggcaaaatcctgtctctaccaaaaatacaaaaaattagcaaggtgtggtggcatgtgtctgtggtcccagctactcaggaggctgaggcaggaggatcatttgagcctgggaaggtggagtgtgcagtgagccaagatggcgccactgtactccaacccgatgacagagtgagatcccgtctcaggaaaaaaaagaccacgtacagtggcttac

SEQ ID NO: 725948 - DNA, 593 bp, Homo sapiens
gggactatagrcatgcaccaccatgctcatttttaaattttttcttttgtagatctcattcctggggtctcactatgttacccaggctggttttgaactcctggcttcaagcgatcctcccaccttagcctcccaagtgctggtatttttttttttttttttttttttttgagatggagtcccgctctgttgcccaggctggagtgcagtggcgtgatctcggctcactgcaacctccgccctccgagttcaggtggttctcctgcctcagcctcccaagtacctggcgcctgccaccgtgcctggctaatttttgtatttttagtagagacggggtttcaccatgttggtcaggctggtctcgaactccttaccttgtgatccacccgccttggcctcccaaagtgctgggattacaggcgtgaaccaccgtacccggccagcctctgttttcttaatacccagaacaacctgatgtctccttccgtcatcaaatattatctataaaagccatttcaagtgtcatcacagattctttctttgaaatcactctggtctctgttcctggtcagagcccttggtgagtctgtata

SEQ ID NO: 725949 - DNA, 1028 bp, Homo sapiens
aattaaaatgaccttaaattttaaaacgacagggacttaggcgtgaaaaaaccttttggaagcatttagttcttttccatcttacagccataaattaaaggtatttcttaatttgctaaaaatatttcaaccgaattggcttatatttaagttttaatgggtcaaatatgttaaccaaggatattcttttggcttttcggggaatttgtctgtcttcaaacaaaacaaacaaaactaaaccactgtccgaatagtagagacaatttacaatgtgtgtcaagatccagagttcatgaaatgcgataataaatagcccaaaccacgagtacattatttattattactgctctaagagtaaaatgctatggtcatgtgaggtctgtgtaaaggataggacgatggcctctgccacgtgatctagaagccacataacgcaacttttgtggaaagcaagaggattcaatctgtgtgtgaagatggcaagggctagggctgcacaacgtggtggctaagagcacgggagtcaaaatcctaggctgggaaacagtatcatcttgggcaaaacactatcatcttcaggcaggcttctcatctgtaaaatggggataatgcaacgtacgattcttgtgaactaatcttgtgaaagcagtaggcaaacgcctggcttcacaggcwactaagacgtgagctatgttcctcaactggctgggctctgttctgcagccacagggtaggcctggcatcccagaaatgcttgtcattgataacacggggacatcaagtcagagaattcgaatgtcactcctgaaagtctaatgaccctcagctgtcatccacagctcattggaaaactgctaggtaggacccactaaggctgacatatgcatacctcacaacccagcaattctactcctgggtatacactcaacaaaaatgcttacatatgttcaccaaaagaatcagatggttcataacagcatgattcataatagccccaaaccagaaacaacccaaatgcccgttaatag

SEQ ID NO: 725950 - DNA, 444 bp, Homo sapiens
ataaataaattaaagattcctgagttgcgctaacttgtcagagcagaaagactgagtttctggtgcctgtctcctgtctttttaaccatggctgcatcatactgcatcatttctccctaaacagttatagatttggccaagcacggtggctcacgcctgtaatcccagcactctgggaggccagggaaggtggatcacctgaggtcaggagtttgagactagcctaaccaacatggtgaaaccccgtctctattaaaaatacaaaaattagctgggcgcggtggcaggtgcctgtaatcccagctacttgggaggctgaggcgggagaatcgcttgaacttgggaggcggaggttgcrgtgagccaagattgcaccatttccctccagcctgggagacagagcaagactctgtctcaaaaacaaaacaaaacaaaagttataga

SEQ ID NO: 725951 - DNA, 646 bp, Homo sapiens
tgccaatagtgctgaggttgaggaaccacgagagaaagcagcaggctctgcaggcactggtggagatttctagtgccaatagctctatgtccccttccccacctccaccagtccccattgggacctgagaccttattaggagtgactacagtgctggtcccagttgactaggaagagggctcctggtcaggctgacgttgcactcaggagtctaactgtccagtggcagaaatcgataattggttccagttcctctccccaggtgccacgatgctggcagtgcccaccactctgctggccttggactgcaggactggtccctcctgtggcttragacaagctccagctagtctgctgcagtgtgacagcctggggatggggagggagaggactccggtacacagcctgggagatggcttttccatggcaacagctcagttcctggtaggcagccctcacctgctctgatcctgccacatatgtgcagctccctgtgttccatccagagatcaacttggccaaaagaatttattttcagttttttggggaaaaccaataaaaacacctccaaatagccctgctttgccaggagtaccaaatccttgggtttgcagaaatactaacgagtgcttttatttgacctttc

SEQ ID NO: 725952 - DNA, 607 bp, Homo sapiens
tactgtaacttgtgaaacaatggcaaacactataaagctaattttacagtcttgagtttctttttgtttcactggaatggtaatggtgttacagtggtgctctgacagacaaaaaatctaatatgtccttagaaagttcagaggggaacttatttgaaataaccttttscagtgatggcaatcacaataatgtgggaatgactaggtcctaaaaacttatcaaggtgttactgtatatcagtacgtaaagaaatgtattttgcttctttccaatcactgaatagaaaatgaaatccctgcctcatcgctcctttttttttttttttttaagacagagtctcactccatccctcaggctggagagcagtggctcactgcaatctccacctccaggattcaaatgattctcctgcctcagcctcccaagtagctgggattacaggtgtgtgccaccacgcccagctaatttttttatttttagtacagatagggtttcaccatgttggccaagtgggtctcaaactcctgacctcaagtgatctgcccgccttagcctcctgagtagctgtgattacaggcatgagccacggcgcccagcctcatctct

SEQ ID NO: 725953 - DNA, 607 bp, Homo sapiens
tactgtaacttgtgaaacaatggcaaacactataaagctaattttacagtcttgagtttctttttgtttcactggaatggtaatggtgttacagtggtgctctgacagacaaaaaatctaatatgtccttagaaagttcagaggggaacttatttgaaataaccttttccagtgatggcaatcacaataatgtgggaatgactaggtcctaaaaacttatsaaggtgttactgtatatcagtacgtaaagaaatgtattttgcttctttccaatcactgaatagaaaatgaaatccctgcctcatcgctcctttttttttttttttttaagacagagtctcactccatccctcaggctggagagcagtggctcactgcaatctccacctccaggattcaaatgattctcctgcctcagcctcccaagtagctgggattacaggtgtgtgccaccacgcccagctaatttttttatttttagtacagatagggtttcaccatgttggccaagtgggtctcaaactcctgacctcaagtgatctgcccgccttagcctcctgagtagctgtgattacaggcatgagccacggcgcccagcctcatctct

SEQ ID NO: 725954 - DNA, 630 bp, Homo sapiens
gcccagcattatgaagcaaaaatcgggagtgaaagcaaggccaagcctaactggcatgctgaagcacacagatgcttttgcacagaaaatattttgaaaatgttttcttttccttatagcccccagctttggtaataatggcttccctagatcattctgttagcactttctgctgctcagaacagggtagtgggatttagaatttagaaaacatcccgagaactgtaattaagcaattgtcatagtcccagaaaagaaacaacccttttactttgtaaatgctaggaggatctgtattttttaaaatcttagaacactaactagctaaaaagatagaaagaaaaaaatctttcttacaatatgcctgtagcacggctccaaaatccagtccctctctctcttcttttttttttttttttttttttttttagatacaggaatttcttacacaactttccaagtaaaatattcaatccccaaataatatatttagtagaatccttacaacatgaraaattgtaaatggcatctgtttccgttgaaaatatttttaaattagaaaacatcttaagcactgcatcaaatcaatatttgtaatgggcagaattatttctaaatggttccacaggc

SEQ ID NO: 725955 - DNA, 428 bp, Homo sapiens
gagactataggcgcacaccaccatgcccagctaatttttgcatttttagtagagagagggtttcatcgtgttggccaggctgtcctcaaactcctgacctcaagtgatccacccgcctcggcctcccaaagtgccgggattgcagaagtgagccactgcgtccagcaagaatgaggtttgaagggaggcatgattgtgttctcttcaaatagttgaaaggttccatttgaaaaagggatttacttattcctatggttctagtaagttgcagagggtggatctaagaccattgggtgaactttacagagaggccagaaagccttcwccaggggaagaaagtcaagaaaaggtctcaaaactgtctggcagaattctgcacaggagagtcctcaattcggtgtagaattggcaagtataataactgtaaa

SEQ ID NO: 725956 - DNA, 569 bp, Homo sapiens
catcgaagcctgtcccacccctcgatccccatagccccatgtcttcctgccagtctctgccacttctttgtcctcgtgcagttaccactgctggcacgtgctgtcatttctgcccaactgtgcttatttttatcagcygtctccccacactgggaccaaagggctatgagagaaacttctttgtcttgatgagcctggcagttcacagggctgaatcaatatctgttcaatcaataatggaataataaacaaactcctaaggaattggaaaggaccagaaaaccctttcagaatctacatgaactctccatcttcctcctcagccaccttcatttaacttcatcaaactgacagccagctttgaaaactaatgctttctagtttttgttctattgagtttagtgacaagcatcgcaatagtgattgtatctactatacttccctgcacattccctgtgtggctggtagaatcaatcagctcttctacagcaagatggaagagtacttgtcactaaacccaggaagcagaggttgcagtgagctgagatcatgccactgcactccagcct

SEQ ID NO: 725957 - DNA, 588 bp, Homo sapiens
tgagaagcctttcctggccctggagctaactacatcccatgcaactggccccgacataggtactgctgtcataatgaccttgcaggtggggacagtcaggcagacaagaggttgccctaggccccacagctgggcaaggcaaagcccaaaatagagttcatgctggtgccaggtcagtgctctcagacactcatgtcctgtctctaggcagggccagcccctccccgtgcagggctccagccaggctctcacccccttccttaaaagtgaaccggatccaggaccaacagctygagacagcactctgggaagctgatccccaagttgacgtctgaggctcaaattctctctgattcaaccccacgaggagccagctggggtctgagccggggcagcagggacagagctgccgccgggggtctgctgccagcgggcatcgccgaggagggcgcagcctgcgggctggatagaaaccagacaaagggcactccaggcccaccgggccggccatccggagggtctacagctaattaagactgaagggagcactgaataacccttttgtggatcaaaagcactctgttggaa

SEQ ID NO: 725958 - DNA, 639 bp, Homo sapiens
caggagcgtcactgggtgtattgggccattcttgcattgctataaagaaatacctaaggttgcatcatttataaagaacaggtttaactagttcccggttctgcaggctgtacaagcatggcgcagggcatctgctcagcttctggggaggcctcagggagcttttactcatggcagaaggcgaagcaagggcaggcatgtcacatggctagaacaggagcragagaaagaatggaggggaggtgtcgcacacttttaaacaaccagatctcccaagcactcactatcacgaggacaagaccaaggagatggcactaaaccactcatgagaaatccgcccgcatgatccaaccacctcccaccaagccccgcctccgacagtggggattgcaattcaactcgagatttacaggagacgacatccaaactattctgctgggggtggtgtgcatagcagggaaggaaggtagcgtggatgcagatgtcccagcagggtctcggatggggttggaaaggcctgttctctcccctaggagtagccaggacagaccaggcctggatgggacctggaagacacctcctggttcccattacatttgcattgctcagccaaagaccacaggctgggcagggacctca

SEQ ID NO: 725959 - DNA, 639 bp, Homo sapiens
caggagcgtcactgggtgtattgggccattcttgcattgctataaagaaatacctaaggttgcatcatttataaagaacaggtttaactagttcccggttctgcaggctgtacaagcatggcgcagggcatctgctcagcttctggggaggcctcagggagcttttactcatggcagaaggcgaagcaagggcaggcatgtcacatggctagaacaggagcaagagaaagaatggaggggaggtgtcgcacacttttaaacaaccagatctcccaagcactcactatcacgaggacaagaccaaggrgatggcactaaaccactcatgagaaatccgcccgcatgatccaaccacctcccaccaagccccgcctccgacagtggggattgcaattcaactcgagatttacaggagacgacatccaaactattctgctgggggtggtgtgcatagcagggaaggaaggtagcgtggatgcagatgtcccagcagggtctcggatggggttggaaaggcctgttctctcccctaggagtagccaggacagaccaggcctggatgggacctggaagacacctcctggttcccattacatttgcattgctcagccaaagaccacaggctgggcagggacctca

SEQ ID NO: 725960 - DNA, 639 bp, Homo sapiens
caggagcgtcactgggtgtattgggccattcttgcattgctataaagaaatacctaaggttgcatcatttataaagaacaggtttaactagttcccggttctgcaggctgtacaagcatggcgcagggcatctgctcagcttctggggaggcctcagggagcttttactcatggcagaaggcgaagcaagggcaggcatgtcacatggctagaacaggagcaagagaaagaatggaggggaggtgtcgcacacttttaaacaaccagatctcccaagcactcactatcacgaggacaagaccaaggagatggcactaaaccactcatgagaaatccgcccgcatgatccaaccacctcccaccaagccccgcctccgacagtggggattgcaattcaackcgagatttacaggagacgacatccaaactattctgctgggggtggtgtgcatagcagggaaggaaggtagcgtggatgcagatgtcccagcagggtctcggatggggttggaaaggcctgttctctcccctaggagtagccaggacagaccaggcctggatgggacctggaagacacctcctggttcccattacatttgcattgctcagccaaagaccacaggctgggcagggacctca

SEQ ID NO: 725961 - DNA, 1248 bp, Homo sapiens
cggccagtgttacacatttgggtgctcagcaaagaaataacatagtatttcacttctcaccagataatgtagaaccatttgttataggtctatttcttttcctcctttctgatgattctgctgaatctgaagagtcaccagaagtaacacctgaagagataccagcacttgtcttgtgggttccaagataagctgtcctacttgaggtagactgggtaggagaacctaccaactcaggaattatttttgtctgagattttaacctcttcggcttgaggtttctggccaaacatatgaacaaaggaaacagtatttaacaaaatacaaagataattggttcacagagaatgactaaatagaagtatatcatatttcttaaactgagagtaattttatcatcaaaacattaaaatattcactattaacattttattctggcactgattagtagtagtatttcctaactctaaatttaacgtactgttattcaaatttggagtaatgaatcaatgttccaagtaagagttacagaaaattatttgaataccttacattctttggattaaatgctaagaggaaccaacatttacgtaatataggtattcattcatactaccaatgtaagcctcaataggacccaactttctcctctcttatttctatgtccctaaagacagaatatggttaagaggagaaatcaacaaaacctaaacaggaaaagttaaaaaaaggcatcagaacaaaatgatttttgtcccaagaccagactatttacatctaactgcacccattcaccatggttggccactaggccaggaattatgagaaaggagaatggaagtttaaggcatgtgagaaatatgggtgaatgaatattgagataatcctattttcctttaaaacagctaagaaatggccgaacatgcctgtaatcccagcactttaggaggccaaggcaggtggataaattgaagccaggagttcaaacactagcctgggcaacatagcatgaccccatgcctacaaaaaatttaaaaattagctgggcatagttgtgcacatctatgatcgcagctactcaggagacttgttttagcccaggagcttgacattacgatgacattatgatcacaccatgcactccagcctgggcaacagagcaagacccyggttcttttttttttttttttttttttttgagacagagtctctgctcactgcaagctccgcctcccgagttcacgccat

SEQ ID NO: 725962 - DNA, 1248 bp, Homo sapiens
cggccagtgttacacatttgggtgctcagcaaagaaataacatagtatttcacttctcaccagataatgtagaaccatttgttataggtctatttcttttcctcctttctgatgattctgctgaatctgaagagtcaccagaagtaacacctgaagagataccagcacttgtcttgtgggttccaagataagctgtcctacttgaggtagactgggtaggagaacctaccaactcaggaattatttttgtctgagattttaacctcttcggcttgaggtttctggccaaacatatgaacaaaggaaacagtatttaacaaaatacaaagataattggttcacagagaatgactaaatagaagtatatcatatttcttaaactgagagtaattttatcatcaaaacattaaaatattcactattaacattttattctggcactgattagtagtagtatttcctaactctaaatttaacgtactgttattcaaatttggagtaatgaatcaatgttccaagtaagagttacagaaaattatttgaataccttacattctttggattaaatgctaagaggaaccaacatttacgtaatataggtattcattcatactaccaatgtaagcctcaataggacccaactttctcctctcttatttctatgtccctaaagacagaatatggttaagaggagaaatcaacaaaacctaaacaggaaaagttaaaaaaaggcatcagaacaaaatgatttttgtcccaagaccagactatttacatctaactgcacccattcaccatggttggccactaggccaggaattatgagaaaggagaatggaagtttaaggcatgtgagaaatatgggtgaatgaatattgagataatcctattttcctttaaaacagctaagaaatggccgaacatgcctgtaatcccagcactttaggaggccaaggcaggtggataaattgaagccaggagttcaaacactagcctgggcaacatagcatgaccccatgcctacaaaaaatttaaaaattagctgggcatagttgtgcacatctatgatcgcagctactcaggagacttgttttagcccaggagcttgacattacgatgacattatgatcacaccatgcactccagcctgggcaacagagcaagaccccgkttcttttttttttttttttttttttttgagacagagtctctgctcactgcaagctccgcctcccgagttcacgccat

SEQ ID NO: 725963 - DNA, 971 bp, Homo sapiens
tggttatatttctgttatgtgtattttaccacaattaaatttgtttaaaaaaagataatacattatgttcttaaaaaaatcattctagctccttatcataatgaagtaaaacaagacaagaaaggaagcagagagtatgtgataatggtttgaaccaaacagtaccaattaaaaaaaaaagaaagatgatctgagtgataggaaggagaattttctagccatgttacggataggtggacaagagagattaaggtccagttttctggattgaggatctgttgagatgaaggtgacgtgcaccaagaaccagaggctgacattttggacccaggaaatctggatctcaaaactaacaaaaattcaacacatgcaataataatgaatatactgtggttttaccacacatactttagatactagtctttttaagtgcaaccaagattaaatttrtattttcagtatgcatgttcaacagtgctgggtcaactgcttaaagtcaaaaaaaaaaaaaaaaaaactcctgaaatactcctataggaacagctgttggatctagttttggtctccttttaagtgtattaaaaactgttccacagttgcaaattcttgcctcttgaataaaattcaagtatgattccatccaagactatgactaaaatgcttaaaagaccacaacaataaaaacagataccttgaactttcgctgtaactctcactttttctgtcacttctccattcatcctcttctgaagaaccagaaccttcactctgatcacaggaagtctcctaatttgtgaaggggggaaaaaaatcttgatccctgaagttaaacaacacatgtccagaaaaaagctgtacacaatcctccccagtaagattaaatcatctaagaaaaatgaacagtaatcagtaaatatataatcagataaacttaaaaagcaaacttcttcactacatccctttcttatcaa

SEQ ID NO: 725964 - DNA, 971 bp, Homo sapiens
tggttatatttctgttatgtgtattttaccacaattaaatttgtttaaaaaaagataatacattatgttcttaaaaaaatcattctagctccttatcataatgaagtaaaacaagacaagaaaggaagcagagagtatgtgataatggtttgaaccaaacagtaccaattaaaaaaaaaagaaagatgatctgagtgataggaaggagaattttctagccatgttacggataggtggacaagagagattaaggtccagttttctggattgaggatctgttgagatgaaggtgacgtgcaccaagaaccagaggctgacattttggacccaggaaatctggatctcaaaactaacaaaaattcaacacatgcaataataatgaatatactgtggttttaccacacatactttagatactagtctttttaagtgcaaccaagattaaatttatattttcagtatgcatgttcaacagtgctgggtcaactgcttaaagtcaaaaaaaaaaaaaaaaaaactcctgaaatactcctataggaacagctgttggatctagttttkgtctccttttaagtgtattaaaaactgttccacagttgcaaattcttgcctcttgaataaaattcaagtatgattccatccaagactatgactaaaatgcttaaaagaccacaacaataaaaacagataccttgaactttcgctgtaactctcactttttctgtcacttctccattcatcctcttctgaagaaccagaaccttcactctgatcacaggaagtctcctaatttgtgaaggggggaaaaaaatcttgatccctgaagttaaacaacacatgtccagaaaaaagctgtacacaatcctccccagtaagattaaatcatctaagaaaaatgaacagtaatcagtaaatatataatcagataaacttaaaaagcaaacttcttcactacatccctttcttatcaa

SEQ ID NO: 725965 - DNA, 1543 bp, Homo sapiens
aggggtgggcgaggactgacatgttctacactatggccagcatgactgaacctgacccccaacttgtaatgtcttccagctcttaggtgctctgaccctggaggagagggatttcactgagatgagaaggatgcgtgatgggatccatgggcactggaggcttatatttccctctcatgccatgctcaagtgatgggagggcagaggcatgagagggtgctaagggactaaacgccatggccacaggagctctggccaaggccccaggagtcaagaagtgcacagagggcatggatgcgttggaaaggggaggtgctggccttttaaagatcatatggcttggacaaggaacatgtaagtggtaaaaatgaagggcagaggcttctcccccagtattcttctttgtgtgaggccctttccatgtccctgccccctcatattcccttattccccaaacgtgtctgagattgactttcctgtctaccctagtgagtgggtggggaggacaagccaggtttgttggcttcagaaaggtaagtacaccacttgcatttgakgggtatgtaacaaattcatactgtatccatcacgcatacttgatggaggaatatatactccaagagtaatcagctttaaaaagctaaattataaggtacttagaattcgaaatgcaatttctctcttgtagaaagttttataaatgccaactgccctcttgcatgatcccacaaaagcttaccatcaatataaaatgtagtatatagattcaagatctcttattgtaaacccttggaaccagactgtttcagaatttgggggtgggttttaaaggtgagtgcatatatggtattttccacagttctctcattggggtctggaacaacaccctttaatgaaactatatttttgcagtgaaattataatcactattcacactaagtgaaataactaaagatctgcttcatattagttcaaataaggtttttgttgccaaatcaactttgatgccaaggatatgaaagatgttgggtttttggagatttgtaaatttcaaatgtggataaggaattgtgtgtttgtaggatctaaccatgatgttcatttttgatggagtccaggcatgagagaagtactggacttttcatttcctgccctgggccttgccagtggaggtaggacccccagctctctagaaaagtaacatttaaccttttgagactctgatgaaaggtacagggccgtctagaaaagtttacaaacacacatagacacaaaaaaatgcatagaatttcatggggttcacagacatgtgtcttagataaagaatccctgtgctatagcaggggaactgaagattctgggtgttccagaagtggcacagagggtcctggacacagctggtaacagcagactggggatgcaagatgcaaggtggacatggcggtggcagatgcactccccaaacagcaggccctttattgtcctcctgttgactgaagtgctctgatggtcaacatggacaagagccccagctgtttctata

SEQ ID NO: 725966 - DNA, 957 bp, Homo sapiens
gggaatcctcaagattcatggaattgaccactgggttgcattgtcagctcctatctccctgtcctccacccaattagtcaccagactcacccctcgcctcatctcaggaatagtggttctcatcctcagcccatgctcaagcccctggagagctttggagtcacagacaccagagactctgttctggggggtgtagcatgggccttcataccttagacgtcctccaggtgattctgatgtgcagcccaggctgagaacctccactctgcaatcagcctctttcyctgcactgctgggctgatggtcctcatttcctccctcattctctctcctccacactacagtttcctaactgatctgcatatgtccagtctccctattcttgttcgcttgtcctgacctgttgatatcctaatttaaactctaaccctgatgttcaaaactttccaaaggtcagtttctgcccaccttctcaacctccccttgctctgcccaccccatgcacccacacctgtaggtacacaggtctgatcccctttcatcaacctgctgcaccttcctgttgaagctctcctctgtcgacacccagtcggatctccacacctctgggaaagcttcctggatcattcaattatgtaacaaatctcttccttctccacttccttacagcatgtgttaaaatttttttttttttagtatttaaaaaatagaggcagggtgtcactatgttgccttggctggtctcaaactcctggggtcaagtgatcctcctgcctcccaaagtgctgggattacaagcatgagccatcacacctggccaaacacagcacattgctaatgtccaggaaatacagtctgccctgcgttccgtatatttatggatttgggccccatccactgcatatgataaacgaccttgcctcctctgaatctagaatggcaatgaaattccactca

SEQ ID NO: 725967 - DNA, 653 bp, Homo sapiens
atccagaatgctctgaatgtggaggtgggggcctgggacttgttgaaagcttcttagtccttagtccaagtgagaggctctgggcattagagaagagagccagggttatgtgggtaacattataatgtgaagatagaggaaatctgtacgaatcagagtcctaccaggtgtacagtgggacaaggaggagttgcagggagtccaggaaaagggcaaratttgggatatgcagagctggatgtagtaacatgagtgacaggaatggactagaacaacatggaagcagcaatcttgggagagacttgtctagtttcaatatcgggggacattaggtgaggctgttcagaggcaaatttggaatcaaatttggaaagatgccagggctgagatgagggtctgggtgtttttcatatccccatagagagagtgcaaaaagaagatggcaaaatctcatctgggacacacttttgttgagggtgagaagagagtctgagacaagccaagaaaaaaatttaaagtcccggaatcacagaatcttaagagcaataaagacttttcagattggccacctaatgaatgttggaatccctttcacaatgtcttacacagacgtacacatattctctgtctgcatgaatccagagctggggcca

SEQ ID NO: 725968 - DNA, 1708 bp, Homo sapiens
tgatgaagtaataaaatggattcaaaatcacttggcatatgyatgtgcatgtacatctgtgtgtgcgtgtgtgtgagtgtgtgtgtgtgcatgcgtgtgagtgtgtgtgtatacgtgtatatgtttaaaggccatataaatgctaaactctgtgtgcaaatgtcctcgaattctgattccaactgtctttatcgagtgctggttgtttatccaggtgaaagcatccgctggccagttttgtcccacgtctttttctatcaagtctttggtcctcacttcttcttcctgagtatgtccggagggaacagaatgcagacgtactaggcttttcagttaaagaaacatttttgtatgctgggctttggaaataaagaggtctaccttagtaattccgggatcaatatgtgcagataggaagtaatttggtggtgtgacctttggccatttgtaagtgccttgtccctggaaaacaatgtttaaattggaattgggtttgttttccagccaattaaatccttctggatttcagaggaatttgaaacaaaatatggaacaaatatctattatgaaggaggcacagctgttagatgagttggttgttcgtattggtggtcgtgtgtgcattttatttttttttgtgggagagtagaattttcacttctgcggggagcatctgatcaaatggcccatataacttttacctgtctgctaatctgagtctcaatccacttcttgggctgtgacagctgatttaggacaaaacattccttttcttccaaaagtatacaatcttgggcttctactgttttctgaagctatttttgttctagttgaatgttggggggagaaacctggctatttgtttattattataccaaaaaagaaagtctccagcttctgaagcttggggcactcactgttagagaaacatgtttggcagcacacagggccaaataaactacacacctgcatttcattacaacaggtcattgcgggaacagtggcattagcctccataggaaaagggtttgcatgggggtctaggaagccagttaaacacatgaaaaacacattgagacacctggacagagtgatttatgaagcaagaactgttttcatggtgccagggtcctgtcctcgcagatgcatgaaacgtacatctgcagttctgacatcacagcggacacgggactctgagtgatgcattactgagttccctgacaatgtgaaatgcatttgtcccgttttttcctaaaatggcccacctattttcaaatgcagagtcctgtgcgatgtcatacatttccacaatgttgctttaaaataagagagggcaggaaacgtgattccgactctgcacccagatggactgaggcataatatgtctgcatcgttgatggcagaaagggggcgtccaagtcaggttttccgtcttccaagccaatctttccccttctagaccggaaagattaaatggcaagtagaacaccaagtcaatctgcccagactcaaattccattccctgaccccctcacatagctgtaacatgcttgggcataatcctaagcctctctgtgtctcaagttttctctccatccagtcgggataaaggcagtagccaccttgtagtaggcttgtttccatgagagtgtttagctgctcttactatgactgaaaaaacatagctgcttgcatttgcagacagagc

SEQ ID NO: 725969 - DNA, 1708 bp, Homo sapiens
tgatgaagtaataaaatggattcaaaatcacttggcatatgtatgtgcatgtacatctgtgtgtgcgtgtgtgtgagtgtgtgtgtgtgcatgcgtgtgagtgtgtgtgtatacgtgtatatgtttaaaggccatataaatgctaaactctgtgtgcaaatgtcctcgaattctgattccaactgtctttatcgagtgctggttgtttatccaggtgaaagcatccgctggccagttttgtcccacgtctttttctatcaagtctttggtcctcacttcttcttcctgagtatgtccggagggaacagaatgcagaygtactaggcttttcagttaaagaaacatttttgtatgctgggctttggaaataaagaggtctaccttagtaattccgggatcaatatgtgcagataggaagtaatttggtggtgtgacctttggccatttgtaagtgccttgtccctggaaaacaatgtttaaattggaattgggtttgttttccagccaattaaatccttctggatttcagaggaatttgaaacaaaatatggaacaaatatctattatgaaggaggcacagctgttagatgagttggttgttcgtattggtggtcgtgtgtgcattttatttttttttgtgggagagtagaattttcacttctgcggggagcatctgatcaaatggcccatataacttttacctgtctgctaatctgagtctcaatccacttcttgggctgtgacagctgatttaggacaaaacattccttttcttccaaaagtatacaatcttgggcttctactgttttctgaagctatttttgttctagttgaatgttggggggagaaacctggctatttgtttattattataccaaaaaagaaagtctccagcttctgaagcttggggcactcactgttagagaaacatgtttggcagcacacagggccaaataaactacacacctgcatttcattacaacaggtcattgcgggaacagtggcattagcctccataggaaaagggtttgcatgggggtctaggaagccagttaaacacatgaaaaacacattgagacacctggacagagtgatttatgaagcaagaactgttttcatggtgccagggtcctgtcctcgcagatgcatgaaacgtacatctgcagttctgacatcacagcggacacgggactctgagtgatgcattactgagttccctgacaatgtgaaatgcatttgtcccgttttttcctaaaatggcccacctattttcaaatgcagagtcctgtgcgatgtcatacatttccacaatgttgctttaaaataagagagggcaggaaacgtgattccgactctgcacccagatggactgaggcataatatgtctgcatcgttgatggcagaaagggggcgtccaagtcaggttttccgtcttccaagccaatctttccccttctagaccggaaagattaaatggcaagtagaacaccaagtcaatctgcccagactcaaattccattccctgaccccctcacatagctgtaacatgcttgggcataatcctaagcctctctgtgtctcaagttttctctccatccagtcgggataaaggcagtagccaccttgtagtaggcttgtttccatgagagtgtttagctgctcttactatgactgaaaaaacatagctgcttgcatttgcagacagagc

SEQ ID NO: 725970 - DNA, 1705 bp, Homo sapiens
tttttcccacataaaccaataagtaagcaattcagaayaccttttcgaatactgatgacaataaatgtctgcactccagcctaattgatgcagtattttccatggtcatctgtcgcaaaagctggaacctctgcacacttgaatgtcagcatctcaggaattaacacctttaggatgacctaagggctctaatttgaaagccttcttagattattgaaatgcagtaatgaatgtccaacttgctatcatctcttgaggaataaatgatggacttttatgttgttttgtggccaagtgcaaatttcagcacaattgcactagaaaataacacaatcaaacctttggagggtctgtgtgtgtgtgtgtgtgcatgtgtgtgcgtacgtatgcgtgtagatatctatttaaatgtatacatgcatacatatgcaatttattactagtttgttgaaataccaaaattttttcccatatttttcctttatttggttcatattctattaattaatctttccattattttcttctccaatgtttttcactctcaaagaatttctgattaagggtcaaagtaaaaaatacaggctccctttaaaatattgcttataacaatgatatctatcactcaactcctatcaagataggaggcaagatactggggggaagtaccttctcttttgtaaatttttttctcattgtcctgttaaatttcttgctcccttaatttccccattaaatttttattgctttattctttcttatagcagtttcctcatattaggtgcctctcaattttttttgtctattatgacatgctgtgtttgaatgaatggctctattgtgactcatttcagatttgagcatatctattcaagggccaaccatgaataaatctatttcatgtctatttaatttacatatgggatattttatcatttctttgacaaatggttctcaaagtggaattgtgagtgatattttgtaatgttcttttcgattatttgaaataatccagagttgtggaaaacaaatagcaaatgtactataggggtttatggttacattggtgtccaaattctgtaaccacaagggtaaagagaatcaaatgaattccttccctattattttcttaaaatcagattcctagagatcaagttcacttataacaaatgaacgttggttgttattagtttgtctgcacactgctataaagaactacctgagactgggtaatttataaaggaaagaagtttaattgactcacagttccacatggctggggaagcctcaggaaacttacaatcatggtggaaggtgaaggggaagcagacaccttcttcacaaggcagcaggaaacagagggagcacaggggaaactgtcacttttaaaaccatcagatctcatgagaactccctcactgtcatgagaacagcatgggggagtccgcccctgtgatccaatcacctcccaccaggcttccccgtcgatgagatttggttgggatcacagaggcagaccattccaccagtgttctggttttactcattgatatacgaattaaaatgctacaaaagaaaaggaaacattctaaatgtaaaatcataattttacaagataatagcacgttaggatgagggatctgcgaaagaacccctgtggcagttccagaggactgtgaggttctttggtgttccttggttggaa

SEQ ID NO: 725971 - DNA, 1705 bp, Homo sapiens
tttttcccacataaaccaataagtaagcaattcagaataccttttcgaatactgatgacaataaatgtcygcactccagcctaattgatgcagtattttccatggtcatctgtcgcaaaagctggaacctctgcacacttgaatgtcagcatctcaggaattaacacctttaggatgacctaagggctctaatttgaaagccttcttagattattgaaatgcagtaatgaatgtccaacttgctatcatctcttgaggaataaatgatggacttttatgttgttttgtggccaagtgcaaatttcagcacaattgcactagaaaataacacaatcaaacctttggagggtctgtgtgtgtgtgtgtgtgcatgtgtgtgcgtacgtatgcgtgtagatatctatttaaatgtatacatgcatacatatgcaatttattactagtttgttgaaataccaaaattttttcccatatttttcctttatttggttcatattctattaattaatctttccattattttcttctccaatgtttttcactctcaaagaatttctgattaagggtcaaagtaaaaaatacaggctccctttaaaatattgcttataacaatgatatctatcactcaactcctatcaagataggaggcaagatactggggggaagtaccttctcttttgtaaatttttttctcattgtcctgttaaatttcttgctcccttaatttccccattaaatttttattgctttattctttcttatagcagtttcctcatattaggtgcctctcaattttttttgtctattatgacatgctgtgtttgaatgaatggctctattgtgactcatttcagatttgagcatatctattcaagggccaaccatgaataaatctatttcatgtctatttaatttacatatgggatattttatcatttctttgacaaatggttctcaaagtggaattgtgagtgatattttgtaatgttcttttcgattatttgaaataatccagagttgtggaaaacaaatagcaaatgtactataggggtttatggttacattggtgtccaaattctgtaaccacaagggtaaagagaatcaaatgaattccttccctattattttcttaaaatcagattcctagagatcaagttcacttataacaaatgaacgttggttgttattagtttgtctgcacactgctataaagaactacctgagactgggtaatttataaaggaaagaagtttaattgactcacagttccacatggctggggaagcctcaggaaacttacaatcatggtggaaggtgaaggggaagcagacaccttcttcacaaggcagcaggaaacagagggagcacaggggaaactgtcacttttaaaaccatcagatctcatgagaactccctcactgtcatgagaacagcatgggggagtccgcccctgtgatccaatcacctcccaccaggcttccccgtcgatgagatttggttgggatcacagaggcagaccattccaccagtgttctggttttactcattgatatacgaattaaaatgctacaaaagaaaaggaaacattctaaatgtaaaatcataattttacaagataatagcacgttaggatgagggatctgcgaaagaacccctgtggcagttccagaggactgtgaggttctttggtgttccttggttggaa

SEQ ID NO: 725972 - DNA, 1705 bp, Homo sapiens
tttttcccacataaaccaataagtaagcaattcagaataccttttcgaatactgatgacaataaatgtctgcactccagcctaattgatgcrgtattttccatggtcatctgtcgcaaaagctggaacctctgcacacttgaatgtcagcatctcaggaattaacacctttaggatgacctaagggctctaatttgaaagccttcttagattattgaaatgcagtaatgaatgtccaacttgctatcatctcttgaggaataaatgatggacttttatgttgttttgtggccaagtgcaaatttcagcacaattgcactagaaaataacacaatcaaacctttggagggtctgtgtgtgtgtgtgtgtgcatgtgtgtgcgtacgtatgcgtgtagatatctatttaaatgtatacatgcatacatatgcaatttattactagtttgttgaaataccaaaattttttcccatatttttcctttatttggttcatattctattaattaatctttccattattttcttctccaatgtttttcactctcaaagaatttctgattaagggtcaaagtaaaaaatacaggctccctttaaaatattgcttataacaatgatatctatcactcaactcctatcaagataggaggcaagatactggggggaagtaccttctcttttgtaaatttttttctcattgtcctgttaaatttcttgctcccttaatttccccattaaatttttattgctttattctttcttatagcagtttcctcatattaggtgcctctcaattttttttgtctattatgacatgctgtgtttgaatgaatggctctattgtgactcatttcagatttgagcatatctattcaagggccaaccatgaataaatctatttcatgtctatttaatttacatatgggatattttatcatttctttgacaaatggttctcaaagtggaattgtgagtgatattttgtaatgttcttttcgattatttgaaataatccagagttgtggaaaacaaatagcaaatgtactataggggtttatggttacattggtgtccaaattctgtaaccacaagggtaaagagaatcaaatgaattccttccctattattttcttaaaatcagattcctagagatcaagttcacttataacaaatgaacgttggttgttattagtttgtctgcacactgctataaagaactacctgagactgggtaatttataaaggaaagaagtttaattgactcacagttccacatggctggggaagcctcaggaaacttacaatcatggtggaaggtgaaggggaagcagacaccttcttcacaaggcagcaggaaacagagggagcacaggggaaactgtcacttttaaaaccatcagatctcatgagaactccctcactgtcatgagaacagcatgggggagtccgcccctgtgatccaatcacctcccaccaggcttccccgtcgatgagatttggttgggatcacagaggcagaccattccaccagtgttctggttttactcattgatatacgaattaaaatgctacaaaagaaaaggaaacattctaaatgtaaaatcataattttacaagataatagcacgttaggatgagggatctgcgaaagaacccctgtggcagttccagaggactgtgaggttctttggtgttccttggttggaa

SEQ ID NO: 725973 - DNA, 1705 bp, Homo sapiens
tttttcccacataaaccaataagtaagcaattcagaataccttttcgaatactgatgacaataaatgtctgcactccagcctaattgatgcagtattttccatggtcatctgtcgcaaaagctggaacctctgcacacttgaatgtcagcatctcaggaattaacacctttaggatgacctaagggctctaatttgaaagccttcttagattattgaaatgcagtaatgaatgtccaacttgctatcatctcttgaggaataaatgatggacttttatgttgttttgtggccaagtgcaaatttcagcacaattgcactagaaaataacacaatcaaacctttggagggtctgtgtgtgtgtgtgtgtgcatgtgtgtgygtacgtatgcgtgtagatatctatttaaatgtatacatgcatacatatgcaatttattactagtttgttgaaataccaaaattttttcccatatttttcctttatttggttcatattctattaattaatctttccattattttcttctccaatgtttttcactctcaaagaatttctgattaagggtcaaagtaaaaaatacaggctccctttaaaatattgcttataacaatgatatctatcactcaactcctatcaagataggaggcaagatactggggggaagtaccttctcttttgtaaatttttttctcattgtcctgttaaatttcttgctcccttaatttccccattaaatttttattgctttattctttcttatagcagtttcctcatattaggtgcctctcaattttttttgtctattatgacatgctgtgtttgaatgaatggctctattgtgactcatttcagatttgagcatatctattcaagggccaaccatgaataaatctatttcatgtctatttaatttacatatgggatattttatcatttctttgacaaatggttctcaaagtggaattgtgagtgatattttgtaatgttcttttcgattatttgaaataatccagagttgtggaaaacaaatagcaaatgtactataggggtttatggttacattggtgtccaaattctgtaaccacaagggtaaagagaatcaaatgaattccttccctattattttcttaaaatcagattcctagagatcaagttcacttataacaaatgaacgttggttgttattagtttgtctgcacactgctataaagaactacctgagactgggtaatttataaaggaaagaagtttaattgactcacagttccacatggctggggaagcctcaggaaacttacaatcatggtggaaggtgaaggggaagcagacaccttcttcacaaggcagcaggaaacagagggagcacaggggaaactgtcacttttaaaaccatcagatctcatgagaactccctcactgtcatgagaacagcatgggggagtccgcccctgtgatccaatcacctcccaccaggcttccccgtcgatgagatttggttgggatcacagaggcagaccattccaccagtgttctggttttactcattgatatacgaattaaaatgctacaaaagaaaaggaaacattctaaatgtaaaatcataattttacaagataatagcacgttaggatgagggatctgcgaaagaacccctgtggcagttccagaggactgtgaggttctttggtgttccttggttggaa

SEQ ID NO: 725974 - DNA, 2474 bp, Homo sapiens
aagccctaggtttttccctgatgagcttataacattttgttgttgccaccttctttcaattcttccttctttattaaactataaattctatggggaaagggtttctatctgtcacattcacagttgtatgccttgagcctactggtcaaccctcagcaacacttgttgaataaatgagcccaagatatctcattgtactcctttaggctcatctacaggcaggttctatattctgagatgaaagaggatattgtatttctttcctagattcttcctgggttggccgtatacccagtgctatagtttggatgtttgtccccttcaaacctcaagttgaaatttgatctccagtgttggtggtgcctaatgggagggctttgggttatggggtggacctctaaagagtacattaatgccccttctgggacaggttgggggtgggaggaaggggagagtgaattctagctctatttgttcccatgagagctggttgttaaaaagagtctctcatcttcccccttctcctgattcttctctcaccgtgtgatctctacatacaccagctgccctttgccttctgccatgattgaaagcaggtgagaccctcaccagaagctaagcagatgctggcgctctgctacttgcacagcctgcagaactgtgagccaaataaactcttttcctgataaattatctagccttaggtattccgttatagcaatataaatggactaagacactcagctatcacaaatatgacttggcttgggcactcaggatcttgagaaaaggctgttgatcaagtcatagaggggcttcctcagttctctgcccctgacaacttacttagccttgggtcccaagtgctgtaagtttatcctaggtggaatggagatccttgaagctatgtcacctaacaatgatttcaggcagggctatgtccactgcccttggaaaaatggaaccttgagtctaaacttttccatagaacacacttcaccttccaacctaaaacaatggaagttttccagttggaaattatcccagaggctgatgtacagatttccctttcagtatcttttctgccactaatggattagaagttcccaggactttgattgtcctaagttgtatagttatggggcagttacaagtgtgataaataccatgtgatgataatgggtatatgatcttccctgagcttcagatcaaaatgggtaaactttgaaaatatctacttattacctaaaaaaaaatctaggatgagtttcttgttacatgacagaatcacagaatagactgcttgatagccagtctttacaatttactgtaattgtctctgtcaatctctggagaaaaggggacgtggcaccctggctgagtctgaaagtctgttttgttaccaaattcctgacaaatggacttggagtgaatgccccctctcattgggatgttttgcatggacaacaggattcaaacttggcgtctggtatcttatcatcactttctccccagcgaacatttaatccttcaagtcagagagtaagtaatatatttaacatgtctcaccttcaagctttatttcataaattataaacacctgctttttagtgactgctacttagtctcttttattgtaccaattgttttttccatcataaataattcaggacatatttatcccaaaatagtgcaatttgaaggaatcatagaatagctttcccttaatttttagcatccttgttaataatacccaatgccaagagtgtgctacaactgtccttgcctgactctgcagatagagctgctgactgtgggctatacatggcagtggcagaaagaatccaatccacacagatgtctttcctttctatactcaggacaggctgccamgataaggacacagagctgccatgcacaatgagtgcatgcactcatgcacacgtgacaaccccctggagactgatttagagggacctgagatgtagatccacccctgatttgcctcagggtcaaattcccatcctaacataacctcttggtggggatattgactcttcaaagcagaacggtgtgagaagtatcttaatcaatagctctaccaactcagcaggatttcttgattacatttgtgggcataatcctaatgggatatgacacaggaatgcttcctgctttctggacaagcagcagtgctggtcttctatatgacaggagaatccacctcacatggggtagtcacagaaggagaagaaaaggtagtcaagatcctttaagtcatccttaaggaccctggacccttggaaactgtcagatataggaacatatttttgtgtttctgaagttgaggctttctgaatatatttgtctgcaaattcaggaacctgggctcacagaaagccttgtgaaattaatttacagctgcataaagagtgaaagaactccagagagatctacctttctctgggggcata

SEQ ID NO: 725975 - DNA, 1907 bp, Homo sapiens
ctcaggggactcaggactagtgggcatgtacacttggcctcaggggactcaggattagtgagccccacatgtacacttggcctcagkggactcaggactagtgagccccacatgtacacttggcctcaggggactcaggattagtgagcccccacatgtacacttggcctcaggggactcaggattagtgagccccacatgtacacttggcctcaggggactcaggactagtgagccccacatgtacacttggcctcaggggactcagaactagtgagccccacatgtacacttggcttcaggggactcaggattagtgagccccacatgtacacttggacacgtgaaccacatcgatgtgctgcagagctcagccctctgcagatgaaatgtggtcatggcattccttcacagtggcacccctcgttccctccccacctcatctcccattcttgtctgtcttcagcacctgccatgtccagccggcagattccaccgcagcatcttctgcagcacccccgaccacacacctccccagcgcctgcttggccctccagcccagctcccgcctttcttccttggggaagctccctggacagacaccccctcctcccagccatggctttttcctgctctgccccacgcgggaccctgccctggatgtgctacaatagacacatcagatacagtccttcctcagcagccggcagacccagggtggactgctcggggcctgcctgtgaggtcacacaggtgtcgttaacttgccatctcagcaactagtgaatatgggcagatgctaccttccttccggttccctggtgagaggtactggtggatgtcctgtgttgccggccaccttttgtccctggatgccatttatttttttccacaaatatttcccaggtctcttctgtgtgcaaggtattagggctgcagcgggggccaggccacagatctctgtcctgagaagacttggattctagtgcaggagactgaagtgtatcacaccaatcagtgtaaattgttaactgccacaaggagaaaggccaggaaggagtggggcatggtggtgttctagtgttacaagaagaagccagggagggcttcctggatgaagtggcatctgacctgggatctggaggaggagaaaaatgtcccaaaagagcagagagcccaccctaggctctgcaccaggaggcaacttgctgggcttatggaattcagagggcaagtgataagcagaaagtccttgggggccacaattaggatttctgtcttctaaagggcctctgccctctgctgtgtgaccttgggcaagttacttcacctctagtgctttggttgcctcatctgtaaagtggtgaggataatgctatcacactggttgagaattgaagtaattattgctgcaaagggcttataagggtgtctaatactagtactagtaggtacttcatgtgtcttgacaattttaatcattattattttgtcatcaccgtcactcttccaggggactaatgtccctgctgttctgtccaaattaaacattgtttatccctgtgggcatctggcgaggtggctaggaaagcctggagctgtttcctgttgacgtgccagactagtcatggtttctgatgtgatcttgttttgtctagattccagaattctctgatggtttctggactgggtcccagctggcgtgctggacgaattcggaaacaccttggtcttacttccctaaaatctccatctacctgagagacgagaactccagcaggtcattccgtatcacaatcctgcctcaggtatgaacttggatttgtgctttgctctttttatcatgcaaaagagaaagcactccatgcatgacacgtgtattagatgtcacacctgcattagatctc

SEQ ID NO: 725976 - DNA, 1907 bp, Homo sapiens
ctcaggggactcaggactagtgggcatgtacacttggcctcaggggactcaggattagtgagccccacatgtacacttggcctcagtggactcaggaytagtgagccccacatgtacacttggcctcaggggactcaggattagtgagcccccacatgtacacttggcctcaggggactcaggattagtgagccccacatgtacacttggcctcaggggactcaggactagtgagccccacatgtacacttggcctcaggggactcagaactagtgagccccacatgtacacttggcttcaggggactcaggattagtgagccccacatgtacacttggacacgtgaaccacatcgatgtgctgcagagctcagccctctgcagatgaaatgtggtcatggcattccttcacagtggcacccctcgttccctccccacctcatctcccattcttgtctgtcttcagcacctgccatgtccagccggcagattccaccgcagcatcttctgcagcacccccgaccacacacctccccagcgcctgcttggccctccagcccagctcccgcctttcttccttggggaagctccctggacagacaccccctcctcccagccatggctttttcctgctctgccccacgcgggaccctgccctggatgtgctacaatagacacatcagatacagtccttcctcagcagccggcagacccagggtggactgctcggggcctgcctgtgaggtcacacaggtgtcgttaacttgccatctcagcaactagtgaatatgggcagatgctaccttccttccggttccctggtgagaggtactggtggatgtcctgtgttgccggccaccttttgtccctggatgccatttatttttttccacaaatatttcccaggtctcttctgtgtgcaaggtattagggctgcagcgggggccaggccacagatctctgtcctgagaagacttggattctagtgcaggagactgaagtgtatcacaccaatcagtgtaaattgttaactgccacaaggagaaaggccaggaaggagtggggcatggtggtgttctagtgttacaagaagaagccagggagggcttcctggatgaagtggcatctgacctgggatctggaggaggagaaaaatgtcccaaaagagcagagagcccaccctaggctctgcaccaggaggcaacttgctgggcttatggaattcagagggcaagtgataagcagaaagtccttgggggccacaattaggatttctgtcttctaaagggcctctgccctctgctgtgtgaccttgggcaagttacttcacctctagtgctttggttgcctcatctgtaaagtggtgaggataatgctatcacactggttgagaattgaagtaattattgctgcaaagggcttataagggtgtctaatactagtactagtaggtacttcatgtgtcttgacaattttaatcattattattttgtcatcaccgtcactcttccaggggactaatgtccctgctgttctgtccaaattaaacattgtttatccctgtgggcatctggcgaggtggctaggaaagcctggagctgtttcctgttgacgtgccagactagtcatggtttctgatgtgatcttgttttgtctagattccagaattctctgatggtttctggactgggtcccagctggcgtgctggacgaattcggaaacaccttggtcttacttccctaaaatctccatctacctgagagacgagaactccagcaggtcattccgtatcacaatcctgcctcaggtatgaacttggatttgtgctttgctctttttatcatgcaaaagagaaagcactccatgcatgacacgtgtattagatgtcacacctgcattagatctc

SEQ ID NO: 725977 - DNA, 1907 bp, Homo sapiens
ctcaggggactcaggactagtgggcatgtacacttggcctcaggggactcaggattagtgagccccacatgtacacttggcctcagtggactcaggactagtgagccccacatgtacacttggcctcaggggactcaggattagtgagcccccacatgtacacttggcctcaggggactcaggattagtgagccccacatgtacacttggcctcaggggactcaggactagtgagccccacatgtacacttggcctcaggggactcagaactagtgagccccacatgtacacttggcttcaggggactcaggattagtgagccccacatgtacacttggacacgtgaaccacatcgatgtgctgcagagctcagccctctgcagatgaaatgtggtcatggcattccttcacagtggcacccctcgttccctccccacctcatctcccattcttgtctgtcttcagcacctgccatgtccagccggcagattccaccgcagcatcttctgcagcacccccgaccacacacctccccagcgcctgcttggccctccagcccagctcccgcctttcttccttggggaagctccctggacagacaccccctcctcccagccatggctttttcctgctctgccccacgcgggaccctgccctggatgtgctacaatagacacatcagatacagtccttcctcagcagccggcagacccagggtggactgctcggggcctgcctgtgaggtcacacaggtgtcgttaacttgccatctcagcaactagtgaatatgggcagatgctaccttccttccggttccctggtgagaggtactggtggatgtcctgtgttgccggccaccttttgtccctggatgccatttatttttttccacaaatatttcccaggtctcttctgtgtgcaaggtattagggctgcagcgggggccaggccacagatctctgtcctgagaagacttggattctagtgcaggagactgaagtgtatcacaccaatcagtgtaaattgttaactgccacaaggagaaaggccaggaaggagtggggcatggtggtgttctagtgttacaagaagaagccagggagggcttcctggatgaagtggcatctgacctgggatctggaggaggagaaaaatgtcccaaaagagcagagagcccaccctaggctctgcaccaggaggcaacttgctgggcttatggaattcagagggcaagtgataagcagaaagtccttgggggccacaattaggatttctgtcttctaaagggcctctgccctctgctgtgtgaccttgggcaagttacttcacctctagtgctttggttgcctcatctgtaaagtggtgaggataatgctatcacactggttgagaattgaagtaattattgctgcaaagggcttataagggtgtctaatactagtactagtaggtacttcatgtgtcttgacaattttaatcattattattttgtcatcaccgtcactcttccaggggactaatgtccctgctgttctgtccaaattaaacattgtttatccctgtgggcatctggcgaggtggctaggaaagcctggagctgtttcctgttgacgtgccagactagtcatggtttctsatgtgatcttgttttgtctagattccagaattctctgatggtttctggactgggtcccagctggcgtgctggacgaattcggaaacaccttggtcttacttccctaaaatctccatctacctgagagacgagaactccagcaggtcattccgtatcacaatcctgcctcaggtatgaacttggatttgtgctttgctctttttatcatgcaaaagagaaagcactccatgcatgacacgtgtattagatgtcacacctgcattagatctc

SEQ ID NO: 725978 - DNA, 633 bp, Homo sapiens
gtgaggccaggtctggcttccagcaggcccaggaggtgctgcctgtcatctctgcacacctaatggttctcctgcctggtgctgagccacagagacctgatgccatagatgacacagaccatcagaagtgacaaaggagactgggtgtggtggctcacgactgtattcccagcactttgggatgctgaggcrgacggattgcttgagctcaggagtttgagaccagcctgagcaacatggcaaaaaacccatctctataaaaaatacacacacacaaaaaaaactagctgggcatggtggtgcatgcctctagtcccaactactcggtaagctgaggcagggggactgcttgagtccagggaggttgaggctgcagtgagtcctgattgcaccactacactcccccactgggtgacagagtgagaccctgtctcaacaacaacaacaacaactacaagtagcaaaggaacattgagactctactgggaatgtggagtccactgccccccgttccccaagcccgggccggtagaaatccacttgtgctctgtggctgccaagagcccctcctgcagacaggggccctgcactggacccctggtctctgcatctgtgtgtagggggtaggttgta

SEQ ID NO: 725979 - DNA, 633 bp, Homo sapiens
gtgaggccaggtctggcttccagcaggcccaggaggtgctgcctgtcatctctgcacacctaatggttctcctgcctggtgctgagccacagagacctgatgccatagatgacacagaccatcagaagtgacaaaggagactgggtgtggtggctcacgactgtattcccagcactttgggatgctgaggcggayggattgcttgagctcaggagtttgagaccagcctgagcaacatggcaaaaaacccatctctataaaaaatacacacacacaaaaaaaactagctgggcatggtggtgcatgcctctagtcccaactactcggtaagctgaggcagggggactgcttgagtccagggaggttgaggctgcagtgagtcctgattgcaccactacactcccccactgggtgacagagtgagaccctgtctcaacaacaacaacaacaactacaagtagcaaaggaacattgagactctactgggaatgtggagtccactgccccccgttccccaagcccgggccggtagaaatccacttgtgctctgtggctgccaagagcccctcctgcagacaggggccctgcactggacccctggtctctgcatctgtgtgtagggggtaggttgta

SEQ ID NO: 725980 - DNA, 633 bp, Homo sapiens
gtgaggccaggtctggcttccagcaggcccaggaggtgctgcctgtcatctctgcacacctaatggttctcctgcctggtgctgagccacagagacctgatgccatagatgacacagaccatcagaagtgacaaaggagactgggtgtggtggctcacgactgtattcccagcactttgggatgctgaggcggacggattgcttgagctcaggagtttgagaccagcctgagcaacatggcaaaaaacccatctctataaaaaatacacacacacamaaaaaactagctgggcatggtggtgcatgcctctagtcccaactactcggtaagctgaggcagggggactgcttgagtccagggaggttgaggctgcagtgagtcctgattgcaccactacactcccccactgggtgacagagtgagaccctgtctcaacaacaacaacaacaactacaagtagcaaaggaacattgagactctactgggaatgtggagtccactgccccccgttccccaagcccgggccggtagaaatccacttgtgctctgtggctgccaagagcccctcctgcagacaggggccctgcactggacccctggtctctgcatctgtgtgtagggggtaggttgta

SEQ ID NO: 725981 - DNA, 633 bp, Homo sapiens
gtgaggccaggtctggcttccagcaggcccaggaggtgctgcctgtcatctctgcacacctaatggttctcctgcctggtgctgagccacagagacctgatgccatagatgacacagaccatcagaagtgacaaaggagactgggtgtggtggctcacgactgtattcccagcactttgggatgctgaggcggacggattgcttgagctcaggagtttgagaccagcctgagcaacatggcaaaaaacccatctctataaaaaatacacacacacaaamaaaactagctgggcatggtggtgcatgcctctagtcccaactactcggtaagctgaggcagggggactgcttgagtccagggaggttgaggctgcagtgagtcctgattgcaccactacactcccccactgggtgacagagtgagaccctgtctcaacaacaacaacaacaactacaagtagcaaaggaacattgagactctactgggaatgtggagtccactgccccccgttccccaagcccgggccggtagaaatccacttgtgctctgtggctgccaagagcccctcctgcagacaggggccctgcactggacccctggtctctgcatctgtgtgtagggggtaggttgta

SEQ ID NO: 725982 - DNA, 641 bp, Homo sapiens
atgctattttgattaaataaactgtacaaatttatggaaaagcatgattgaagttatgatcgtctgggtcctattaaattcatggattccaaaaatatacgactgttttatgaagccgcatacattttgacattaaaagttgattgtcacattcagaacagtcacctctgatgtgaaataagctactgtgacagaaatactgaaagggacagcgctgggactctcctctcacctcccaagaggcatggcctggtcccctccatttggagaggctgagtgcccccaggcctcaggcccctgggaagccccccagacatccacacccctcctgctctgctctgctggcccggtgccccttctgcataytgcaggcttcgggagggtgatggtgcttccttatactcttgtgacccccatagccagggcttagcagcaaacactgccatcaactgatatctgtccagtgaaacaaagtcttcagactctacctactgacagctggtgacatctgcagaccaaggacagacatcacacaggaatttgtattttcaaactgacttcaccaagagctagataataaagatggacattataataaagatgtattttatcatgctacataaaaccactgccaaaaaaat

SEQ ID NO: 725983 - DNA, 641 bp, Homo sapiens
atgctattttgattaaataaactgtacaaatttatggaaaagcatgattgaagttatgatcgtctgggtcctattaaattcatggattccaaaaatatacgactgttttatgaagccgcatacattttgacattaaaagttgattgtcacattcagaacagtcacctctgatgtgaaataagctactgtgacagaaatactgaaagggacagcgctgggactctcctctcacctcccaagaggcatggcctggtcccctccatttggagaggctgagtgcccccaggcctcaggcccctgggaagccccccagacatccacacccctcctgctctgctctgctggcccggtgccccttctgcatactgcaggcttcgggagggtgatggtgcttccttatactcttgtgacccccayagccagggcttagcagcaaacactgccatcaactgatatctgtccagtgaaacaaagtcttcagactctacctactgacagctggtgacatctgcagaccaaggacagacatcacacaggaatttgtattttcaaactgacttcaccaagagctagataataaagatggacattataataaagatgtattttatcatgctacataaaaccactgccaaaaaaat

SEQ ID NO: 725984 - DNA, 636 bp, Homo sapiens
ttctcctgcctgcccccgcccccattctccagcaacaaagttttcatcactgctgctgctgctgcagtaaccgggtgcacagacacacactcccctgccgcccaggccctgggaccccccatcctgggactgagtgctgatgggaggggaatgatctctgagatggaaattggccgattttctgaacctatgaatgcccccacttcccctgcccgccccccaccattctccagcaacaaagttttcatcactgctgctgctggtgcagtaaccgggtgcacagacacacactcccctgccgcccaggccytggaaccccccatcctgggactgaatgctgatgggacccaggccagcagggtcacacaatccacccatgtccaagggatttgagtcagcttcctgggaaacaaaagagacagagagagaaagaacaaccaacttccaggtggcgcccccttccctgacccatcacacgggtctcctaaccctcccgtgttgctttgtcctggatgaagcatgcacagaagcgctgacttcccacgccttcccctgagctggcagggacaagcgtgtctcctgagggagacccactcggcctgtggtctccaggtgttcttatctaaagcaggagtc

SEQ ID NO: 725985 - DNA, 651 bp, Homo sapiens
atttaacttaactactcggtcagtactgaagcagttgttatggaggcctgygttagtgaaacctggccttccacactctgttttacatactcttacaaatccaagttctagaaaattgttttcaaataaatttatcttacgcagcagctgtgttctggattgcaagtggataaaatgaaactgagtggatttaaccatgcagcaccaataactaccaggtaggggcttcccacgtggaggtgtcaaacgaagttcgttccctgcactccctcatgcaatcctcaaggcaacatgtgagatttgcaatgaagaaattatacaacacgcagagatcacagagctagctaactgtgacgctgatgtaacctggaagttaccagtctttgaactggacgactgttacactgagccgtgaaagctgatggttctcaaaatgtggcccctggactagcagcacctgtccccactggaaacttgctgcaaatgcacatgctcaggcgtggatccgaaatttgggatggggcccagccatctgtgattggacaggttctccaggtgattctgatgcagctcaacctgagaatcatttctcttggggaagtggctttgtggaggaatgccactacagatccaatacaaagaatggccctg

SEQ ID NO: 725986 - DNA, 651 bp, Homo sapiens
atttaacttaactactcggtcagtactgaagcagttgttatggaggcctgcgttagtgaaamctggccttccacactctgttttacatactcttacaaatccaagttctagaaaattgttttcaaataaatttatcttacgcagcagctgtgttctggattgcaagtggataaaatgaaactgagtggatttaaccatgcagcaccaataactaccaggtaggggcttcccacgtggaggtgtcaaacgaagttcgttccctgcactccctcatgcaatcctcaaggcaacatgtgagatttgcaatgaagaaattatacaacacgcagagatcacagagctagctaactgtgacgctgatgtaacctggaagttaccagtctttgaactggacgactgttacactgagccgtgaaagctgatggttctcaaaatgtggcccctggactagcagcacctgtccccactggaaacttgctgcaaatgcacatgctcaggcgtggatccgaaatttgggatggggcccagccatctgtgattggacaggttctccaggtgattctgatgcagctcaacctgagaatcatttctcttggggaagtggctttgtggaggaatgccactacagatccaatacaaagaatggccctg

SEQ ID NO: 725987 - DNA, 651 bp, Homo sapiens
atttaacttaactactcggtcagtactgaagcagttgttatggaggcctgcgttagtgaaacctggccttccacactctgttttacatactcttacaaatccaagttctagaaaattgttttcaaataaatttatcttaygcagcagctgtgttctggattgcaagtggataaaatgaaactgagtggatttaaccatgcagcaccaataactaccaggtaggggcttcccacgtggaggtgtcaaacgaagttcgttccctgcactccctcatgcaatcctcaaggcaacatgtgagatttgcaatgaagaaattatacaacacgcagagatcacagagctagctaactgtgacgctgatgtaacctggaagttaccagtctttgaactggacgactgttacactgagccgtgaaagctgatggttctcaaaatgtggcccctggactagcagcacctgtccccactggaaacttgctgcaaatgcacatgctcaggcgtggatccgaaatttgggatggggcccagccatctgtgattggacaggttctccaggtgattctgatgcagctcaacctgagaatcatttctcttggggaagtggctttgtggaggaatgccactacagatccaatacaaagaatggccctg

SEQ ID NO: 725988 - DNA, 568 bp, Homo sapiens
ttagttgggattcatctatgtggaataacgtttgcctcatccactagggctgtttggttacctaaactatggttcatgccagaaaggcaggatagatgcttcattctttgcactcagttgttctcactgcgatgagttggtttctggaagccccagtgttgtcctgtgartttgtgtctttccctgcttttctctccctgtgaagcatcattgttaactggtggatgttatacacacagtggagtttggccagtgcagctgccatttctttactcaaactgttctgtagtttttgggctcccctcgctttctgatgtaaccacatcagtcttggatggctttattgccttctgtcgtatgtgttcccaccttaccttttatattttcttccacagaccacctggaatcaaactcttttgggagacctgtttttgttctaataataataataataatactatttgggaagtagtatttagagaccacagcgtgagtattaggagtgcttattgcaattgggttgtcattgattttttataatttagtgaacagaaataagaaatgtttg

SEQ ID NO: 725989 - DNA, 1071 bp, Homo sapiens
ggtttattcaaaggcagctggaggctggcccacccagaaacaccagctccagagaaatggagtccaccctcgggagtagggaggggaagggtgccctcgggcaggcagaggcggaggcttttagcaggaccgcggcgtccttcctacgaggtgggcgctgtcacagcgtttgatggacgacgggcagtgcctgcttcagggaagggtgcatttaacctgtcagagggtgcggcagtcaccgtttcctgtcttctggtccttgcttatcaggacaaaggggaagttcctctacaagggtcatgaactaagaaggcaggaggtttctgcccctggcattggttaattccctccagtcatcgtgcagaacaaggaaacagagtgcattagtccctggcctgagaaaggggagctgcaagtgcacgtgaggggcgcagtcccgtctctgacggggcgtggsggggggggcggtcccgtctctcacggggcgtggagggcgcagtcccgtctctcgcggggcttcatgtaccagaccgtgttcatgttcacacctgggaggaggggaagcaggcatggtctgtgcggcaggtccagccaacccacagggccttggatgagtctctgcagctgaggctggcactgccagggctgaccccaaggctgtggctaaattgggctcccagcactggccctgtgtcctccgtgaggagatctgcaccccaggtctatgcatggactgtccccacccccaggccccaagctcagctcccttcaacctgtgtgtcctcagggcaccttcactccatccacctgggtctccccatcttagtgaccgtctccactgtgggtgccaggaccctctctacttccatggctgtgcgtcagggccactgtgtgagctggaaatcagcgcagggaactctggagaggggagggagtcctggggaggggagggagtgctggagaggggagggagtcctggagaggggagccgataataacagggaagccccatgaggagggaccatgatggagcgaggactgagtgcaggaaggagggtgttctaggcccgg

SEQ ID NO: 725990 - DNA, 1122 bp, Homo sapiens
taagctctacacagtaggtttgcttttcacacaggtagggattagcaaccctgaagctgctttctgtgtattctcggatgcagcaaatagacaattacactgtggctggtgggggtctggtctccactctctgaaaaggtgttacagtggcgggaaggcagccaagcagacacacaggtgtgcatgggtcagtggtgttacagactgactgtgtccctcccgtgttcatatgtcaaagcccttaagccctaatgtgagtgcatttggagatgggacctgtaaggaggtagttatggttaaatggggtcataagggtggggttctaatttgacaggactggtgtccttctcagaggagacacagagattgttctctctctgcaagtggacagagaagaggccatgtgaagaaatgagaaggcagctgtacgcaagccagggagggaggcctcaccagaaaccaaccctgacagcaccttgaccttgaacttctagcttccggaactatgaaaaaattagtttctgttatggaagcctcccacggtatggcatttcattacagcagccccagtacactgagggatggtagctggaggtcaatagatgaataacaaaattagacggatgatagacagggatatcattgtccgtcttaaattaccagactcagaaaatatgattaagcatagagtttactggagcccagagcttaaggacagccacctgggagcacaggttcaagctgccctaaatcgaagctcccattagcagcagcctcygactcccgcccgagggcccccagcactactgtggaattccggccggaacacacagcctggacctggtcatgagaaacggccccacaagcccaacttgagatgcattttacagaataagtggcttaaacgtctcaaaaacgtcaaggtcaggaaaggtcaaattaaaggagacaaagaggtaagagaataatgtaacagtgagccagcaccattcctgcctctgcaaaggggaaggtgaggggattgttcccattatcaggggaaaggggttctcaggagacctggagaaacgcccaggcgtagcctggcctggggcaactggagccgaccactgcagtgggctc

SEQ ID NO: 725991 - DNA, 976 bp, Homo sapiens
tcttctaatttgattagtttgccaaacatttacctgttaaattagttatttattgatatgatttggctgtgtccccacccaaatctcaacttgaattgtatctcccagaattcccatgtgttgtgggagtgacccagatggaggtaacttcccrtgctattcttctgatagtgaataagtctcatgagatctgatgggttatcagtagtttccccatttgcttcttcctcattttttctcctgttgctgccatgtaagaagtacctttcacctcccaccatgattctgaggcctctccagccatgtggaactgttaagtcccattaaacttctttttttccccagacttgagtatgtctttatcagcagcatgaaaatggactaatacaactatatagtcatggcattgtgttttatatttatttaatataagtatatattttatgttttatattatttcatctaatgtgccatatgcctcagaaacttgattcgtaaaggtatagtgtctatttcaataaaaatatgtgtctcttcgccaaatcagcaaaacactttttagctattaagctcatattttatattattggatcttacattgcattgatagcttatgcaatgatacctaatgtaaatgacgagttaatgggtgcagcacaccaacatggcacatgtatacatatgtaacaaacctgcattttgtgcacatgtaccctagaacttaaagtataataataaaaaataataataaaataaagtcattacataggttaaaaaaaaaagatacactaatattctgtaacatgcattttttatgaccaattcattaatcttttaatatttatttatttagaaatataattgggagacatctgctgcatataaaactatttcacactaagtttttaagaatgcattcaacatatttaagaaatattttactaatatttaagaatgtattgatttttctaaatat

SEQ ID NO: 725992 - DNA, 1296 bp, Homo sapiens
agctgttcctatttggccatcttggctccagcccctttttacatgcttaaaacacatgtataacccatttatattttaaatttttttatattgttgtatgtataattttccagcaagtacaataatttgaaatgaagcagcaatctgtaagcactagttacaggattaaaataatgtaatccttattacagttgcacacttttaataccatgtgtgagctcaaagacatttagtgataaaycccaaatgaaattgctgggcaactctgaaggttccggtggaaaatgcatttagtaagtgttcaaagttagaaaaccatgaagaattgaaatttacctttgatgctgctctgcagggtgctggcagtcaggtaaaaggcaagcagagcctgtggtcgtcacattcggaggctgcgcattgcagagccattactggacactgactctggttggtttttttctcaattagatttgcttcaatagaagaacaggaaatgtttctcgaataaactgaatgcttttataaattaaaacctcatgtataagtagttcaagaaactcaactgtatttcttttatttttttattttttatttttgagacaaggtgttgctctgttgcccagactggagtacagcagtgcgatcacagctcacttcagtcttgacctcttggattcaggtgatcctcccacctcagcctcctgtgtagttaggactataggtaggtgcagtacgcctggctaatgttttctattttttgtagagatggggtttcaccatgttgctcaggctaatcttgaattcctgacttcaagtgattcacctgcctcaggcttccaaggtgattatagatgtgagtctctacactggtctcaacttcatttatttaattgaatgtttagagggagcaacttaactctcagcaaattaagatctgccaaatatgtatgtacacacatacacacataatttcacatataatagtctgctatatatgtttctggttcaaacttctttgtggatcccttttggatggtcaagaagtattttaaaccctcaattaaattaaacagtgtctttgttttaaattagcttcttcttggtcaattcagtctcttttgtctaaatgctcaggtttgtctttttaattgaaaaaaattattattttagtgtatctacacaatcattcctctcaagatagcatttgagtacaaagaaaaacaatgtgtgctgtgttaatgactgagtctcaagtccaggcttaagttttttgctgtttcctgcaccctttaatca

SEQ ID NO: 725993 - DNA, 1296 bp, Homo sapiens
agctgttcctatttggccatcttggctccagcccctttttacatgcttaaaacacatgtataacccatttatattttaaatttttttatattgttgtatgtataattttccagcaagtacaataatttgaaatgaagcagcaatctgtaagcactagttacaggattaaaataatgtaatccttattacagttgcacacttttaataccatgtgtgagctcaaagacatttagtgataaatcccaaatgaaattgctgggcaactctgaaggttccggtggaaaatgcatttagtaartgttcaaagttagaaaaccatgaagaattgaaatttacctttgatgctgctctgcagggtgctggcagtcaggtaaaaggcaagcagagcctgtggtcgtcacattcggaggctgcgcattgcagagccattactggacactgactctggttggtttttttctcaattagatttgcttcaatagaagaacaggaaatgtttctcgaataaactgaatgcttttataaattaaaacctcatgtataagtagttcaagaaactcaactgtatttcttttatttttttattttttatttttgagacaaggtgttgctctgttgcccagactggagtacagcagtgcgatcacagctcacttcagtcttgacctcttggattcaggtgatcctcccacctcagcctcctgtgtagttaggactataggtaggtgcagtacgcctggctaatgttttctattttttgtagagatggggtttcaccatgttgctcaggctaatcttgaattcctgacttcaagtgattcacctgcctcaggcttccaaggtgattatagatgtgagtctctacactggtctcaacttcatttatttaattgaatgtttagagggagcaacttaactctcagcaaattaagatctgccaaatatgtatgtacacacatacacacataatttcacatataatagtctgctatatatgtttctggttcaaacttctttgtggatcccttttggatggtcaagaagtattttaaaccctcaattaaattaaacagtgtctttgttttaaattagcttcttcttggtcaattcagtctcttttgtctaaatgctcaggtttgtctttttaattgaaaaaaattattattttagtgtatctacacaatcattcctctcaagatagcatttgagtacaaagaaaaacaatgtgtgctgtgttaatgactgagtctcaagtccaggcttaagttttttgctgtttcctgcaccctttaatca

SEQ ID NO: 725994 - DNA, 1296 bp, Homo sapiens
agctgttcctatttggccatcttggctccagcccctttttacatgcttaaaacacatgtataacccatttatattttaaatttttttatattgttgtatgtataattttccagcaagtacaataatttgaaatgaagcagcaatctgtaagcactagttacaggattaaaataatgtaatccttattacagttgcacacttttaataccatgtgtgagctcaaagacatttagtgataaatcccaaatgaaattgctgggcaactctgaaggttccggtggaaaatgcatttagtaagtgttcaaagttagaaaaccatgaagaattgaaatttacctttgatgctgctctgcagggtgctggcagtcaggtaaaaggcaagcagagcctgtggtcgtcacattcggaggctgcgcattgcagagccattactggacactgactctggttggtttttttctcaattagatttgcttcaatagaagaacaggaaatgtttctcgaataaactgaatgcttttataaattaaaacctcatgtataagtagttcaagaaactcaactgtatttcttttatttttttattttttatttttgagacaaggtgttgctctgttgcccagactggagtacagcagtgcgatcacagctcacttcagtcttgacctcttggattcaggtgatcctcccacctcagcctcctgtgtagttaggactataggtaggtgcagtacgcctggctaatgttttctattttttgtagagatggggtttcacyatgttgctcaggctaatcttgaattcctgacttcaagtgattcacctgcctcaggcttccaaggtgattatagatgtgagtctctacactggtctcaacttcatttatttaattgaatgtttagagggagcaacttaactctcagcaaattaagatctgccaaatatgtatgtacacacatacacacataatttcacatataatagtctgctatatatgtttctggttcaaacttctttgtggatcccttttggatggtcaagaagtattttaaaccctcaattaaattaaacagtgtctttgttttaaattagcttcttcttggtcaattcagtctcttttgtctaaatgctcaggtttgtctttttaattgaaaaaaattattattttagtgtatctacacaatcattcctctcaagatagcatttgagtacaaagaaaaacaatgtgtgctgtgttaatgactgagtctcaagtccaggcttaagttttttgctgtttcctgcaccctttaatca

SEQ ID NO: 725995 - DNA, 1177 bp, Homo sapiens
tgcaaatattagctacaggccataatttagacacccattatgactttaaactgctaaaagctgctcttctgtaatatgtttgccttatttattaatgtaaatcttacctaaatgagagattttagttaccagttttaaaagtaaaaattacataattaatattatgagatgattctttatagtaatcacraccagatttttttaatgagaataatcacatcgtatacattaatacttagtaccttgtaatatttgcttaaagtagccattgactacaatgatgggaagacttaaatgggtttttccctccgccaaactcctcttctagataactttaatgagtgaggcaatcagagtgctgaattctcaataatacctattacctaacatcatcataaatttaacaatacggtgatatcttgcttattgaataatctggtaacaatatccctcttagagaagagttttcaaaggtctttttatcagttccttggctgataacaatgtggcactcactggcgctctctgaggtggtgatctttgagtagttgatccaggtcttctgtgagacttttggttattttttcctctggtattgatactacagaaaatgaccaaagcatctgggatacatctttgtttttagagccattaatataagaacaattcctatttgtatgttactccacattgtatgtaagtagtaacagggcctttttttttttttttttttctttgagacggagtctcactgtgtcacccaggctggagtgcagtggcacgatctcagctcaatgcaagctccgcctcctgggttcacgccattctcctgcctcaggcttccgagtagctgggactacaggcgcccgccaccacgcctggctaattttttgtatttttgatagatacggggtttcaccatgttagccaggatggtctcgatcttctgaccttgtgatctgaacagggccgtttatataagatgtgctccagaggataccctaaatttaagtgtattgtattcagaaaaatgggataattgtaatgtcaaataatgatcatgcagcataaaatatcttgtacttagtttaaaaattaataatctattcttaattttttgttatttcttactccttagccagacaacgcagttaaaatattttgatttaagtacaca

SEQ ID NO: 725996 - DNA, 865 bp, Homo sapiens
tacccaaagcagaatgctgattttcttatttttaaatatttgaacacttgatatacatatatatatgtatacacacacatatatacatacacaaatttaacagtaagattaaaatccaaacaaagcaaacttggatgaaattttagcacgtggattagtgaaaagaaagtaaagaacagaaatgctgaggcaaagatttttagacataaatagaattagtgtctccttatgttaaagctctttcggattttacaatttcagaaagttcattgacaggaagatattatagagagttgtatgtaagaggtaccccattatctactttagtgagtggatgaaaaaagactgacaagatgaaccgggcggaggcagtttccacttctagttgcctggggaggaaatatatactggtacaaacagaaatgctgctaggttgtttagcaaactgactacagtgtcaagactatccagatgctgaaacttcagtgaaagtgggaactcagagagagcaacagaacaccagagcctcattttgtcttgagtgctctttccaaaccagaaggtgagcccagctctcaaggcccataggatcccagcagactagagacaaaggccaaggctttcagtgtgtccatatgtgtatatagcaagctgggatccaaaacatcctcagcgtaagaaygaactagacaccagacacaaatgtgcttttctagggacttctgtgaaaattgcctgtcttaaaccctgatggaaattgggagtaaaactaaaaaatctcatggaatataatttaaaatggctccgggctggttatacactcaggtacctggcaagagaaaacacacatcctttttggaggaaa

SEQ ID NO: 725997 - DNA, 1386 bp, Homo sapiens
tgtaagtttcctgaggcttctccagccatgcttcctgtacaccctggggaatcatgagccaattaaacctcttttctttataaattacccagtcttaggtatctctttatagcagtacaagaatagcctaacacaaaattcaactagcactgratttacctaccttatcccctacaatgtataagccaggaacaattcaatacttccaattagtttttgagtaattttcactatctcattttacagacagtgagactgaacttgaagcttcctacatgtgtacctttttttttcatttaggggaagcaaactgagtgtggtggaaagaacacaaactttagaatcaggtacatttttgttttttttttttaaaccactttctgtgtttctcagcactagtaatgacgctaaacttcaactttctcagctgtcaaaggaaataaggaagctgaccctgaagaaataatgggggctaagtgggagcgtgtacatagaagccctcactagaggagttgactctccaggaggtgaaagtgagagaaagacacacatcacctgctgtacttccatttggagcttggttcttaaggtgggtgaacagagtagataaagaaagattacaaaatcttcctacatatgtaatttcattctgttcattcagagaattaaactgagccctcactaggattgagtcatgcttcctggttttgaaactgtcagaatgcttgagaaaacaacaacaaacaactattactggtgggtgaagaaacgagaaagttcttaatgaggcaaaaacaatgactgctagagcaagctctggtcccacagagcactaatggtccccacgcattcccaggctcctgctgtgcagtgggccccctgggcctcacgtgtaaaagcaaaaaggaaagaaatagaaccatgaaatgcatagtgtatctatgtaagcattttatccgtagcctcagaaaaaaaaaatgagaagaatgaataggaggtcggttaactgtagtaacttcaagtctatgttcttcaataaggatccaggtggtccctgtgtagaaaataataaagaaatgcatggtctactgttgtataggcttctgggaggatttgggaagtgtgagaattacaggctctgctgcaaccttgccaggtatcgacaaggttgcccaagaacccttgtgcaaaaactcaaccagactttccaaagcccctgcagatgcctcactggcattcagctttgttgaaaacaaaacaatcaaaaaagtagttcaagtttgctattacagccttcttgcctcccttccctcacacaaaatagccctgagcccagccccatggttgtgagagcctgcccacctctcactttgcacttctctgtcc

SEQ ID NO: 725998 - DNA, 840 bp, Homo sapiens
tcgaggctttgcagatgaggtaggacttgaggtgcacttggaatgatggcagtgtgcttattttccaacatagcttatgcacgtagaaagaaaaaaaaaagattctgagtttctacagagttttcaaaatcccccagttcatggacccttgctggtactttggtggtggaatgaaacaggtctccaaactcttcacacaggatcctttgtatcaacaccacccagaaaacattgcttgtcttttccttgaagacatgttccatttggggaatttttttttcatggcatcacaatctccaagccaaagactctagtcccaagattctggtgtttgtctttcagggtggaaagctcagagtgtcatcttggcccactattcagcagacagaacaaagaagaagagagatccagcagactccctaaaattattgtagtagctcaaacacaaactttacctaaacactgattgtgttagtccaatcccaccattaatcttctgccaactgcatttaggaggtgaaaggctgctctttgatactcagtgtccctccctatgctgctgaatggacaaaggagaagatatgagaaagaaacaatcactcagttgcggtggctcaygcctgtaatccctgcaatttgggttgccgaggcaggtggatcacctgaggtcaggagttcaagactagcctggacaatacggtgaaaccccatctctactaaaaatacaaaaattagctgggtgtagtggcaggcacctgtaatcccagctactcaagaggctgaggcgggagaatcgctggaaggtggagaatgcagtgagccgagatcgcaccactgcac

SEQ ID NO: 725999 - DNA, 655 bp, Homo sapiens
cactcgtcttttccagactttggactcagatggaaacatccactcttaggtctccagcctgcctgcttttggactgcaactatatcatccactctcccgggcctccagcttgctgtgtacagatcttgggacttgtcagcctccacagtcacttgagccaactccttattctctctctctctctccatcctattggttctgtttctctgaagaacccagcctaacttactcctccctgyattcaggccgctgtgagatcttcccatgtccatgggaaatagcaggtccctccacactacatatcttgccctgccctttcccttcatacctgacaaattccagcatcacataacacctgtgtttacatgttatagtctgttgttcttactggaatatcagcttcctgaaagcagggccttggttcattaatgcatctcctgtgcctgtagcaatgccaggcatactgtagacattgacaaatatttgagaaatgaatggatgactggatgaatggtagcatgggagctgggacctgagacttctgttatcaacggagttccaaagactgtcacttgctttctggtcctatacatcaggaggaaaatagagtttgcagaccaaaacacattcctcagcaatgaaatgggttgtggca

SEQ ID NO: 726000 - DNA, 655 bp, Homo sapiens
cactcgtcttttccagactttggactcagatggaaacatccactcttaggtctccagcctgcctgcttttggactgcaactatatcatccactctcccgggcctccagcttgctgtgtacagatcttgggacttgtcagcctccacagtcacttgagccaactccttattctctctctctctctccatcctattggttctgtttctctgaagaacccagcctaacttactcctccctgcattcaggccgctgtgagatcttcccatgtccatgggaaatagcaggtccctccacactmcatatcttgccctgccctttcccttcatacctgacaaattccagcatcacataacacctgtgtttacatgttatagtctgttgttcttactggaatatcagcttcctgaaagcagggccttggttcattaatgcatctcctgtgcctgtagcaatgccaggcatactgtagacattgacaaatatttgagaaatgaatggatgactggatgaatggtagcatgggagctgggacctgagacttctgttatcaacggagttccaaagactgtcacttgctttctggtcctatacatcaggaggaaaatagagtttgcagaccaaaacacattcctcagcaatgaaatgggttgtggca

SEQ ID NO: 726001 - DNA, 619 bp, Homo sapiens
tacactcagcacttttatgtcccttttctagcaaccttacagatgcccgcaaaagaagcctcctttgatgacatgtaaggccttccgcgatctaaccctgaacaatcttgaccaccttgcctcctactccatctctctgggctctctgaattccagtcacactgaaattctcgggatttttggcacaattgatgtcatgcctctgtgattttgctggcgctgtttcttgaatgaatcatgtcctttcccctctcagaccatcgacattcttcttctttttttttttgagactgggtcttgctctgtcacccaggctggagtgcagtgacacagtctcggctcaatgcaacctcggcctcccgggttcaagcaattcttctgcctcagcttcccgagtagctgggactacaggcatgtgccaccatgccctgttcatttttgtayttttagtagagatggggtttcaccatattggccaggctggtcttgaactcctgacctcgtgatccgcccacttcagcctcccaaagtgctgggattacaggcgtgaaccactgcacccagctgacattcttcttaatccttcagtgtgcacactctgcacagtcaggtccatcat

SEQ ID NO: 726002 - DNA, 581 bp, Homo sapiens
aggttcgttgagttgattagatcatattgtagacctaatagataataaagttaagatcacagtatatattgttaatcttggctgagatgtcccaaatgaatacacttggtcacaaagggatcctaattaggagaatataattggatcakaaaggagaaggtaaaggaaaaaaaattccaattagagtaaactcgttggatacaacatagaaatgaatttctcctttcactgatgagcggatgagatacagaagcatttagaggtagtacaaagctgtttaaaaagttggctttcaaaatcataatgtctgaccatagatgtctcatatatatgcataagcaatagaaaaagaaaatgctgtcaaatccagatatgctctaataaggaaatacaaaggccatttctcttcaagtgtataattattaaaacagatgacatcatcaaggtcttcagaaactgtccatgctatgcctcattccatagtgaaatattttagtatcaaatagactttctctgccttagataatttgatcttgtttttttacccatatatgattgccaaactaatgaagtatttggtg

SEQ ID NO: 726003 - DNA, 581 bp, Homo sapiens
aggttcgttgagttgattagatcatattgtagacctaatagataataaagttaagatcacagtatatattgttaatcttggctgagatgtcccaaatgaatacacttggtcacaaagggatcctaattaggagaatataattggatcataaaggagaaggwaaaggaaaaaaaattccaattagagtaaactcgttggatacaacatagaaatgaatttctcctttcactgatgagcggatgagatacagaagcatttagaggtagtacaaagctgtttaaaaagttggctttcaaaatcataatgtctgaccatagatgtctcatatatatgcataagcaatagaaaaagaaaatgctgtcaaatccagatatgctctaataaggaaatacaaaggccatttctcttcaagtgtataattattaaaacagatgacatcatcaaggtcttcagaaactgtccatgctatgcctcattccatagtgaaatattttagtatcaaatagactttctctgccttagataatttgatcttgtttttttacccatatatgattgccaaactaatgaagtatttggtg

SEQ ID NO: 726004 - DNA, 581 bp, Homo sapiens
aggttcgttgagttgattagatcatattgtagacctaatagataataaagttaagatcacagtatatattgttaatcttggctgagatgtcccaaatgaatacacttggtcacaaagggatcctaattaggagaatataattggatcataaaggagaaggtaaaggaaaaaaaattccaattagagtaaactcgttggatacaacatagaaatgaatttctcctttcactgatgagyggatgagatacagaagcatttagaggtagtacaaagctgtttaaaaagttggctttcaaaatcataatgtctgaccatagatgtctcatatatatgcataagcaatagaaaaagaaaatgctgtcaaatccagatatgctctaataaggaaatacaaaggccatttctcttcaagtgtataattattaaaacagatgacatcatcaaggtcttcagaaactgtccatgctatgcctcattccatagtgaaatattttagtatcaaatagactttctctgccttagataatttgatcttgtttttttacccatatatgattgccaaactaatgaagtatttggtg

SEQ ID NO: 726005 - DNA, 644 bp, Homo sapiens
gagggaaatactgttgttagctcttaactttccacaaagaaactaaggcacagaaaggttaggtaaccacagccacacagctatgagatagcggtggagccgtgatatgtctatgcttaatcctgtactcygctgcctctcccagcttaatgtgtgggaacgccttctagatgggccttgagaccagactccacataaatgtctgtatgtagaggcctgaaaattgtaactcagccaaaagtctagcctacttccctgctagtgatctcagttgctagtaaaataactacagtgtgcacaagtggaaaagagagaaacctttcacatggaagaagaaaccaaggtgatcacttcctgttttgcctcttctgggctttgagcagaatggttggtatcttgacaagtgagttgcccaatgagtataatcttaacctgtattccttccagtacatgcaacagctaaatattcttatctaggaataacatagtcctaggaatggttcaattcacactccccaggtttaagtctgaaaatatcctgtattataatgtcataatcatcctggagccacatttttaagagtgtgaaggcttttccagaataaagaccctgaaatctttcaaaggttcttcagaatcacaca

SEQ ID NO: 726006 - DNA, 1984 bp, Homo sapiens
tgacctctgtgtaggaactcccagttaccttctccctgtggctacttcctgctgtcccatgatgggctctgctctggtctcctcccctcatttgtcttgagctcatctctccatggaccttcaaggattttaacccaaatttctaaagtttctctagtctagatcaacttcctacattcactcttggacaccttcagttcatttaccatgctgccactggagatcctgctgaaaggcaattttgaacatgtttctccctttatcaaaatcactgttagggtggtaaaacaactctttatgatactacaatgatagatatatgtcctctgcatagaatgtacaaaacrcatagaacatacgacaccaagagtgagccctaatggaaactatgggtattgggtgacgatgatgtgtcaatgctggttcattgactgtgtaacaaatgttccactctggtgcaggatgtcaatggtcaagaaggctaatggaggacattagggggtatatgaaaactctctgtactttctgctgtcatttgttgtgaacctagaactgctttaaaaaaatgaaagctactaaaaagctactaacactcaatgacttcccattgcattagacataaatgcattactgttgttagcaccacagtgggcaagatactgagcccctagacatgctgcttcctttgcttggtatgttttcttctctcctcccgctgccatctgtaattcttactcagctcagcatacaccaacacaagaaagctttctttgactccccagactgagccaggataggtccctttgataaaggcttcagagccaattaaactatacattgtgtaatgaattgttgaatgtctgtcttccatcagaagggagagtccatcagagcaggacaatatctgacctatttatggctgtgtccccagcatttaatgcagaggcactcaatacatatttgaggaatacctgaatgaagcaatttaatatttacaaaaagtggccacattcattttctgtttaatctgctcgtatttggaagataggcatatttacttcattttataaataaaaaacccctgagacttagaaaagttagatgactctgtaacaggtggtcgagctaggattaggatttgtatattttaaatttaagtcgaacattctttccactaccctggacagtgccaatctccaacatttaaaatgtatcagtcacttaaatgtattatgcacatttcttctaactgaagcatttgtgggtggtcagagattttacttatatttattagctaacacatcatgattttagcaaggtctccacctcctccatgcaagcttcaaccacttcattcttagctatatgcctagaaacacacagaattgcatgcagagtgtatatgtgcatgagtgaatacacatggtatattggctatatggtttataatatacaaacgtattctaaacatcctgtgtatatcctatagattaacatttgccctgcagacctcgttaagtatactcagcatagcagagggcttcttttttataagataaaaaatgatattctgagtatgtttagacatactggagaaggagggaatgtctggaaccctagtcccacccacgagggttcaagaagaggccagagcaataggagctttgccatgggcccctttatggagattgcaacaatgaaagactatcgaaagtgaagataatgaactcttagatttaaaaataagctagtactggagatgagttagttatttattccaaagaggacacgcaaaccaaagaagatattcctccatgccgtgcaaaaaaagacaatgcataggcaaatattctaaaacaaataaactttgaggataaacaaatattaaatcatttaaaaatctgttagggaaccttttatgagtcaagttccgtgctcaatgtcatgagtaaagtatgagtcattaaagtcatttccactcaag

SEQ ID NO: 726007 - DNA, 605 bp, Homo sapiens
gtccttcctgcatttgaagaaagcttttagaaactttcagttttcatgatgcttgccctttctattcattgtttctccaaacaatcaaaatgtatttttagcattttgcctagattacagaatcagaatataaaatgtcctgaatcctaacatccccaaatcatcactgtaaatgtttgactgctgcctgtatgtttagtttcagaagagcccatagccttgctgagattctatcatgctgtaagactactccatcctagatttacggtttccttcaatatatggggtcagatgacaactacccactaaaagtcaagtattaatattttcttttacaaatccttgatctacattttgtggtacacacaataaataaataccagaagctggaactatggcctcyatcccctgtagcactcctgcagcacttctgtgcagtcttggtttagaaactattggggacataaaagaaggaaagagcatctgccgccaagaaacacacagtttacttgaggagtcatggtacctggaggacattatgctaagtgaaatgaaagaaaaatattgtatggtctctcttatatgtgaaatctaaaaagtctaac

SEQ ID NO: 726008 - DNA, 1227 bp, Homo sapiens
attcatagaattggctttgtagtaaattgccaaagtcttggataattttttgagaaattttcaagcaaatctaataaacaacccggcaccatttataaagctgacttaattttgttaggtgcatttcaccattcagcctaatcatattctaaacaagaaataaatatctgcaatttgtatgcttagtctttttcttccaattttctccaacaacactggtcagtatttcaatgacttttcttagtgttgatattttaggcagtagttactttgttactgaattctgcaatgaytaatcaccatcactctgaaactatccttccttcatcatagtcttgagtcgcttaacagtgggaatatgtttgaaaacgtattctttaggtgattttgtcattgtgcaaacattatagaatgtaaaagatttaaaaaacacaaaggtacgcctatgtaaggtacttactgtgactgaagcgttcaggactaaatgttgctctgggtgagtgagtgggtgagtgagtagtgagtgaatgtgaaggcctaggacattgctgaacactactggagactttgtaaacactgtataatcaggctacagtacatttataaacaaatatttttaataataaattaaccttacctgtaattttttactttataagcttttaattttttaactttttgattcttgtaataactttcagttcaaaacacaaacacactgtatagctgtacaaaaatattttctttcattatatcattattctataagcttttttccattgcaaatttatttattttactttaaaactttttgttaaaaattaagacacaaacacacgtattagcctagacctacaaaggatcaagatgattaagatatcatcaggtgataaaaagttttcagctccataataaatcttatggaaccaccatcatatatgtgatctgttcttcaccaaaacattgtttggtgcataactgtactatagttgcttattttaaaatcactctttcattcgactgtatgttctgtgaaatcagacaccaactatatactcttcactgttgtatcctcatttcctcatttattagtaacttctttattctggacacattattgagcatgtgctattgagctatgctaatcctgaaaaggagcagtttgaagcaatcatgtcccagtcctcctggagtttgcaattatttcctagcacagtactgagcata

SEQ ID NO: 726009 - DNA, 568 bp, Homo sapiens
cttttttccaaataataaatattttcttgtggccttaatcccagagaaggtaaattttaattgataaactacatatgtaccttaccactaaatcaaagataaagtggataataacttcgaaactccatcaaataatctcaactaggtaactaaaacagagttagaaagcttccactaaaaatattcgaatatctatcctaagaacccgttagtaaaacttaaatagcctggagattctggataatggtcrtaaccataactatagaggcctatgagtaaggatcttggtttttgatataatgagtcttacactatttaaaatgttatatgcacacacatgtgcatgacaagaagaaatcaagctacatggtcactggttttttatttttatttttttcattataatggccacctgtactaggagagaaagtccctgaaagcacaaatgttttaaatttgaagataacctataagatacctccagtcatcaaattctgtcttggatctaattattctaggagaagtcattcgcaatgtctctgaagtctgagatgctgaagggaggtgg

SEQ ID NO: 726010 - DNA, 568 bp, Homo sapiens
cttttttccaaataataaatattttcttgtggccttaatcccagagaaggtaaattttaattgataaactacatatgtaccttaccactaaatcaaagataaagtggataataacttcgaaactccatcaaataatctcaactaggtaactaaaacagagttagaaagcttccactaaaaatattcgaatatctatcctaagaacccgttagtaaaacttaaatagcctggagattctggataatggtcataaccataactatagaggcctatgagtaaggatcttggtttttgatataatgagtcttacactatttaaaatgttatatgcacacacatgtgcatgacaagaagaaatcaagctacatggtcactggttttttatttttatttttttcatyataatggccacctgtactaggagagaaagtccctgaaagcacaaatgttttaaatttgaagataacctataagatacctccagtcatcaaattctgtcttggatctaattattctaggagaagtcattcgcaatgtctctgaagtctgagatgctgaagggaggtgg

SEQ ID NO: 726011 - DNA, 932 bp, Homo sapiens
tcgcccaggttggagtagagtggagtagaatgtctcactgcagcctcaaactcctgggctcaagcaatcctcccacctcagcctcctgagttgctgggaccagaggcacacgctaccatgcctggctaactttcatgatttttagtagagatgcggtctcactgtgttgcctatgttagtctcagactgctgggctcaagtgatcctcctggctcagcctcccaaagtgctaggattacaggcaggagcctctgcatccactcccatcacttctgtaaattgcagtcaaggggcaatttacccagaagtaggaaccactggaagcaccattatagcagctgcctcttcaggaggggaatttgattctgtcctacaaaatgacatatgcatgtgttttttgacccagcaattccatttctagtagtctaagccaaagataacattggcaaaaataaagatatatgtccaaggctagtcattatagcccactgtgtaaatagcaaaagmctggaaataactcagacaatgtccatctacagaacattggcaataaaccaaggtatatctacattggagtgctatgcagctgtgaatagaaatgagtatctctatactgctatggagtgaactccatgatgttttgctaagaggaaaaaaaaagtggaaaactgtatatataatatagaatctttgggctgggtggtggctcatgcctgtaatcccagcactttgggaggccggggcaggtggattatgtcaggagatcgacaccatcctggccaacatggggaaaccccgtctctactaaaaatacaaaaaaattagctggccatggtggtacgcgcctgtagtcccagctactcgggaggctgaggcaggagaatcgcttgaacctgggaggcagaggttgcagtgagtcacgatcacagcac

SEQ ID NO: 726012 - DNA, 1622 bp, Homo sapiens
ggagtctactttttaaaattttcttctatgtcagggtcacatgtttaacaacttcttattttcatcatgtaggaccctttatttcttttccagtgaaaccatcccaagttatcccaggtcaattggtgcattagttatctattgtgaaagaaattaccccaaatcttagcagcttaatatgacacccattttattatcttatagtttccatgggttaggaatctggccatggctgagctgggtgccactgtccccagtctctctcaaggctgtaatcaaggtctctccagggactgtaattatctygaagctcacccggggcaggatctgcctccaagctcactcagtggttgtcagagggctgtattttctcatgggttgctggtctcaaggcctcagtttctcctgggctcttggccaagccaccccccggtttcttgctacataagcctctctacagggcagttcacagcatggcatctggcttcacagaagtgggcattagaatgagaaagtttcagccagatggaagtcacagtcttttatgatctgatctcagaggtgacatctcattactttggccatattctgttcattagaagcagatcatcaaatccagccaacggtcgaggggaaagtatcacacaagagcatgaaggccaggaggcaggatcactgggacacattttagaacaccacctgctacaatgagccagggagtatgtggcctgctctcctttcaagcctatctgtgtttcctctgtgcacaaaactcccccttattcttgagctagtccctcctacccactcctcccaaaacgtaccagtaaaatcttcctcttttcccctttgagtaaacatcaaagggctctattcttttttaagttattttgtatctacgttttcactttccccttaccatagagtggccattattgtttctagaactctagggagattattttgcttgtggcctctggcaacagagccccgggcaaaagtttgggttcccctttccttctcagtgaactcagatcaccagagacattgcagttctacctagaatcctgctttatactattggaaggatcatgtgggtcaagagatgtacaagctcatgactgttttaaggttgccaaaattaaggatgccactgctttctgggctagagtggtgttgattcttgtaattgcattaagagggaaatttcaatatttagatatgatatatagttttcagctcacaaacacaggtaacattcatggatgttctgaactgatcagggctccagaactggtgtagcgaaatgatgaggtggacacaaaaggaatttgccttttgcctccagccaacagtcacaccactgttgagtgacaagggggaattcttcccacaagctgaggggatgttctgatgttttttaataaccctccctggggcagagattgctgcccacaatgaaatttcttaataacctccccatgctttaatcctataaggcccatggcaaatttccattagatgtttcttccaattcaattgggaaacaagggacaaatctgtatatgcaaattaaggagacaaacttcctaaacaaaggaacttcaaagaaagaatacgta

SEQ ID NO: 726013 - DNA, 854 bp, Homo sapiens
aaatctttacagccatcctctgaccttgagttctaactcagaatggtgttactgtctagatctgaaactccaagaccccctctaagtatggcgattttttgttgtcttcatttctcttattcatacaaactatttctttatctgtagcctggccttgctttctccaccttcgatactgtctgaacagtctctggtcatttctcctgcctcttacccaggttggaccctgaatactttcaacattatcccaactgaaccccattgcatctgggctatttttcagccttgctgttcccatgctatactgacgttgctttctgaatgacagaggagggtaataaatgagaagaaaaggccccttgtgccccttctatttcttcctatgtcctctccttctggtaatcttcaaggagacagagttgggggaaaccttctcattaggcacttttcccaagtcaggaaagagtctgtaacctaacaaaggggctcatctaaaatgttctgcatttcacttacagtgcakgaagacagacacatttaaggatacctgtaaaaaaaacaggcaaaaatgaagctccatttacaaggatctagaggaaaaagctatttctaatctttcttcataaattcactgaggtgttgacagaatgaaaactggcaatgagatgtggaaagggaatgctgtggcgatgatggtattctctctaataaatagttcttcacatactcctagggatgctgtttattttcttcatggcctcgggagacgattgattatcatgtcaatttcagttcacttccaccatcactttgtgcgtgagcaccatgacgggcgctgagagtcagtgatgctg

SEQ ID NO: 726014 - DNA, 602 bp, Homo sapiens
tgaatttagactttcatttgatcaactgtttaaccaaggatccatctcacccctaaaagttaccaacatagtaacattgaatcctcataaaatgagaaagtgatgtgaaatgattaacagcagacacaagctgccagytgccatgtgggcttcctcctgtacacagaaggttctgctaagtctaccatgcctcaaaaatcataatagaaactcaagttgtttgcttttctgtagttataggtgctcggaatgggcaaaatttttcttcctagtgtaactctatgctaatttgtcgaatgtagctgctctaggtatagaatagtgtaaaaatacaatctcagttcaagtttactgggtcctgaaaaatcaatttggaggaatctgttacatatttcgaaggcaaggtagtcactttgcgataagcactcttgaattttgagtgttatttcactaaaggtattttacattacagtatatgatccaaactacaaatagaaaatagcaaaacataaatgtcccagaattttacaattcttaagggctgttttatgtgccatgaatagaaataatgatgctgtttaatgaagtaattttacaaccta

SEQ ID NO: 726015 - DNA, 602 bp, Homo sapiens
tgaatttagactttcatttgatcaactgtttaaccaaggatccatctcacccctaaaagttaccaacatagtaacattgaatcctcataaaatgagaaagtgatgtgaaatgattaacagcagacacaagctgccagttgccatgtgggcttmctcctgtacacagaaggttctgctaagtctaccatgcctcaaaaatcataatagaaactcaagttgtttgcttttctgtagttataggtgctcggaatgggcaaaatttttcttcctagtgtaactctatgctaatttgtcgaatgtagctgctctaggtatagaatagtgtaaaaatacaatctcagttcaagtttactgggtcctgaaaaatcaatttggaggaatctgttacatatttcgaaggcaaggtagtcactttgcgataagcactcttgaattttgagtgttatttcactaaaggtattttacattacagtatatgatccaaactacaaatagaaaatagcaaaacataaatgtcccagaattttacaattcttaagggctgttttatgtgccatgaatagaaataatgatgctgtttaatgaagtaattttacaaccta

SEQ ID NO: 726016 - DNA, 602 bp, Homo sapiens
tgaatttagactttcatttgatcaactgtttaaccaaggatccatctcacccctaaaagttaccaacatagtaacattgaatcctcataaaatgagaaagtgatgtgaaatgattaacagcagacacaagctgccagttgccatgtgggcttcctcctgtacacagaaggttctgctaagtctaccatgcctcaaaaatcataatagaaactcaagttgttkgcttttctgtagttataggtgctcggaatgggcaaaatttttcttcctagtgtaactctatgctaatttgtcgaatgtagctgctctaggtatagaatagtgtaaaaatacaatctcagttcaagtttactgggtcctgaaaaatcaatttggaggaatctgttacatatttcgaaggcaaggtagtcactttgcgataagcactcttgaattttgagtgttatttcactaaaggtattttacattacagtatatgatccaaactacaaatagaaaatagcaaaacataaatgtcccagaattttacaattcttaagggctgttttatgtgccatgaatagaaataatgatgctgtttaatgaagtaattttacaaccta

SEQ ID NO: 726017 - DNA, 602 bp, Homo sapiens
tgaatttagactttcatttgatcaactgtttaaccaaggatccatctcacccctaaaagttaccaacatagtaacattgaatcctcataaaatgagaaagtgatgtgaaatgattaacagcagacacaagctgccagttgccatgtgggcttcctcctgtacacagaaggttctgctaagtctaccatgcctcaaaaatcataatagaaactcaagttgtttgcttttctgtagttataggtgctcggaatgggcaaaatttttcttcctagtgtaactctatgctaatttgtcgaatgtasctgctctaggtatagaatagtgtaaaaatacaatctcagttcaagtttactgggtcctgaaaaatcaatttggaggaatctgttacatatttcgaaggcaaggtagtcactttgcgataagcactcttgaattttgagtgttatttcactaaaggtattttacattacagtatatgatccaaactacaaatagaaaatagcaaaacataaatgtcccagaattttacaattcttaagggctgttttatgtgccatgaatagaaataatgatgctgtttaatgaagtaattttacaaccta

SEQ ID NO: 726018 - DNA, 1846 bp, Homo sapiens
cggagtttcgctctgttgccaggctggactgcagtggtgcgatctcggctcactgcaaccttcgcctcctgggttcaaacgattctcctgcctcggcttcctgtgtagctgggactacaggcacgcgccaccacacccagctaatttttgtatttttgtagagatggggtttcaccgtgttggccaggatggtcttgatttcttaacctcgtgatctgccttcctcggcctcccaaagtgctgggattacaggcctgagccaccacgcccagccagtcatagctcttttaacctgtctttttcccttctatttctcttctccctcttctatatctgcttaccttctgtttcccttcactttcctctcatgatgtctgaccactgctctctttcttttatacagtgtgttgtgctgcaatggggctggaattggcaaaggtgctgcggaactgcaccgggaggagggtttctgtagcctacgtgtcttgagcaaaatcgtctcttagataggctcgaagcaatatataacccacctccctgtaaccctttggctacataatggttgtaaaaatctcatgaacagtggccagccatgtgaatcttcatcttcttccaagatacttctgggtctggatcccaaaggccctgacaactcaaagtacacaaatgcccaccatctgctgcacccactctacatcagagcagctgcatgcccccactggcatcagccctcttggtcgcgtgcattgcgggctgcagagtggctgcaggatgctgctgagcgatggcctcaccttgaggtctctgtggacgatgcccattctgtggagatagtacacggcgtccaagacttggcggatcagagtgctggcatccttctctgtataaaaccccttctccactatccggtcaaacagctctccaccggacaccctggcaaaaaagaacatattagaagtttgaaaggatctgttgaattgtgaagggaaagcttccaatgtgaaaaaaatcccaaactttattgcaaaaatgaatccatcttcagattgagatgttgcccccctattcctcagaggctatagccaggaaatgtttccatgtcacagcagagcaaatgtctggaaccaagtaaaggaaatttaaaaaaacacgatccacagcccagccacacctgggttctgtccaggcctctgcctctgttctgctgtgatgatgtaaagtttaaaaaaacccttcctgaataccagcgtcctcggatacaggaagatgaccctgaataaaatgtctcctttgcatgagacagtatccttaaatgaccgagagtgttgtgggcaaaacgctggcctgccaacgggatgtgtgggtttttgaccaagttctgctcctaatatactgggatacgaacaccgcctgaatccctggaccttgatgtttttatgtgtaaaattaggggatgaatctagtcacccatttcaacagtgggtgggagcmtgccttcggaatgatcagaacctcaaagccacttgtgatttatgaaaaagcaggcaagaaatcaagactatatttcattactttgctttggttttagtgatgctgtatcctttttattagctttgcatttcagattgcatttaacatttttaaacatttttcaaaatgggactaggttggcaagggtcaagaagccctgtgggggcaacctctctggcacctttcagctctgatattttatgctgccctgagttcaacaaaataatggaagtgtacaagccagaatacaaacaactcaactagtgttctccaaatcatctcaaatcattaagccatcttggaaataaatttcaag

SEQ ID NO: 726019 - DNA, 586 bp, Homo sapiens
ttttttcactgagttagaggattggtgttaattcagggatcactgcacttctagaagttgatgtggggcgtgggattatgatgagctcttggaaaccaggggttccagccagcacagtgttggggcraggacctctatcctcaaagccacccagcaggggacttgaatgtaagcgtcctcctctgtctgccattgattagatatgaaggaggcctgtgcctttcacttaaacttggggattctcagtttcttgtatataaaataaatgtgctgggctaaatatctcctgtaaattttttttctggttttaacattgtgtgtttctatagacttgtgagttggcatcctttaagtatgtaaatatctacgtgtcaaggatactggccatcattgttcctgtcttcactccgtacagccaagaagaaggattcagtcaatggacctccccagcgtctgtcttctgagtgatctcgattcttttcatctttccccatagcgcctctgttcccagtcctttcgtcttcactcctcgatgtggttgctccccaacagagcttgctttttatttgtttctcacttaaatacc

SEQ ID NO: 726020 - DNA, 1730 bp, Homo sapiens
gcaccactgcactccagccagggcgacggagcgagactccgtctcaaaaaaaaaaaaaaaatgtaatacaccaactatttttcttttaatgtaatgatcctcccacttttctccatcactttggtctaagtttatttccaagtttaagtccacccacatagtagtcactatggccaacaatctgattcagtatgaaaatttaaaagttttcaaatctgtgataatagagataggaacaaaattaacaaccacttttttgtagtccaagtcctgtgtgtaattttaattatacacatgcatgtgtgcagacattaattaactaaagatgagcttttcaaggaattttcatccaatcacatcttgttgacatctatcccttttaaaatataatttctgtgtagtagagagacacaattcctttaaagttaactatataatgctagtattaacatacacttacattgaaaaattcactggtgggagcattgatcctgctttgtggaagcctttactctgttctgggtacatatatggattgtcgcctggagttaactttgggattccattcctgggatcaatatctgtggagaaggtttgaaaacaaaatcatacaagggctgaagatgatccacagatttgctgtaagtattggcatgacaatggaaaggggatattttagtattttattataaattacatagaagtttctcaaagttctgtttgtgattatcttgccttaaggagatgagcctatatttgggacattttccaaaaagtgttgttgtaactacctcaccctggaaaagaattgttagattcagatggagtgttttggtttaaaatataaggtgaatcagaggtttctttgcaatgatccaaaaatctctgacctaaaaatctcttcattcctgagcattagtgcactttgaatccctgagtcttaggaagccgaagaaacaagtgtccytggggctctgcctctctgactgggtccaggaaggaaaccaactaaggatgtcttgctccttctgcctcaaggactggggccatgcagcagtgggaggtggcttcctggagaagagcaagattactcagcagaggttcttacacccagctcagcccctgctaaagccctgggaacaagaaactaatcacgggagtggaaggcatcagcctagtgtagggtgatcatttaaacccacacacctaaagtccttaaaattgcctatttaaaaaattaaaatttaaaataaataaatcaacccacacacttacaccagatgcatctcctaagagaataagcctggactacgagactcatcacccttgggctcagaagcagggacacgtggctggaagcatgacctccatctttgccacacacccagattcttctagctaactcggaaaagccatcagcgtgacaggtggaagttcttgggttaccagagtatttacttttttgtctttctctttcaaaaaccttttcaataactgactgtattacacttttgattagctcttctgtgtggtgaaataacatcaactgcacccatgcattgagtgcctgctgggtatgagatgctgaggattcaaagcagagagagtggaggtttaaaatatatactgaatccccttgaggccaggagttctagaccagcctggccaacacagtgaaaccctgtctctactaaaaatacaaaaattagctgggtgtggtggcacacgcc

SEQ ID NO: 726021 - DNA, 1427 bp, Homo sapiens
aagctcagtctccacagaatgtactgcctggacagagacccagtgtgcagactcgggggctggggaacatgtgggagtgcgggcaggaatctgggtcccacccctcaggcttttggcctgccccagcaggctccaggcaggaagccagtccagcctgccatgccctctctctgctgtgcctcctccctcacccaagtcacactccacacgctcaggttcctttgtggtgggtgttttgattaattttattctaattaattcagtaatctcaagctgtttgcaaaatcttgcaccaagcactgctctgtgatggatctgcagaaggggctacagacaaacacccgaatcgtgttgtttctccattggcactatatatatcttacggctgggagagagtgggctgggggagagcagcaggacgccgcctgcctgccggcttttcactgtcattccccaaatgtcctctattttcctgcggccagggcacgggttctatggttggggcacagggaccccgaaggctttcctacaggcaggcaggcttggtggcagggctttgtgccctactctgcctcttcctctttgtggagcctcgggtggtttgcttaaccagctttggcaccctcacctagaaaacggagatgagctgggcgcggtggctcatgcctgtaatcccagcactttgggaggccgaggtgggtgaatcacaaggtcaggagttcaagaccagcctggccaagatgatgaaaccctgtctctactaaaaatacaaaaattagccggacgtggtggcaggtgcctgtaatcccagctacttgggaggctgaggcaggagaatcactcgaacccaggaggcggaggttgcggtgagctgatattatgccactgcactccagcctgggcaacagagcaagactccatctcaaaacaaaacaaaaaaaaggaaacggagatgaaacgcctaccctggccacctcagaggcactgagagccagctggagtatggggacaggcttgggaaactgaaaagaccttagggtactgctgatgtctttatccgagaagccgtagagggtgatggggaagagtcaaaccagatttcctgggttggaatcctgcctcaacctcttactagtggggagctttgcagaggctacttcacctctctgtgcctcagtttccatgcctgtaaaatgagggtgaaaacagaacccatctcagagggttcttatgattaaatgaatatgagcaaagcttttagaacagtgcttggcatggagtcaagcactatacaggataactattattatggttatcttagttgtcttcatcccttcaaaatcttcctagtgcattgtaaatgccttctctgattaaccagaatgcamcttgcactccagtctcaaagcactcatccttccctcatt

SEQ ID NO: 726022 - DNA, 700 bp, Homo sapiens
taaattcttggaagtataaccactgggtcaaaagcattgtgtattttaaagtggggtccacrttgccaaattgccatccaactttatggagttggatgagggtacctctctcattacatgctgataactaatatataggtggaaaacttgtagtttttgtgtttcttttttataaatgggattgagagtcattctgtatgtctaagaatagtttatatttctttttgtgaaccgtctatccatatcttttgtctagttttatgtttgggttgttgaccttttttatcgattgcaagggtcctttatattttaacaccatcaagccattataataacgtgagttgtgaatattttcctagtttatttctatttgagccaccattggttgaatcattttaccgtatggcaagccctgtggtgagcatgtcatgttttacaactgctccctaagttagcagtggtattatgccattttacagagaagggccccaggtctgtcggatgccaaagttgattcttaacttgaactctacaccccttttgcacatacctatttatatagcatcatttcaggttgtcatgcaattatgataaatatccttttcacaggttgcatagcattctattagttatacaaatcaaaattttcagatgctgatacttagactacacattttcatcacctataggttttcactgt

SEQ ID NO: 726023 - DNA, 650 bp, Homo sapiens
cttaagagtaacccgtctcccttgacaactaactggcccagggatgggtacatcatccaactggagtgaatcagaattttattaatgataattacatactctgaggaagaaagcaccctctgcctgaacactttctcagtgatcatgacctttgaagggccccttaactacggagctgtcattactatctttgacactgcctggggagttcttgcttgagaaagaagccagctcagatgaaaacacagaagacaccctgctgattggcatccactgaaccgttggttccagctatgcctgaagccaagttcactccaaagtttccctgttatgaccactaatctcctttttcattaagctcatctaggttgtgtttcttgatatgcaactgaaaaaccaggatcaccactcactcatgtacccgggacctgaagagatgcttcctcttttaygtgacatgcaagttgttgtcttttatctacataataaaagatatgcacttgacataatcagaactagtgtcaaatatgtagatgtcagagttgatctatctaagacagataactgttttgaaacccaaagaacacattttcaaaccaaggtccagagaattttaaaaatcaatgagacagaagtttgctttggcagac

SEQ ID NO: 726024 - DNA, 1841 bp, Homo sapiens
ttttcctaggatgtccacattatatcttgagctattttgacttgaaaggtgcacaaaaattttttaaatcatttttgtagattatatatgtttgtaaagtgccatccagcacattggaatagttattcacctaaatatatgatagcagatcttcagcactgagttaccaatgagatcacactaaatcattgattcacattctcctccccatgtgctrtggagtagtttattgtactaccacaaagtgctcatgcctaggctggcagaacacaccatcatggagcacaatgctctacagcaagtcattcttcaatttcaaagaatcgattggactgtttacattactttaagtcaatctggttgcatggatgcttctgctttttgaatgtcattgcttagactcaagacatatgggtttctacgctatttctactcgtgtgacagactgcctcgaaaagcagcgagctccccttccaccagaagctttcaaggggtggccagatgccatctgtgaggagtgccatgcatttctgtaaagcctcagacctagactgaattggatccacaaataaatggggaggagtcgactgttgaatgccaaccatgtggtcttttgtttagatggggtcattctcatttcatcccccagagaacataaggaaagacacagcttattgcaaagctctgtttgagttgaataatgtcattggaatggctgctaggggaccatcatcatacactggggttctggtgccctagtgctaaagagtgggaagaccagtgaggtcataattggtaataagtaaataaataggctttcctttttgaaaacccttgaaagaggggtctatgagaagggtcttatagaacaggacagggttgactgacagagaactcacagaaagcaaaactctccgaggtttccttttggtagtattggttttcctccccattgtcttcttagctttctcaattttttgctgtggtgaaatagtccatctgggggagggaatttcattcaaagaaagaaaagtcaatcagtgaaagaagacggaatggagaccagaaatagaaagaattttaatgagaacatgtcttgggtcaactcctaacctaattaccatgatgtctttccgttattttcaactatttggcctgggtgtgtgtgttaaccaaatgacattgagttatttcccagaacagctaagtgccacacaggaaatacttgctgcttcatgtgatttggttgaatccccaatttatagcttgaaggaaaaacagattctcaagatttgggaaaaaatcagaacctacatttcttatttctcattgtcatgacaatattatttgatgttaatcagagaaaacactggagcttatatcagtgtatatcatatgccagtatcatagtgagtactacacgggtatagaaagatggacaatgacttgtttattgtccttgaaggggtcacggtcaagtggggagtcaggacttgcaaacagatatgttatatcttaagaaggtgaatgctataactaaaatgtaaataaaatgttttctaagttggttctcagtctgtttgctaaatgtgcaaaagcacatttaacatttactttcttatcattaaccaccaacctctgacttcgagacactgaaacagacagaacagccatctgcaagttctggcttcatcattttgtttccttattacaatgaagtaaggcccaggtcattgtcaattagaaatgaaataaagtagagtttaaatacgaaactgtttaccgatgctcgtacctaaaaagtatggaaggaaggggcgaagaactacgctataatcccc

SEQ ID NO: 726025 - DNA, 1841 bp, Homo sapiens
ttttcctaggatgtccacattatatcttgagctattttgacttgaaaggtgcacaaaaattttttaaatcatttttgtagattatatatgtttgtaaagtgccatccagcacattggaatagttattcacctaaatatatgatagcagatcttcagcactgagttaccaatgagatcacactaaatcattgattcacattctcctccccatgtgctatggagtagtttattgtactaccacaaagtgctcatgcctaggctggcagaacacaccatcatggagcacartgctctacagcaagtcattcttcaatttcaaagaatcgattggactgtttacattactttaagtcaatctggttgcatggatgcttctgctttttgaatgtcattgcttagactcaagacatatgggtttctacgctatttctactcgtgtgacagactgcctcgaaaagcagcgagctccccttccaccagaagctttcaaggggtggccagatgccatctgtgaggagtgccatgcatttctgtaaagcctcagacctagactgaattggatccacaaataaatggggaggagtcgactgttgaatgccaaccatgtggtcttttgtttagatggggtcattctcatttcatcccccagagaacataaggaaagacacagcttattgcaaagctctgtttgagttgaataatgtcattggaatggctgctaggggaccatcatcatacactggggttctggtgccctagtgctaaagagtgggaagaccagtgaggtcataattggtaataagtaaataaataggctttcctttttgaaaacccttgaaagaggggtctatgagaagggtcttatagaacaggacagggttgactgacagagaactcacagaaagcaaaactctccgaggtttccttttggtagtattggttttcctccccattgtcttcttagctttctcaattttttgctgtggtgaaatagtccatctgggggagggaatttcattcaaagaaagaaaagtcaatcagtgaaagaagacggaatggagaccagaaatagaaagaattttaatgagaacatgtcttgggtcaactcctaacctaattaccatgatgtctttccgttattttcaactatttggcctgggtgtgtgtgttaaccaaatgacattgagttatttcccagaacagctaagtgccacacaggaaatacttgctgcttcatgtgatttggttgaatccccaatttatagcttgaaggaaaaacagattctcaagatttgggaaaaaatcagaacctacatttcttatttctcattgtcatgacaatattatttgatgttaatcagagaaaacactggagcttatatcagtgtatatcatatgccagtatcatagtgagtactacacgggtatagaaagatggacaatgacttgtttattgtccttgaaggggtcacggtcaagtggggagtcaggacttgcaaacagatatgttatatcttaagaaggtgaatgctataactaaaatgtaaataaaatgttttctaagttggttctcagtctgtttgctaaatgtgcaaaagcacatttaacatttactttcttatcattaaccaccaacctctgacttcgagacactgaaacagacagaacagccatctgcaagttctggcttcatcattttgtttccttattacaatgaagtaaggcccaggtcattgtcaattagaaatgaaataaagtagagtttaaatacgaaactgtttaccgatgctcgtacctaaaaagtatggaaggaaggggcgaagaactacgctataatcccc

SEQ ID NO: 726026 - DNA, 1841 bp, Homo sapiens
ttttcctaggatgtccacattatatcttgagctattttgacttgaaaggtgcacaaaaattttttaaatcatttttgtagattatatatgtttgtaaagtgccatccagcacattggaatagttattcacctaaatatatgatagcagatcttcagcactgagttaccaatgagatcacactaaatcattgattcacattctcctccccatgtgctatggagtagtttattgtactaccacaaagtgctcatgcctaggctggcagaacacaccatcatggagcacaatgctctacagcaagtcattcttcaatttcaaagaatcgattggactgtttacattactttaagtcaatctggttgcatggatgcttctgctttttgaatgtcattgcttagactcaagacatatgggtttctacgctatttctactcgtgtgacagactgcctcgaaaagcagygagctccccttccaccagaagctttcaaggggtggccagatgccatctgtgaggagtgccatgcatttctgtaaagcctcagacctagactgaattggatccacaaataaatggggaggagtcgactgttgaatgccaaccatgtggtcttttgtttagatggggtcattctcatttcatcccccagagaacataaggaaagacacagcttattgcaaagctctgtttgagttgaataatgtcattggaatggctgctaggggaccatcatcatacactggggttctggtgccctagtgctaaagagtgggaagaccagtgaggtcataattggtaataagtaaataaataggctttcctttttgaaaacccttgaaagaggggtctatgagaagggtcttatagaacaggacagggttgactgacagagaactcacagaaagcaaaactctccgaggtttccttttggtagtattggttttcctccccattgtcttcttagctttctcaattttttgctgtggtgaaatagtccatctgggggagggaatttcattcaaagaaagaaaagtcaatcagtgaaagaagacggaatggagaccagaaatagaaagaattttaatgagaacatgtcttgggtcaactcctaacctaattaccatgatgtctttccgttattttcaactatttggcctgggtgtgtgtgttaaccaaatgacattgagttatttcccagaacagctaagtgccacacaggaaatacttgctgcttcatgtgatttggttgaatccccaatttatagcttgaaggaaaaacagattctcaagatttgggaaaaaatcagaacctacatttcttatttctcattgtcatgacaatattatttgatgttaatcagagaaaacactggagcttatatcagtgtatatcatatgccagtatcatagtgagtactacacgggtatagaaagatggacaatgacttgtttattgtccttgaaggggtcacggtcaagtggggagtcaggacttgcaaacagatatgttatatcttaagaaggtgaatgctataactaaaatgtaaataaaatgttttctaagttggttctcagtctgtttgctaaatgtgcaaaagcacatttaacatttactttcttatcattaaccaccaacctctgacttcgagacactgaaacagacagaacagccatctgcaagttctggcttcatcattttgtttccttattacaatgaagtaaggcccaggtcattgtcaattagaaatgaaataaagtagagtttaaatacgaaactgtttaccgatgctcgtacctaaaaagtatggaaggaaggggcgaagaactacgctataatcccc

SEQ ID NO: 726027 - DNA, 586 bp, Homo sapiens
tgacttctgrgtccaccttgggtggacacactgcccttcctccttgcctggagaagatggtggtatacaagaaacagtggcaaagaaagagacagggaaggaaaatgtggaggtcgtttgtaaagagcctccctccacattctcagacttttcctggcaccctctctacccaccttccctactcccatcctcatcagcagctcctcagagcctccagtggtcttagccccattgccaccccacccacaacactttgctgcaggtctgagtaggacaggacctcctgtgcctggctcatggctctttccccaggacccagcacaggcctaacccagagcagcaggaaggaggcatcctccaggggtccagaacccaaggagctggagtcagccagactgggttccaacccctgctccaccatttgtgctgtgtgaccttgagaaacctcttcagcctcggttttctccatccaagtactaaccagtcctgaccctaactcttagcttccaagatcaggcaagatcaggtacgtgcagagtggtataattatagactagtctcagtcttctatctgcaaaatgggaat

SEQ ID NO: 726028 - DNA, 772 bp, Homo sapiens
agtaaactttcactttcctgtttcttaaacagtttgaatgttttccacaaagcaaacttctcatttgcacttctaacagacttctttctcagtgcattggaatttcaggaggtttccagcggcaatgtggcatttagtatttttaagttttgaagagattaaaaatggtgcttacagtagaagcttttaatagaatctcttggagctggatgacttaaggagggagcagatgatgcaaggtgggaaatgtataaagtacatattttcttagcatatttgcattattttcatgtatccatctacatttcagtagagaacctttgtagaactccactactgtattatcgaattgaaatcttgataattartggcacattttatgtatattgaatacaaccagaagctggtgtcttgctcatgatgtctgatgatgattgttgtgttgtttttgtgtaatccggggaataaatactttattttggctactatttgcaatgtatgatagtcaataattaattgtacagtgggtataaaaatatgtaagtaaattgtttgtcttatatgtagacttttttgaaataaaaataggcatactgaagttgatttaagattataccagctgacgaggtaaggtttaaactttctaaacttctttggtagaacatggttttgtggttgaagatcttttctggtgctgacaacctattattttagtatattttcacctactagtaacagtatcttgatagaagcatagcttaatctctctaca

SEQ ID NO: 726029 - DNA, 622 bp, Homo sapiens
tagaaaaaactatatttgcatacatttaccatttttaaaaaaatcttttcttttcaactcttttttttagtttggagagcacatgtgcaggtttcttacatagctaaattgtgtgtcgctgaggtttggtgtacaaatgattatgtcactcaggtattgagcatagtatccaaaaggtggttttctcaaccctcctttcccctcctacccacacctcacttgtagtcyccaatgtctaaaattcccatctttatgtccatgtgtactcaacatttagctcctacatatgagggagaacacatggtatttggttttctgttattgtgtaaatttgcttagaataatggcctccaactacatccatgttgctacaaaggacataatttgttcttttttatggctgcatagtattccaaggtgtatatgtaccaaatttgatttatccagtccaccactgatagacatctaagttgattctatgtctttgctattgtgaatagtgctgcaataaacatatgagtgcatgtgtttttaaaaattttttttctgtgatctgggtttacttctgttatcatttgattttatcttgcagagtttccgtagatatttcttgtactttaga

SEQ ID NO: 726030 - DNA, 622 bp, Homo sapiens
tagaaaaaactatatttgcatacatttaccatttttaaaaaaatcttttcttttcaactcttttttttagtttggagagcacatgtgcaggtttcttacatagctaaattgtgtgtcgctgaggtttggtgtacaaatgattatgtcactcaggtattgagcatagtatccaaaaggtggttttctcaaccctcctttcccctcctacccacacctcacttgtagtctccaatgtctaaaattcccatctttatgtccatgtgtactcaacatttagctcctrcatatgagggagaacacatggtatttggttttctgttattgtgtaaatttgcttagaataatggcctccaactacatccatgttgctacaaaggacataatttgttcttttttatggctgcatagtattccaaggtgtatatgtaccaaatttgatttatccagtccaccactgatagacatctaagttgattctatgtctttgctattgtgaatagtgctgcaataaacatatgagtgcatgtgtttttaaaaattttttttctgtgatctgggtttacttctgttatcatttgattttatcttgcagagtttccgtagatatttcttgtactttaga

SEQ ID NO: 726031 - DNA, 1168 bp, Homo sapiens
tttaacaatttaaccctcttataagttaaaaaaaaaaaaaaagcccggcacagtggctcacgcctgtaatcccagctctttaggaggctgaggtggatggatcaggaggtcaggagttcaagaccagcctggctaacgtggtgaaacctcgtctctactaaaaatacaaaaattagctgggggtggtggtgcatacctgtaatcccagctactcaggaagctgaggcaggagaatcgcttgaacccrgaggcagaggttgcagtgagccaagatcgtgccactgcactccagcctcggcaacagagcaagactccatctcaaaaagaaaaaagaaataaaaataaaaagtcatgcccagctattttgggagaactgaaattacaactctatctgagaaaataaaatgacaggactccacagaatccatagataaaaacttaactgaagaggaatatggacagactaaaggaaaaattttatcaagctgtaatctttatacttgtgcctaaggccagaacttgaaactgctgaagacagtgtttctctacaaatgcacacaggcaccccattttgatgcacagataggtgtttatttcttttaagaatagcagctttattgagataaatttcacatatgatacaattcaccaatttaaagtgtacaagtcaatggttttcagtataatcagagttgtactaccatcaccataatcaattttagaacattttcatcaccgcccaaaaaccactgtagtctctccccagtcctccactcctgggaaccattaatgtactttctgtctctatagatttgcctattttggttattttatataaatggaatcatacaacatgtggtcttttgtgaatagcttttttcacttaccataatgttttcaagattgattcattttgtagcaggtatcagtcctttttcctgtttattgccaaataattttccattgtacggatagatcatattttgtttatccatttgtcacattttggttgtctatcagttgatagatatttgtggtgcatttaatttttggccaatgtgtaaaacttattttgctctcattgaggctacatactgttacaacaatgctatttggtcaacttgactgagctggcctcataggttacaggttgttcattgttagagat

SEQ ID NO: 726032 - DNA, 661 bp, Homo sapiens
cacctcctgcaatagtgagactaagatcatcctctcgccccctggatattaggatcaatatcataggggtggtgtacaccccctgcgaaattggaagaaatatcatcctctccacctttggacgttagggacagtatcacgggggatgtctacgccccctgcgatattgggagtcatatcatccgctcccacccaggacattaggaacaagatgactgaacggaggtacacccgcagcgacattttcaataatgtcatcctctacatcctggcaattaggagaaacatcatagaggggtgtacactttcagcgacatcgggagtaatatcctctcccccacagatatcgggaacagttatattaattattaatattaataaatatattaataattaatagtaatcatcgatattaataattgcaatagagatagtaaaagtgaatatggatraaaatattaacaattactattaataatagcaatatcactattaataataaaataatgatattattaatcaatgttacataaatcagtcataagtgatgttggtaataaaacaataattaatattaagattaataactaatattattgaaaaatgacattaatacagataattttaatcatgcataattgtacatttaaaataatcatta

SEQ ID NO: 726033 - DNA, 661 bp, Homo sapiens
cacctcctgcaatagtgagactaagatcatcctctcgccccctggatattaggatcaatatcataggggtggtgtacaccccctgcgaaattggaagaaatatcatcctctccacctttggacgttagggacagtatcacgggggatgtctacgccccctgcgatattgggagtcatatcatccgctcccacccaggacattaggaacaagatgactgaacggaggtacacccgcagcgacattttcaataatgtcatcctctacatcctggcaattaggagaaacatcatagaggggtgtacactttcagcgacatcgggagtaatatcctctcccccacagatatcgggaacagttatattaattattaatattaataaatatattaataattaatagtaatcatcgatattaataattgcaatagagatagtaaaagtgaatatggatgaaaatattaacaattactattaataatagcaatatcactattaataataaaataatgatattattaatcartgttacataaatcagtcataagtgatgttggtaataaaacaataattaatattaagattaataactaatattattgaaaaatgacattaatacagataattttaatcatgcataattgtacatttaaaataatcatta

SEQ ID NO: 726034 - DNA, 644 bp, Homo sapiens
cttctcaccccccacagcccgcaccctcctctgaatgctctgagcagccctggttccctctgagactcagcatggggacagaaggaagggggctttgggctgccggctgctcatcccaccctggcctggcccccacctcaaggcagtccctgacctcttcacccccaggaccacgagtcaggaaaagttcaaagcttgctctcccccagccgggatgttttgatttctgggcccgctgaaaatggcccgtttgtgctgagacgctcaggcasattagcttccaaccccctttcagccctttctatctgaatccgggctctgacaagccccttccccagccctgcagcccctcttggccccagatgactgtcctcacttccccccacggcccccaaccgtggtgaaggagggggaggtcctatccccaaacacaagctcttttgttccagccggcagcttggccctcagccctgcacccgctgctggtggcgtttcctagcacttaatgagcccggggtcagctgaaggatggggagttggcattgaggggctggggacaggggctggagcacaggcgatttctggctgcagctttggacctgtccctcctctgctcgaatctctcccatggttcctgcctactt

SEQ ID NO: 726035 - DNA, 644 bp, Homo sapiens
cttctcaccccccacagcccgcaccctcctctgaatgctctgagcagccctggttccctctgagactcagcatggggacagaaggaagggggctttgggctgccggctgctcatcccaccctggcctggcccccacctcaaggcagtccctgacctcttcacccccaggaccacgagtcaggaaaagttcaaagcttgctctcccccagccgggatgttttgatttctgggcccgctgaaaatggcccgtttgtgctgagacgctcaggcacaytagcttccaaccccctttcagccctttctatctgaatccgggctctgacaagccccttccccagccctgcagcccctcttggccccagatgactgtcctcacttccccccacggcccccaaccgtggtgaaggagggggaggtcctatccccaaacacaagctcttttgttccagccggcagcttggccctcagccctgcacccgctgctggtggcgtttcctagcacttaatgagcccggggtcagctgaaggatggggagttggcattgaggggctggggacaggggctggagcacaggcgatttctggctgcagctttggacctgtccctcctctgctcgaatctctcccatggttcctgcctactt

SEQ ID NO: 726036 - DNA, 2444 bp, Homo sapiens
ccattattaattttagtagaagtggacacatttctaataacctaataatctctgataacttctgataacattaattttaaaagttaaaaataataactaaataaataataaataataactaacaaccaaatggctctaaatacagattatttctggtacagataattctagctaaaatacagatagttctacctgaaaggttttttctacttgtggtttctaaataattgtgtaagtctaaactaagtcctctcctacagttaagacatgcatcttccaagaatctaatgaaaacacttgggaacttccttaaagagaactcatcctaagaagatgagaatattgcctggcaagtttgacccaataataaaatctcaaggtcagaggtagaacagatttcagctttctcattgcatcctgcccttcttatattttacaaaaatcagagactcatctatgtgtcccaaggataaaaaaagctctaaatcagatctgaaaaactcaaaattgtatacattttgggtgcattttatttgtacatgtctcatatgtttaacatcaggagaaagtcacttttcatagcatacaagtttttcctcacaaacataagcagatatatcacatgaggataagtttgacacagttaaggcaacagtcaataacattcccaattaaagtcaaatgtgcatattatactgaaaaatatcagttaattaattgtatgtagtcataatgtttaccactgtacgatgttaaaaatatacagagtaccagtggaaggaattcacagaaagaaatacttgggtattcaaaattttttattctctaaaattaaawctcttttaaaatgcagtagtttccctcagaaagcagttggcagtccattacttaaggcattcatgcacatgctagaaaaccttatgatacttatgcactcatgagaattcaagagctaatgcataatttgacaacatggcatagtaggtccccttggaccagagatgccagcatgctgtttgtaaaaatactgactcatataatctactatatctagctaaaaggtattttctacttatggtttctaaattgaccagttttgaggatatgtctaaactatttcataaatttgtttgtaatcacttgaaactttcacactgttaggtggctacgatagccaaaaacaacaggtcagttgattatccatatgattcttttaatcacatggcaatactttgaaaagtcatgttaatgtttctatttctaggatgggcaaaggctctgaattatatctggtgatggtattacaaataaagccactattagaaatcttttgagagtaactggagtgactttttcttttgtgacctggctattcaaccctggaaaactgacttgattgtaaatttgctcaccgaatatctgtatttgtatatttatcacatataatttgcatataaatatacaatttcaataattacagcatataatacgtctgttgcaatacatatatacacatgcgcacattgttatttacaatgtatagtctcatatctgcacatagctatactagatacaactcattaataatttatgcattatattttatcttaacaataaagtataatatagcagctttcactttcttagaaaatttatttactaaatattagaaattatattgtattttaaagtgaaacaaaggaaaatacttcggcaaacatttcaatagtttaaaatttaaaagacaatcttagtagaataatcccaagtaggtattcttccattaaaaatttttgacactgcatttgcatttctatttgtaacttatctaatatttatagcatcctgtgttaatttataattctatttatacaaaacttgtggaagacaatttaccatgaataaaagtgcttcatattcaaataagcttcataaatagattacctctaagttctttactagtgagtgtactctccaattgctgtaccctttatccatgagaacgaaaatttagtaattataaaaatgatgcctcatccatgtctgtgtagcctgtaaaatttgtaaatcaagctcacaaatgttgtcagaacaaaggtaggcttatatgatacatcaagctaaaatcattcatcctctacaccaataggcatagaactgcaaatgcagcctcagaactgctcatctctcccagttgtggcttctcgcaaaaggaaacagccagactgctagagatttaaatattcctctacttttaccttgaactctagatctgtccatgatctacccataaatccagcaaactcttcaggttgcgcaactaagacaacaatctgtgccttcatcacgccatcggaatggaatgtgacgagccacagtgataaacatactgtgaaaaatacattggtggtgatgagcccaattctgttttttataaaaaatta

SEQ ID NO: 726037 - DNA, 2444 bp, Homo sapiens
ccattattaattttagtagaagtggacacatttctaataacctaataatctctgataacttctgataacattaattttaaaagttaaaaataataactaaataaataataaataataactaacaaccaaatggctctaaatacagattatttctggtacagataattctagctaaaatacagatagttctacctgaaaggttttttctacttgtggtttctaaataattgtgtaagtctaaactaagtcctctcctacagttaagacatgcatcttccaagaatctaatgaaaacacttgggaacttccttaaagagaactcatcctaagaagatgagaatattgcctggcaagtttgacccaataataaaatctcaaggtcagaggtagaacagatttcagctttctcattgcatcctgcccttcttatattttacaaaaatcagagactcatctatgtgtcccaaggataaaaaaagctctaaatcagatctgaaaaactcaaaattgtatacattttgggtgcattttatttgtacatgtctcatatgtttaacatcaggagaaagtcacttttcatagcatacaagtttttcctcacaaacataagcagatatatcacatgaggataagtttgacacagttaaggcaacagtcaataacattcccaattaaagtcaaatgtgcatattatactgaaaaatatcagttaattaattgtatgtagtcataatgtttaccactgtacgatgttaaaaatatacagagtaccagtggaaggaattcacagaaagaaatacttgggtattcaaaattttttattctctaaaattaaatctcttttaaaatgcagtagtttccctcagaaagcagttggcagtccattacttaaggcattcatgcacatgctagaaaaccttatgatacttatgcactcatgagaattcaagagctaatgcataatttgacaacatggcatagtaggtccccttggaccagagatgccagcatgctgtttgtaaaaatactgactcatataatctactatatctagctaaaaggtattttctacttatggtttctaaattgaccagttttgaggatatgtctaaactatttcataaatttgtttgtaatcacttgaaactttcacactgttaggtggctacratagccaaaaacaacaggtcagttgattatccatatgattcttttaatcacatggcaatactttgaaaagtcatgttaatgtttctatttctaggatgggcaaaggctctgaattatatctggtgatggtattacaaataaagccactattagaaatcttttgagagtaactggagtgactttttcttttgtgacctggctattcaaccctggaaaactgacttgattgtaaatttgctcaccgaatatctgtatttgtatatttatcacatataatttgcatataaatatacaatttcaataattacagcatataatacgtctgttgcaatacatatatacacatgcgcacattgttatttacaatgtatagtctcatatctgcacatagctatactagatacaactcattaataatttatgcattatattttatcttaacaataaagtataatatagcagctttcactttcttagaaaatttatttactaaatattagaaattatattgtattttaaagtgaaacaaaggaaaatacttcggcaaacatttcaatagtttaaaatttaaaagacaatcttagtagaataatcccaagtaggtattcttccattaaaaatttttgacactgcatttgcatttctatttgtaacttatctaatatttatagcatcctgtgttaatttataattctatttatacaaaacttgtggaagacaatttaccatgaataaaagtgcttcatattcaaataagcttcataaatagattacctctaagttctttactagtgagtgtactctccaattgctgtaccctttatccatgagaacgaaaatttagtaattataaaaatgatgcctcatccatgtctgtgtagcctgtaaaatttgtaaatcaagctcacaaatgttgtcagaacaaaggtaggcttatatgatacatcaagctaaaatcattcatcctctacaccaataggcatagaactgcaaatgcagcctcagaactgctcatctctcccagttgtggcttctcgcaaaaggaaacagccagactgctagagatttaaatattcctctacttttaccttgaactctagatctgtccatgatctacccataaatccagcaaactcttcaggttgcgcaactaagacaacaatctgtgccttcatcacgccatcggaatggaatgtgacgagccacagtgataaacatactgtgaaaaatacattggtggtgatgagcccaattctgttttttataaaaaatta

SEQ ID NO: 726038 - DNA, 2444 bp, Homo sapiens
ccattattaattttagtagaagtggacacatttctaataacctaataatctctgataacttctgataacattaattttaaaagttaaaaataataactaaataaataataaataataactaacaaccaaatggctctaaatacagattatttctggtacagataattctagctaaaatacagatagttctacctgaaaggttttttctacttgtggtttctaaataattgtgtaagtctaaactaagtcctctcctacagttaagacatgcatcttccaagaatctaatgaaaacacttgggaacttccttaaagagaactcatcctaagaagatgagaatattgcctggcaagtttgacccaataataaaatctcaaggtcagaggtagaacagatttcagctttctcattgcatcctgcccttcttatattttacaaaaatcagagactcatctatgtgtcccaaggataaaaaaagctctaaatcagatctgaaaaactcaaaattgtatacattttgggtgcattttatttgtacatgtctcatatgtttaacatcaggagaaagtcacttttcatagcatacaagtttttcctcacaaacataagcagatatatcacatgaggataagtttgacacagttaaggcaacagtcaataacattcccaattaaagtcaaatgtgcatattatactgaaaaatatcagttaattaattgtatgtagtcataatgtttaccactgtacgatgttaaaaatatacagagtaccagtggaaggaattcacagaaagaaatacttgggtattcaaaattttttattctctaaaattaaatctcttttaaaatgcagtagtttccctcagaaagcagttggcagtccattacttaaggcattcatgcacatgctagaaaaccttatgatacttatgcactcatgagaattcaagagctaatgcataatttgacaacatggcatagtaggtccccttggaccagagatgccagcatgctgtttgtaaaaatactgactcatataatctactatatctagctaaaaggtattttctacttatggtttctaaattgaccagttttgaggatatgtctaaactatttcataaatttgtttgtaatcacttgaaactttcacactgttaggtggctacgatagccaaaaacaacaggtcagytgattatccatatgattcttttaatcacatggcaatactttgaaaagtcatgttaatgtttctatttctaggatgggcaaaggctctgaattatatctggtgatggtattacaaataaagccactattagaaatcttttgagagtaactggagtgactttttcttttgtgacctggctattcaaccctggaaaactgacttgattgtaaatttgctcaccgaatatctgtatttgtatatttatcacatataatttgcatataaatatacaatttcaataattacagcatataatacgtctgttgcaatacatatatacacatgcgcacattgttatttacaatgtatagtctcatatctgcacatagctatactagatacaactcattaataatttatgcattatattttatcttaacaataaagtataatatagcagctttcactttcttagaaaatttatttactaaatattagaaattatattgtattttaaagtgaaacaaaggaaaatacttcggcaaacatttcaatagtttaaaatttaaaagacaatcttagtagaataatcccaagtaggtattcttccattaaaaatttttgacactgcatttgcatttctatttgtaacttatctaatatttatagcatcctgtgttaatttataattctatttatacaaaacttgtggaagacaatttaccatgaataaaagtgcttcatattcaaataagcttcataaatagattacctctaagttctttactagtgagtgtactctccaattgctgtaccctttatccatgagaacgaaaatttagtaattataaaaatgatgcctcatccatgtctgtgtagcctgtaaaatttgtaaatcaagctcacaaatgttgtcagaacaaaggtaggcttatatgatacatcaagctaaaatcattcatcctctacaccaataggcatagaactgcaaatgcagcctcagaactgctcatctctcccagttgtggcttctcgcaaaaggaaacagccagactgctagagatttaaatattcctctacttttaccttgaactctagatctgtccatgatctacccataaatccagcaaactcttcaggttgcgcaactaagacaacaatctgtgccttcatcacgccatcggaatggaatgtgacgagccacagtgataaacatactgtgaaaaatacattggtggtgatgagcccaattctgttttttataaaaaatta

SEQ ID NO: 726039 - DNA, 2444 bp, Homo sapiens
ccattattaattttagtagaagtggacacatttctaataacctaataatctctgataacttctgataacattaattttaaaagttaaaaataataactaaataaataataaataataactaacaaccaaatggctctaaatacagattatttctggtacagataattctagctaaaatacagatagttctacctgaaaggttttttctacttgtggtttctaaataattgtgtaagtctaaactaagtcctctcctacagttaagacatgcatcttccaagaatctaatgaaaacacttgggaacttccttaaagagaactcatcctaagaagatgagaatattgcctggcaagtttgacccaataataaaatctcaaggtcagaggtagaacagatttcagctttctcattgcatcctgcccttcttatattttacaaaaatcagagactcatctatgtgtcccaaggataaaaaaagctctaaatcagatctgaaaaactcaaaattgtatacattttgggtgcattttatttgtacatgtctcatatgtttaacatcaggagaaagtcacttttcatagcatacaagtttttcctcacaaacataagcagatatatcacatgaggataagtttgacacagttaaggcaacagtcaataacattcccaattaaagtcaaatgtgcatattatactgaaaaatatcagttaattaattgtatgtagtcataatgtttaccactgtacgatgttaaaaatatacagagtaccagtggaaggaattcacagaaagaaatacttgggtattcaaaattttttattctctaaaattaaatctcttttaaaatgcagtagtttccctcagaaagcagttggcagtccattacttaaggcattcatgcacatgctagaaaaccttatgatacttatgcactcatgagaattcaagagctaatgcataatttgacaacatggcatagtaggtccccttggaccagagatgccagcatgctgtttgtaaaaatactgactcatataatctactatatctagctaaaaggtattttctacttatggtttctaaattgaccagttttgaggatatgtctaaactatttcataaatttgtttgtaatcacttgaaactttcacactgttaggtggctacgatagccaaaaacaacaggtcagttgattatccatatgattcttttaatcacatggcaatactttgaaaagtcatgttaatgtttctatttctaggatgggcaaaggctctgaattatatctggtgatggtattacaaataaagccactattagaaatcttttgagagtaactggagtgactttttcttttgtgacctggctattcaaccctggaaaactgacttgattgtaaatttgctcaccgaatatctgtatttgtatatttatcacatataatttgcatataaatatacaatttcaataattacagcatataatacgtctgttgcaatacatatatacacatgcgcacattgttatttacaatgtatagtctcatatctgcacatagctatactagatacaactcattaataatttatgcattatattttatcttaacaataaagtataatatagcagctttcactttcttagaaaatttatttactaaatattagaaattatattgtattttaaagtgaaacaaaggaaaatacttcggcaaacatttcaatagtttaaaatttaaaagacaatcttagtagaataatcccaagtaggtattcttccattaaaaatttttgacactgcatttgcatttctatttgtaacttatctaatatttatagcatcctgtgttaatttataattctatttatacaaaacttgtggaagacaatttaccatgaataaaagtgcttcatattcaaataagcttcataaatagattacctctaagttctttactagtgagtgtactctccaattgctgtaccctttatccatgagaacgaaaatttagyaattataaaaatgatgcctcatccatgtctgtgtagcctgtaaaatttgtaaatcaagctcacaaatgttgtcagaacaaaggtaggcttatatgatacatcaagctaaaatcattcatcctctacaccaataggcatagaactgcaaatgcagcctcagaactgctcatctctcccagttgtggcttctcgcaaaaggaaacagccagactgctagagatttaaatattcctctacttttaccttgaactctagatctgtccatgatctacccataaatccagcaaactcttcaggttgcgcaactaagacaacaatctgtgccttcatcacgccatcggaatggaatgtgacgagccacagtgataaacatactgtgaaaaatacattggtggtgatgagcccaattctgttttttataaaaaatta

SEQ ID NO: 726040 - DNA, 2444 bp, Homo sapiens
ccattattaattttagtagaagtggacacatttctaataacctaataatctctgataacttctgataacattaattttaaaagttaaaaataataactaaataaataataaataataactaacaaccaaatggctctaaatacagattatttctggtacagataattctagctaaaatacagatagttctacctgaaaggttttttctacttgtggtttctaaataattgtgtaagtctaaactaagtcctctcctacagttaagacatgcatcttccaagaatctaatgaaaacacttgggaacttccttaaagagaactcatcctaagaagatgagaatattgcctggcaagtttgacccaataataaaatctcaaggtcagaggtagaacagatttcagctttctcattgcatcctgcccttcttatattttacaaaaatcagagactcatctatgtgtcccaaggataaaaaaagctctaaatcagatctgaaaaactcaaaattgtatacattttgggtgcattttatttgtacatgtctcatatgtttaacatcaggagaaagtcacttttcatagcatacaagtttttcctcacaaacataagcagatatatcacatgaggataagtttgacacagttaaggcaacagtcaataacattcccaattaaagtcaaatgtgcatattatactgaaaaatatcagttaattaattgtatgtagtcataatgtttaccactgtacgatgttaaaaatatacagagtaccagtggaaggaattcacagaaagaaatacttgggtattcaaaattttttattctctaaaattaaatctcttttaaaatgcagtagtttccctcagaaagcagttggcagtccattacttaaggcattcatgcacatgctagaaaaccttatgatacttatgcactcatgagaattcaagagctaatgcataatttgacaacatggcatagtaggtccccttggaccagagatgccagcatgctgtttgtaaaaatactgactcatataatctactatatctagctaaaaggtattttctacttatggtttctaaattgaccagttttgaggatatgtctaaactatttcataaatttgtttgtaatcacttgaaactttcacactgttaggtggctacgatagccaaaaacaacaggtcagttgattatccatatgattcttttaatcacatggcaatactttgaaaagtcatgttaatgtttctatttctaggatgggcaaaggctctgaattatatctggtgatggtattacaaataaagccactattagaaatcttttgagagtaactggagtgactttttcttttgtgacctggctattcaaccctggaaaactgacttgattgtaaatttgctcaccgaatatctgtatttgtatatttatcacatataatttgcatataaatatacaatttcaataattacagcatataatacgtctgttgcaatacatatatacacatgcgcacattgttatttacaatgtatagtctcatatctgcacatagctatactagatacaactcattaataatttatgcattatattttatcttaacaataaagtataatatagcagctttcactttcttagaaaatttatttactaaatattagaaattatattgtattttaaagtgaaacaaaggaaaatacttcggcaaacatttcaatagtttaaaatttaaaagacaatcttagtagaataatcccaagtaggtattcttccattaaaaatttttgacactgcatttgcatttctatttgtaacttatctaatatttatagcatcctgtgttaatttataattctatttatacaaaacttgtggaagacaatttaccatgaataaaagtgcttcatattcaaataagcttcataaatagattacctctaagttctttactagtgagtgtactctccaattgctgtaccctttatccatgagaacgaaaatttagtaattataaaaatgatgcctcatccatgtctgtgtagcctgtaaaatttgtaaatcaagctcacaaatgttgtcagaacaaaggtaggcttatatgatacatcaagctaaaatcattcatcctctacaccaataggcatagaactgcaaatgcagcctcagaactgctcatctctcccagttgtggcttctygcaaaaggaaacagccagactgctagagatttaaatattcctctacttttaccttgaactctagatctgtccatgatctacccataaatccagcaaactcttcaggttgcgcaactaagacaacaatctgtgccttcatcacgccatcggaatggaatgtgacgagccacagtgataaacatactgtgaaaaatacattggtggtgatgagcccaattctgttttttataaaaaatta

SEQ ID NO: 726041 - DNA, 637 bp, Homo sapiens
atgcttgcttaaatgaagaatcattgctgcatttctgcgtgtgtttgggaatatctggccaaaggacactagtcactttgtgatagaatggctcaagagtctatgttggccttgggaccctgttgggttctgcctgattttagataggacttggagattcattcccttccttaattctattgccatgtgacttatgtgacatgtctggagatggttatgtgtgatctgtgggaagatgaagaatgattgcagtttgcagtgtataaggactcatgtaaatagcattaactcagaaactaaaacagaacaataacttgaaattatcacacagcgttagcctattagtgaaaaatgacttatgtcatagggaattgtctcaagacattttaaaatttccagcttttacatcaaatttaattccaaactagacatgagatgcaaaactttgtgatctagtagaaaacaatatacgaaaagaaaatcaaggattacaatgatctttctgttggaatgtgttagggcttgctatgcrtcattcaaaaggagctaataagaaaatgatccattcaatttgaggaatgaggacaggccataaacaggaaaagaaatcctgaggtcaaaagtgaggatgtgtgaa

SEQ ID NO: 726042 - DNA, 966 bp, Homo sapiens
gtcattatttttctgtattgtattctggataattttttsaaatttgtcttacataatctgctgtttaaactgcaattcactttttaattttaataaaaatattttccatttatagaagtttcctgttgttcttttttatatccacctgttcccttagacttcatttcatggaatctaattctttccttatatttttaatacttcaaacccacttcctttatagtttatataacattgcttttctgttatctgaagcccttgatgagttaatcatcctgccctgtctactacttttcatccttggtggattgttttctcaagcactttgtaagtcttaatggaagatgtgtttcaaagagcttttgctttatgttttttgttaatttcttggcttggacttgagactatatatcccatgtgcaaagttaaaataaaaaatttaaactagagcaagatactggcacagaggatttttttgcccatttgaaccattacggatataagcttcctggtaattttgctgggctcgtggggtcattgaagtttgcatatctttctttcactgggttgcagccctttgagactaccaacttttgtgggggtctcagcttcagctccctaacttaggtatccaaagacctcatgtactgatgtgtatttttgcaaacccgaatactagctactctcaacccagcaccctcccctttcttccctgtcccttgaggcagatgtcatatccacttcagcttactgctctgactccctgcgttgtcatcctgctagttccctccccaatgagttaaataatcattgacatgtgcttactttgtatttgtatgagagtcatgtcttttgaacttaaaaaaaaattggcattgtatcatttactacataaggatttgactcaactcttagagctctcaagatttagtcttttgtttgacttgacatccaacctcagaacca

SEQ ID NO: 726043 - DNA, 966 bp, Homo sapiens
gtcattatttttctgtattgtattctggataattttttgaaatttgtcttacataatctgctgtttaaactgcaattcactttttaattttaataaaaatattttccatttatagaagtttcmtgttgttcttttttatatccacctgttcccttagacttcatttcatggaatctaattctttccttatatttttaatacttcaaacccacttcctttatagtttatataacattgcttttctgttatctgaagcccttgatgagttaatcatcctgccctgtctactacttttcatccttggtggattgttttctcaagcactttgtaagtcttaatggaagatgtgtttcaaagagcttttgctttatgttttttgttaatttcttggcttggacttgagactatatatcccatgtgcaaagttaaaataaaaaatttaaactagagcaagatactggcacagaggatttttttgcccatttgaaccattacggatataagcttcctggtaattttgctgggctcgtggggtcattgaagtttgcatatctttctttcactgggttgcagccctttgagactaccaacttttgtgggggtctcagcttcagctccctaacttaggtatccaaagacctcatgtactgatgtgtatttttgcaaacccgaatactagctactctcaacccagcaccctcccctttcttccctgtcccttgaggcagatgtcatatccacttcagcttactgctctgactccctgcgttgtcatcctgctagttccctccccaatgagttaaataatcattgacatgtgcttactttgtatttgtatgagagtcatgtcttttgaacttaaaaaaaaattggcattgtatcatttactacataaggatttgactcaactcttagagctctcaagatttagtcttttgtttgacttgacatccaacctcagaacca

SEQ ID NO: 726044 - DNA, 608 bp, Homo sapiens
ttatctacaaacctcagaatattgctgagttctgacaagaaacaaagaagccagaatacaatgaaatgatatattggaagggctaaaagaatataatagccaatcggccagtcacagtggctcacgcctataatcctagcactttaagaggctgagatgggtgaatcatctgagrtcaggagttcgagaccagcctggtcaacatgatgaaactccatctctagtaaaaacacaaaaattacccaggcatggtggtgggagcctgtaatcccagttacttgggaggctgaggcaggagaattgcttgaacccaggaggcagaggttgcaatgagccgagaccgcgccacttcactccagtctggctgaaagagcaaaactccatctcaaaatacaaaaaaagaatataatagccaatctagaattatcaggttgattgcaggatgggaaaactatatactccgtacagaaaaaatataagcataagtgtactgagaaatggaaagtaacagaatgggaacagatagcatccaaacactaaccaaatgaaagctggctatgttaatattagaaaaataaactttaaagcaaaaagcatgactggcaata

SEQ ID NO: 726045 - DNA, 608 bp, Homo sapiens
ttatctacaaacctcagaatattgctgagttctgacaagaaacaaagaagccagaatacaatgaaatgatatattggaagggctaaaagaatataatagccaatcggccagtcacagtggctcacgcctataatcctagcactttaagaggctgagatgggtgaatcatctgaggtcaggagttcgagaccagcctggtcaacatgatgaaactccatctctagtaaaaacacaaaaattacccaggcatggtggygggagcctgtaatcccagttacttgggaggctgaggcaggagaattgcttgaacccaggaggcagaggttgcaatgagccgagaccgcgccacttcactccagtctggctgaaagagcaaaactccatctcaaaatacaaaaaaagaatataatagccaatctagaattatcaggttgattgcaggatgggaaaactatatactccgtacagaaaaaatataagcataagtgtactgagaaatggaaagtaacagaatgggaacagatagcatccaaacactaaccaaatgaaagctggctatgttaatattagaaaaataaactttaaagcaaaaagcatgactggcaata

SEQ ID NO: 726046 - DNA, 608 bp, Homo sapiens
ttatctacaaacctcagaatattgctgagttctgacaagaaacaaagaagccagaatacaatgaaatgatatattggaagggctaaaagaatataatagccaatcggccagtcacagtggctcacgcctataatcctagcactttaagaggctgagatgggtgaatcatctgaggtcaggagttcgagaccagcctggtcaacatgatgaaactccatctctagtaaaaacacaaaaattacccaggcatggtggtgggagcctgtaatcccagttacttgggaggctgaggcaggagaattgcttgaacccaggaggcagaggttgcaatgagccgagaccgcgccacttcactccagtctggctgaaagagcaaaactccatctcaaaatacaaaaaaagaatataatagccaatctagaattatcaggttgattgsaggatgggaaaactatatactccgtacagaaaaaatataagcataagtgtactgagaaatggaaagtaacagaatgggaacagatagcatccaaacactaaccaaatgaaagctggctatgttaatattagaaaaataaactttaaagcaaaaagcatgactggcaata

SEQ ID NO: 726047 - DNA, 608 bp, Homo sapiens
ttatctacaaacctcagaatattgctgagttctgacaagaaacaaagaagccagaatacaatgaaatgatatattggaagggctaaaagaatataatagccaatcggccagtcacagtggctcacgcctataatcctagcactttaagaggctgagatgggtgaatcatctgaggtcaggagttcgagaccagcctggtcaacatgatgaaactccatctctagtaaaaacacaaaaattacccaggcatggtggtgggagcctgtaatcccagttacttgggaggctgaggcaggagaattgcttgaacccaggaggcagaggttgcaatgagccgagaccgcgccacttcactccagtctggctgaaagagcaaaactccatctcaaaatacaaaaaaagaatataatagccaatctagaattatcaggttgattgcaggatgggraaactatatactccgtacagaaaaaatataagcataagtgtactgagaaatggaaagtaacagaatgggaacagatagcatccaaacactaaccaaatgaaagctggctatgttaatattagaaaaataaactttaaagcaaaaagcatgactggcaata

SEQ ID NO: 726048 - DNA, 608 bp, Homo sapiens
ttatctacaaacctcagaatattgctgagttctgacaagaaacaaagaagccagaatacaatgaaatgatatattggaagggctaaaagaatataatagccaatcggccagtcacagtggctcacgcctataatcctagcactttaagaggctgagatgggtgaatcatctgaggtcaggagttcgagaccagcctggtcaacatgatgaaactccatctctagtaaaaacacaaaaattacccaggcatggtggtgggagcctgtaatcccagttacttgggaggctgaggcaggagaattgcttgaacccaggaggcagaggttgcaatgagccgagaccgcgccacttcactccagtctggctgaaagagcaaaactccatctcaaaatacaaaaaaagaatataatagccaatctagaattatcaggttgattgcaggatgggaaaactatatactcygtacagaaaaaatataagcataagtgtactgagaaatggaaagtaacagaatgggaacagatagcatccaaacactaaccaaatgaaagctggctatgttaatattagaaaaataaactttaaagcaaaaagcatgactggcaata

SEQ ID NO: 726049 - DNA, 1621 bp, Homo sapiens
tcagagctgaatgcccagtggccctcagcagtggggctccaggctgctgcagctgaacaggctctcagaaagcatttctcctccctccaactcccagaagccaaacatctgtgtggcctcggctccagggtttccagaggcctaagcctgggtctccacccctgaataaagcaggtttctgactcctctgagcgtgctcagctctgaccagctccagcttacaggggcttctcgctgcccgccagctccttggctcatgcctcagaccctccctggggccacagctgagcccccatgccctcccgttagcaggaattgtctcacagtgcaccagcctcagacaaggccacactgggacagtgaagggagggacagaactcagccagcccagaatgtcatctgagcacaggcaaaagccaggtctctgggcccatcagaaaagcttcaaacccccctctcctggctggtctgagccctgctgcctctttacgggtcacggctgcagcctcaccctcgtcccctctccctgcagataaggtttattgagatgcttggccacggggtcagcctgcatcctgacagtaccaacccagagcaaaccccactttctcaaatgcccccaaaagtcactcaacacaagccacatcctattacaagccctttctaaccccctcttggagaggccctgtgggtccccagggtatgcgtagcctgttgctgccatgagcgataaaccgacttgttctggcacaggttgtccctggtggtccttggygagaggacatgggcagcaccttctcacacgagcccttgctggcgtctcttccaggaatgccccaaacgctccctgggtgccccttccttcacccagactcacggctgattcttccctctcctgcaaacctccacaaggatggccctcctccaggaagccttcccaagcctccagactggcttcactgtccacatctgtgcccgcccccacgcccctctggtctccccagtgcttggggctggcccccacaacatgaaacacacaaggaaagttggggagtggcctagtcttcagcctgtcctgaccccaaaagccagcttcatcagcatatgagtctgtccaccccactgagccccctgcctggatggcagcagaaacaaagaaaaggtggaatgaaagcatttgatgtgtgtgcatccctgcccccaacactgtgaggatgctgaggagggcaagggatggagctgagttcccggacaatcctcttggggggccagaggcctcttgagaggcagacaccagacaccctgcagcaagtacgtccacatggaaagctccagaaagaagagaggttccaggatccgatttccagacccttcagagaatcctctggacctgggcttattttgacaatgagagtcttttgaaaacagtttttgtcaaaaccagggggcatttcttccaagaaggaaagaagccagagggtggcattcaggcagcaggagggcggtttgcatggtccttgcggtgggaggatgaccccctgctgaaggccagtccactgagctggcacctgcagaggggggcctggagtgttcacaggcgagcagcctccagccagggctg

SEQ ID NO: 726050 - DNA, 1621 bp, Homo sapiens
tcagagctgaatgcccagtggccctcagcagtggggctccaggctgctgcagctgaacaggctctcagaaagcatttctcctccctccaactcccagaagccaaacatctgtgtggcctcggctccagggtttccagaggcctaagcctgggtctccacccctgaataaagcaggtttctgactcctctgagcgtgctcagctctgaccagctccagcttacaggggcttctcgctgcccgccagctccttggctcatgcctcagaccctccctggggccacagctgagcccccatgccctcccgttagcaggaattgtctcacagtgcaccagcctcagacaaggccacactgggacagtgaagggagggacagaactcagccagcccagaatgtcatctgagcacaggcaaaagccaggtctctgggcccatcagaaaagcttcaaacccccctctcctggctggtctgagccctgctgcctctttacgggtcacggctgcagcctcaccctcgtcccctctccctgcagataaggtttattgagatgcttggccacggggtcagcctgcatcctgacagtaccaacccagagcaaaccccactttctcaaatgcccccaaaagtcactcaacacaagccacatcctattacaagccctttctaaccccctcttggagaggccctgtgggtccccagggtatgcgtagcctgttgctgccatgagcgataaaccgacttgttctggcacaggttgtccctggtggtccttggcgagaggacatgggcagcaccttctcacacgagcccttgctggcgtctcttccaggaatgccccaaacgctccctgggtgccccttccttcacccagactcacggctgattcttccctctcctgcaaacctccacaaggatggccctcctccaggaagccttcccaagcctccagactggcttcactgtccacatctgtgcccgcccccacgcccctctggtctccccagtgcttggggctggcccccacaacatgaaacacacaaggaaagttggggagtggcctagtcttcagcctgtcctgaccccaaaagccagcttcatcagcatatgagtctgtccaccccactgagccccctgcctggatggcagcagaaacaaagaaaaggtggaatgaaagcatttgatgtgtgtgcatccctgcccccaacactgtgaggatgctgaggagggcaagggatggagctgagttcccggacaatcctcttggggggccagaggcctcttgagaggcagacaccagacaccctgcagcaagtacgtccacatggaaagctccagaaagaagagaggttccaggatccgatttccagacccttcagagaatcctctggacctgggcttattttgacaatgagagtcttttgaaaacagtttttgtcaaaaccagggggcatttcttccaagaaggaaagaagccagagggtggcattcaggcagcaggagggcggtttgcatggtccttgcggygggaggatgaccccctgctgaaggccagtccactgagctggcacctgcagaggggggcctggagtgttcacaggcgagcagcctccagccagggctg

SEQ ID NO: 726051 - DNA, 656 bp, Homo sapiens
cgagctctgactccgaagaacaaatcacgcctgaggggcctgagtgtagaaagtaaggttaaatcactggaaccacgtatccatctgcaacggactgtgtgggtggtgtgcatgaaaagaacagagaagaaggtaggagaagctgcaggaggcagaaactggaggggaggctctgtctttrgagtagctgccactttgatatctctctttttttggaaatgctctctgctgctacttgtttgggagtttagcacagctagagaaatggctcatgaagcttgaggtgaggtggagatgaattccctctaatgaaaatccctgagccatcaaagtgcttcattagttccacacaagacctctaaggtgcgcaatggacatacggggctcttcagtgaaaagattattccccgtgtgctcatctggacactaaattctggtttaatcactattaaaactgtcctgagagaaaaaatggggcatgtgaaaatgagaacactcaaggtcatatttatccacattgtttagagtgaaaagtgtagctcatacaaagcttgcctggctactgaaaccacttcattgaaaaaaaaaaggccaataaatatgtccaagcctttgtacttccatttttgtaatctaaaatgttttggtttgtttta

SEQ ID NO: 726052 - DNA, 1554 bp, Homo sapiens
ttgttttaagatggagtctcaccctgtcacccaggctgcagtgcagtgatgcaatcttggctcactgcaacctccgcctcccgcgttcaagcaattctcctgcctcagcctcctgagtaggtggaattataggcgtgcaccccacacctgactattttttttttttttgtatttttactagagatggggtttcaccctgttgaccaggctggtcttgaactcctgatctcaagtgatccacccgccgtggtctcccaaaatgctgggattacagacatgagccaccacacccagccatagcatgtttgtatagttactgcatttcatcgccactaaactttgtgaggtaggctagggcatacattaacttttatttttattatttcttttctgtagacatggaaattgacccctagagaggtaagttaacttgccaaaggcactggacaaatttggggtagtgctgggaccagtactcaggaccttcagccgtaagacctgatttgttctatgacaccatgtccctcccgtcagcatcaagagatgtttgtccagagcctgggaggtataggcctttgagcaaagctctctggataggaaaacagatgtggtctccaccctgggaaggatttctattttctttgggagatgacccttattctaatccaattacttaccacacaaatagttcattggttttttggaaatatattgcaagcacaatcaagtttatacttcttttctgtgcccccagggattttatacattgccccacacccagcaggtgctttgtgtgttggttcaatgaagcttacattagagactaagagtggcagtttgatagaaagagtggagacattggaacctggtctgtgttcacgtcctgcctctgcactttctggttgtgtgacctaggcaggcatctgacccctcagtgcttcaggtacctcaactatgaaaggaagaccttagtaaataccacacagagtgatgcaaggactgtgacataatacagctatggtcttgagtatactacctggcacagagtaaggaggcaggaaatgttcactatactattattaggatgtgtaccttatcatcttcctaatactttcagcttgtcrttgttgagcctgcaaagtttcctgtatgtatttcagcacatgcttctgtagaatctaattgcaggtggttctcttttcttttcattcaggcgaggaggatcatcacattcaaagctatagttcaaccaagtgcaacttagcactgtaacttccttagctacagtcatgcctattaataggatcaacctgggaccttcttggcaggtgtcaactccacccacaaccaagttcaccaaaaacacaagttaaatttggaacaggaggctttgaacaagatgcccctggttgctacatgtggtactcttaccctaaatgcagtggctaggggagctgcattttagtgttacgatacttccgataggaccagcaactgctagaaactgctagaatcctattcaaaggattcctggagctcctttaatagagcaca

SEQ ID NO: 726053 - DNA, 1554 bp, Homo sapiens
ttgttttaagatggagtctcaccctgtcacccaggctgcagtgcagtgatgcaatcttggctcactgcaacctccgcctcccgcgttcaagcaattctcctgcctcagcctcctgagtaggtggaattataggcgtgcaccccacacctgactattttttttttttttgtatttttactagagatggggtttcaccctgttgaccaggctggtcttgaactcctgatctcaagtgatccacccgccgtggtctcccaaaatgctgggattacagacatgagccaccacacccagccatagcatgtttgtatagttactgcatttcatcgccactaaactttgtgaggtaggctagggcatacattaacttttatttttattatttcttttctgtagacatggaaattgacccctagagaggtaagttaacttgccaaaggcactggacaaatttggggtagtgctgggaccagtactcaggaccttcagccgtaagacctgatttgttctatgacaccatgtccctcccgtcagcatcaagagatgtttgtccagagcctgggaggtataggcctttgagcaaagctctctggataggaaaacagatgtggtctccaccctgggaaggatttctattttctttgggagatgacccttattctaatccaattacttaccacacaaatagttcattggttttttggaaatatattgcaagcacaatcaagtttatacttcttttctgtgcccccagggattttatacattgccccacacccagcaggtgctttgtgtgttggttcaatgaagcttacattagagactaagagtggcagtttgatagaaagagtggagacattggaacctggtctgtgttcacgtcctgcctctgcactttctggttgtgtgacctaggcaggcatctgacccctcagtgcttcaggtacctcaactatgaaaggaagaccttagtaaataccacacagagtgatgcaaggactgtgacataatacagctatggtcttgagtatactacctggcacagagtaaggaggcaggaaatgttcactatactattattaggatgtgtaccttatcatcttcctaatactttcagcttgtcattgttgagcctgcaaagtttcctgtatgtatttcagcacatgcttctgtagaatctaattgcaggtggttctcttttcttttcattcaggcgaggaggatcatcacattcaaagctatagttcaaccaagtgcaacttagcactgtaacttccttagctacagtcatgcctattaataggatcaacctgggaccttcttggcaggtgtcaactccacccacaaccaagttcaccaaaaacacaagttaaatttggaacaggaggctttgaacaagatgcccctggttgctacatgtggtactcttaccctaaatgcagtggctaggggagctgcattttagtgttacgatacttccgayaggaccagcaactgctagaaactgctagaatcctattcaaaggattcctggagctcctttaatagagcaca

SEQ ID NO: 726054 - DNA, 936 bp, Homo sapiens
gctgggattacaagcacgcgtcaccatgcccagctaatttttgtatttttagtagagacagagtttcaccatgttggccaggatggtctccatctcttgacctcgtgatccctccgcctcrgcctcccaaagtgctgagattacaggcgtgagccactgcacccagccaacatttatctttcaacatgactataccattaaaatttttaaaatatttctcagaattgtgttcttcagtcttttccataatatagtatatggaaattgctaatagcattaaattaatatgaataaaacccaattctatctaaacctttttctcataagaaaaaacattactttaaaaaacagactttttgtttcttctaaaagtagtactacttggactgctcaattgcaatgccaaatacttctggaaacaccataggaccaccaagctattcctattgccttgataaattcctttcctgctccaatttctccatgttcctgctttcttgtgtcaaaatatcttcccttaatttgttaaaatgaatctgagggaaaaaatctgataaactggggtaataaatttttttttcatggacttttatgatcacaaaatgaccaggcaacttatagcttcagtgctaacactgtgattgggaacaagaagagtacaaccacaataaaatacagctatctgttagaagaactgcataaagacatctttggccctctggaaaaaggttgtgggccctctggaaaaagtcagttgtattgccaacatgacaaagaaaatagcaatgttcaggatgaggaacaatctggtataggaagcagatagtgatgaggccctgctacgagtagttgtcaccatccatgcctgtccaacccggcctttcctcaagccccatttttatgtttctcatatgttatatctgcaaaatctaagag

SEQ ID NO: 726055 - DNA, 647 bp, Homo sapiens
tgtctcttgttttataatacaatttaaggctataattttcatttatttccagttttagctgaacktaaccacattttatataaagttgctctgctaacatgggtgggactggaggtcattatcttaagtgaataattcagaaagtcaaatacttcatgttctcacttataaatggctgctaaacaatgtgtacccacggacattcagagtggattcataaacattggaggctccaaacagtgatagggtgggtgagggggtgaaggatgagaaattattaacacctattggatacagcgttcgctatttgggtgatgggaatactaaaagcccagatttctccactagacaatatatacatgtaacaaaactactcttgtaccccataaactttaaataaataaataaataaaaatatattgttttattaacatttgattcgaagaattttatagtttttattattctattattctttgacccatacaatattaatatttcggtgttgtttcaaaatatttggtgactttgaatgtttaatttatttattatctaagaggttatacatggactacataaatgttttacaagtacaaaaagaaatactataaaaatttgtctcccttcctgctgcccaactagcatct

SEQ ID NO: 726056 - DNA, 647 bp, Homo sapiens
tgtctcttgttttataatacaatttaaggctataattttcatttatttccagttttagctgaacgtaaccacattttatataaagttgctctgctaacatgggtgggactggaggtcattatcttaagtgaataattcagaaagtcaaatacttcatgttctcacttataaatggctgctaaacaatgtgtacccacggacattcagagtggattcataaacattggaggctccaaacagtgatagggtgggtgagggggtgaaggatgagaaattattaacacctaytggatacagcgttcgctatttgggtgatgggaatactaaaagcccagatttctccactagacaatatatacatgtaacaaaactactcttgtaccccataaactttaaataaataaataaataaaaatatattgttttattaacatttgattcgaagaattttatagtttttattattctattattctttgacccatacaatattaatatttcggtgttgtttcaaaatatttggtgactttgaatgtttaatttatttattatctaagaggttatacatggactacataaatgttttacaagtacaaaaagaaatactataaaaatttgtctcccttcctgctgcccaactagcatct

SEQ ID NO: 726057 - DNA, 647 bp, Homo sapiens
tgtctcttgttttataatacaatttaaggctataattttcatttatttccagttttagctgaacgtaaccacattttatataaagttgctctgctaacatgggtgggactggaggtcattatcttaagtgaataattcagaaagtcaaatacttcatgttctcacttataaatggctgctaaacaatgtgtacccacggacattcagagtggattcataaacattggaggctccaaacagtgatagggtgggtgagggggtgaaggatgagaaattattaacacctattggatacagcgttcgctatttgggtgatgggaatactaaaagcccagatttctccactasacaatatatacatgtaacaaaactactcttgtaccccataaactttaaataaataaataaataaaaatatattgttttattaacatttgattcgaagaattttatagtttttattattctattattctttgacccatacaatattaatatttcggtgttgtttcaaaatatttggtgactttgaatgtttaatttatttattatctaagaggttatacatggactacataaatgttttacaagtacaaaaagaaatactataaaaatttgtctcccttcctgctgcccaactagcatct

SEQ ID NO: 726058 - DNA, 1412 bp, Homo sapiens
ggatttcaccatgttgcctaggctggtctcaaactcctgacctcaagtgatctgcccacctcggcctcccaaagtgctgggattataggtgtgagctttttttcctggccacaacttagcattaatcacttgactgacatagtgaattaattatgattacctccttgaaagaaaattatttacataaattatttgggatttttcttcatgatatggagatttttaatataaagaatcccattttacagaacaagtgagtttgactatttaaaggaaaagcaaagttctctcaggaatctatttattatttaaatctttcttgcagttaaactaccagatttcataattttgcatccagtatagtagtttgtaaagggtagatggttaatgtaactatgtttattgcattaatgttatagtcccctcaaattttgtgtattataaattgatcacaatcatttttctgatcaaaatgagccaaattttaaaaaatatatacattatggctgcatgaattactaatatatagtgataggatgcagagtaagagttaattgatattgagatgtgagattagctggggaattttaggatgataggtatgttttattatttgattgtagaagaaattgcatgggtatttacattcatcaaaactcatcaaactgtaccttaaaatgtgctcatttattgtgtaaattatacctcaataatattgatttttaaaagtaaaatatggaccaatttttcaagatttttaaactcagacaacagagaaatgcccaaaactgtgaggagaaataattctagaaaatgttcaaataaaccgaaatttaatagttaaaacgggagtatgtcagagagacaatcattacggcattattatctgccatcataatgcagtagtagtatgtaacaagcagtgtggccgtgtaacttgagtacaaatttctggttccttttgttcatagttatccggccacgtaaatgtcttcaccaaatgattctgcacagaagtgatgtgtacagcttctaccttgttgctttacagaaaatarcttgtctgaccttccctgagttccccttcctaacagttacagcatggatgtgcctgtaccccagctttgattatgcagattaagaaaagaacctaggtactgatgaagctagattactaaagaaacttgagtctctgaatgtccctatggagcagagtctcccaggcagccctacccaggagatgtacgtgtaagcgaagcaacattctttcttcttcaagccacagcttgtttattctgctttgaaagttaacctttccactaactgaaagcagaaggacccagggtgtttcatgctgaggtagtaggatgaataaaggcaaatatgcataagcagtgaatacacatgactcc

SEQ ID NO: 726059 - DNA, 1412 bp, Homo sapiens
ggatttcaccatgttgcctaggctggtctcaaactcctgacctcaagtgatctgcccacctcggcctcccaaagtgctgggattataggtgtgagctttttttcctggccacaacttagcattaatcacttgactgacatagtgaattaattatgattacctccttgaaagaaaattatttacataaattatttgggatttttcttcatgatatggagatttttaatataaagaatcccattttacagaacaagtgagtttgactatttaaaggaaaagcaaagttctctcaggaatctatttattatttaaatctttcttgcagttaaactaccagatttcataattttgcatccagtatagtagtttgtaaagggtagatggttaatgtaactatgtttattgcattaatgttatagtcccctcaaattttgtgtattataaattgatcacaatcatttttctgatcaaaatgagccaaattttaaaaaatatatacattatggctgcatgaattactaatatatagtgataggatgcagagtaagagttaattgatattgagatgtgagattagctggggaattttaggatgataggtatgttttattatttgattgtagaagaaattgcatgggtatttacattcatcaaaactcatcaaactgtaccttaaaatgtgctcatttattgtgtaaattatacctcaataatattgatttttaaaagtaaaatatggaccaatttttcaagatttttaaactcagacaacagagaaatgcccaaaactgtgaggagaaataattctagaaaatgttcaaataaaccgaaatttaatagttaaaacgggagtatgtcagagagacaatcattacggcattattatctgccatcataatgcagtagtagtatgtaacaagcagtgtggccgtgtaacttgagtacaaatttctggttccttttgttcatagttatccggccacgtaaatgtcttcaccaaatgattctgcacagaagtgatgtgtacagcttctaccttgttgctttacagaaaataacttgtctgaccttccctgagttccccttcctaacagttacagcatggatgtgcctgtaccccagctttgattatgcagattaagawaagaacctaggtactgatgaagctagattactaaagaaacttgagtctctgaatgtccctatggagcagagtctcccaggcagccctacccaggagatgtacgtgtaagcgaagcaacattctttcttcttcaagccacagcttgtttattctgctttgaaagttaacctttccactaactgaaagcagaaggacccagggtgtttcatgctgaggtagtaggatgaataaaggcaaatatgcataagcagtgaatacacatgactcc

SEQ ID NO: 726060 - DNA, 1412 bp, Homo sapiens
ggatttcaccatgttgcctaggctggtctcaaactcctgacctcaagtgatctgcccacctcggcctcccaaagtgctgggattataggtgtgagctttttttcctggccacaacttagcattaatcacttgactgacatagtgaattaattatgattacctccttgaaagaaaattatttacataaattatttgggatttttcttcatgatatggagatttttaatataaagaatcccattttacagaacaagtgagtttgactatttaaaggaaaagcaaagttctctcaggaatctatttattatttaaatctttcttgcagttaaactaccagatttcataattttgcatccagtatagtagtttgtaaagggtagatggttaatgtaactatgtttattgcattaatgttatagtcccctcaaattttgtgtattataaattgatcacaatcatttttctgatcaaaatgagccaaattttaaaaaatatatacattatggctgcatgaattactaatatatagtgataggatgcagagtaagagttaattgatattgagatgtgagattagctggggaattttaggatgataggtatgttttattatttgattgtagaagaaattgcatgggtatttacattcatcaaaactcatcaaactgtaccttaaaatgtgctcatttattgtgtaaattatacctcaataatattgatttttaaaagtaaaatatggaccaatttttcaagatttttaaactcagacaacagagaaatgcccaaaactgtgaggagaaataattctagaaaatgttcaaataaaccgaaatttaatagttaaaacgggagtatgtcagagagacaatcattacggcattattatctgccatcataatgcagtagtagtatgtaacaagcagtgtggccgtgtaacttgagtacaaatttctggttccttttgttcatagttatccggccacgtaaatgtcttcaccaaatgattctgcacagaagtgatgtgtacagcttctaccttgttgctttacagaaaataacttgtctgaccttccctgagttccccttcctaacagttacagcatggatgtgcctgtaccccagctttgattatgcagattaagaaaagaacctaggtactgatgaagctagattactaaagaaacttgagtctctgaatgtccctatggagcagagtctcccaggcagccctacccaggagatgtacgtgtaagcgaagcaacattctttcttcttcaagccacagcttgtttattctgctttgaaagttaacctttccactaactgaaagcagaaggacccagggygtttcatgctgaggtagtaggatgaataaaggcaaatatgcataagcagtgaatacacatgactcc

SEQ ID NO: 726061 - DNA, 615 bp, Homo sapiens
ttttgatccctggataaacccagacactacccccatagttgaaaaaatgccactaaattgcattatatgtagggttttgcattctgsttttttgtgttccattacatcttgagcattttcctatgacataatcatagaaaaaccatatctgagaatgtaatttttaataggtctataatattctaagatatatatatatacatatatatatgcctttatttatttgactggtagtgtgacaagtcccccaccaggatacttaagggtatatgtctgctgcctgaaccctgaagactgggcagtgactcacagtcatgatgccctgcagagaactaaacaagtgtccctgaaaacccaaatatcccggagagtatctgagaacctaccaagaaaaacagtctcattgctcaaacacagcaggcaaagagccagaaattagcttaaaagcagtttagagatgggaggtggtgcggatctcgagagctgtcccgccaccatccaggagtgccctgtgcataagtcctaataaactcatctactcgttaagctggactcgttcaagtcattctttggtctcttcattccttctcagtttggagggaacattaaagttcc

SEQ ID NO: 726062 - DNA, 2297 bp, Homo sapiens
ccaacacggtgaaaccccatctctagtaaaaatacaaaaattagcctggtgtgatggtgcacacctgtaatcccagctactcaggaggctcaggcaagagaatcgcttgaacacaggaggcgagtttgcagtgagcagagatcgcgccactacactccagcctgggtgacagagtgagactctgtctcgaaaaacaaaaacaaacaaacaaacaaaaagaattatgctcaattccctgtcattgttgttttttccccagctctttactggtgagaagatagcaaaagctgaagcagacacagaatccacaagtggaaaatacagcagtgccattaaaggtaataaaagataaagtttatctttcttccaagctctttattttaatttcttataggatttttgttactttttaatgttgttttaagtaaagaagactaaaagtttaaatcagtataaattttcatttttatattgtgccacacccattttaaatgcaaatataagagcayttaactcgtgtcgaatcacaaaaattacaatttgtattttgtggttcatacatggatatgtagttcattcttaccagaagagtaggaacaatgcacacacaaaaaattcaactgtttttatttcactgcttgataaaatatgttctatcaacatgctttgccttctacctactgatgagtaaggaaggactgacaggaaaaggaactacaggttaccctattgttccctttctgtgttattttcaaagtaagttcctggctgatacagggaagtagcacaagtaataaaggatgtggtggggttcctttgttgttcatgtttctaacaatgccattgctttctttctgaaacagaagcaagtctagtttgaatggaatgcttggccttttgggatctgtcagtactctctcccagacccctgttagtcatagacataacacacttaacttgtactcacttggagtctccccaaactcccatgcatcgtgggtctactgggattctgtggtcagagagcattgccgttactacattcaaacatggtggcatgacatgatatacctactgtgaatgacaggtgtcatacaaaggaaggacagatgcacctactgtgtattcctctgtttatgtgcatgcttcattgtcccattggatttgacttacaaaatacaaattcaaagatgaaattatgaagaatttcaagatggcagcagcagagcattaggctacacattgggcccttctgattgtggggctctgtgtgactgcacaagacaaaccctcataaagccagctctgggtggcggagccctggactgcctgcctactggatgttaaatgagattgaaataaattttgacctagtttaagctgttgtattttgaggtcccttttatacactttgcatcctgacttatgaaaacacttttagttctcaaaacgtactgccaattgcataacaaagagactatgtccctatgtttagttaacacccccatgagcagtatatgaccacaaatgtttccctctgctcttgctattgtctctattttgatatttcaacagcatgcccaattcaaaatgccccaaaccaaactcatctctcctccaatatcaaacacagacacaatatcaaacacagcaactaatatttatttagcttttaacatgtaccaagcgttttgcaggcttatttcatttattaggtatcatcattcattgtggccattttccagatgaggaaatggaagcttatgtaacttactgaaggtaatactgagctgagatatgatttcagtatttatggctccaaagcctatgagcataccacttgtctctccttttctatgatggcaaaataattcctaaaacaatggtggtgtgattgggaaaagaaatgtttttctttacatcttgcagcaaatcaatgtctacaataaattcagaattctagtatcctgtcagatcactctgttcccatcatttctaccattgccaacacaccctgaaaactagtgtattcacctgggagagtttgctcagggaagcgagggtttttaaaaatccccctagtgacctcttgtggctgatggacaccctgctgagaccctgcctctggaatctacctggcttgctgcttcatgttcacccctccccgggctacagaaaaagggctccaaggaaatcagagttaggaaatgggtcgtccctggtttcaaacaaagggcatcattccaatatgtgtcaaaaataagctcagaaaatttgtaagagagatgggttttctg

SEQ ID NO: 726063 - DNA, 939 bp, Homo sapiens
atgaatgtattgaaagctggcactggtgagagagggcctcctcgtgggatgstgtttgcagtgagtgtattgaaggctggcactggtgagagagggcctcttcatggggtggtggcttgtcatgagtttatcagggaagatcaagtaggatggggattctttggaggcgctttactctctgcagcatggacgtggttcggccgagaaacagcaggacgaagaatgatttaagggtgttaacagttgatccctagtatggcccagggtaaatcagtgctgaggactgctgggaacatgataaccctttctgaacatgaggagatgaagatataatagatagaaataatagccatggtgaggaatccttcttagcaggtagaagatggggggtgtgacgtggaggtcttggtgtgtgcctgcgtatgttgagagttgtatggtcggtccttttgtgatgcagggacagctcactcaaacctgcggtggttggctgagactggatgtcagctgtacatgggaaaccaagggcacctccagggatcttggtaccactcatggcccctcggaaccctgaagatgaaactcatcccatgttcgtggagtttcatacagccccacctgcatcttgggtggctcacctcaaaggcggtgtggttatttttagctgcagaaggtggttccatcctctgtgtggtttgaggctgtggttccacttccccttgctgcgttgtgctgtgcagacttcgacagtggctgtacccctgtggcatgggactagttcttcacccagggcacatggcacaggcattttagggactgggaaacaggcagaattcttggtagcttcttgaataaagaaggtgcatggacgtaggccatttaaaatgttcctctgtcttaatttgggaatataaccttcatcctatatggggttcagaa

SEQ ID NO: 726064 - DNA, 939 bp, Homo sapiens
atgaatgtattgaaagctggcactggtgagagagggcctcctcgtgggatggtgtttgcagtgagtgtattgaaggctggcactggtgagagagggcctcttcatggggtggtggcttgtcatgagtttatcagggaagatcaagtaggatggggattctttggaggcgctttactctctgcagcatggacgtggttcggccgagaaacagcaggacgaagaatgatttaagggtgttaacagttgatccctagtatggcccagggtaaatcagtgctgaggactgctgggaacatgataaccctttctgaacatgaggagatgaagatataatagatagaaataatagccatggtgaggaatccttcttagcaggtagaagatggggggtgtgacgtggaggtcttggtgtgtgcctgcgtatgttgagagttgtatggtcggtccttttgtgatgcagggacagctcactcaaacctgcrgtggttggctgagactggatgtcagctgtacatgggaaaccaagggcacctccagggatcttggtaccactcatggcccctcggaaccctgaagatgaaactcatcccatgttcgtggagtttcatacagccccacctgcatcttgggtggctcacctcaaaggcggtgtggttatttttagctgcagaaggtggttccatcctctgtgtggtttgaggctgtggttccacttccccttgctgcgttgtgctgtgcagacttcgacagtggctgtacccctgtggcatgggactagttcttcacccagggcacatggcacaggcattttagggactgggaaacaggcagaattcttggtagcttcttgaataaagaaggtgcatggacgtaggccatttaaaatgttcctctgtcttaatttgggaatataaccttcatcctatatggggttcagaa

SEQ ID NO: 726065 - DNA, 939 bp, Homo sapiens
atgaatgtattgaaagctggcactggtgagagagggcctcctcgtgggatggtgtttgcagtgagtgtattgaaggctggcactggtgagagagggcctcttcatggggtggtggcttgtcatgagtttatcagggaagatcaagtaggatggggattctttggaggcgctttactctctgcagcatggacgtggttcggccgagaaacagcaggacgaagaatgatttaagggtgttaacagttgatccctagtatggcccagggtaaatcagtgctgaggactgctgggaacatgataaccctttctgaacatgaggagatgaagatataatagatagaaataatagccatggtgaggaatccttcttagcaggtagaagatggggggtgtgacgtggaggtcttggtgtgtgcctgcgtatgttgagagttgtatggtcggtccttttgtgatgcagggacagctcactcaaacctgcggtggttggctgagactggatgtcagctgtacatgggaaaccaagggcacctccagggatcttggtaccactcatggcccctcggaaccctgaagatgaaactcatcccatgttcgtggagtttcatacagccccacctgyatcttgggtggctcacctcaaaggcggtgtggttatttttagctgcagaaggtggttccatcctctgtgtggtttgaggctgtggttccacttccccttgctgcgttgtgctgtgcagacttcgacagtggctgtacccctgtggcatgggactagttcttcacccagggcacatggcacaggcattttagggactgggaaacaggcagaattcttggtagcttcttgaataaagaaggtgcatggacgtaggccatttaaaatgttcctctgtcttaatttgggaatataaccttcatcctatatggggttcagaa

SEQ ID NO: 726066 - DNA, 853 bp, Homo sapiens
tctctcttcacccctcccttacacacacggacacacacacacaccacgaacacacgcatcaaacgcaaacgacgccgcacacgcaaacacactagcaccacatcaagttcccaccatggtgcacacgtcgggagcgcgcggggacacacacgccactcactcaaacccgcaattagccctttgagccccaggcacaggaaccccctccctagaactggagaagacttggaggcggcggggcggccaggtgaagagcggacaagggtgccggtagggggaggggcagaggagcgcggggacgccccgaatgcggcccggggccgggtccaagggcagcggggctgcggggcgctgcacccggcgccgccttacctggagtcaatgtccgtctttggcggagagctgcgggmggacgctttttattcggctcggtgggaacttgggagagccctgcgtgcagctcgcattccgggcacggcgcggggactgcaggcgtgggggtacctggctcctagcagcctggctcatactcagccgtaaagtccccttcgctggtcccgaggacaggcatgaatcccggctccggaaggcggtcactactccctctgcctcccggctctctcgctctcgctctcgctgttgctcgctcgctctctccctctctcgcgggttcgctcgcctgcgctctcctcctccccgcgcgccagatcagtttgcagccgtggggtccgggagcgaggcggctggcgaatggagagggaagtccaagtgcgccgcggtctccgggcggggagcggcggaggccgggctacgccgggggagggacttagccggcgacggccgaaaatgaatg

SEQ ID NO: 726067 - DNA, 853 bp, Homo sapiens
tctctcttcacccctcccttacacacacggacacacacacacaccacgaacacacgcatcaaacgcaaacgacgccgcacacgcaaacacactagcaccacatcaagttcccaccatggtgcacacgtcgggagcgcgcggggacacacacgccactcactcaaacccgcaattagccctttgagccccaggcacaggaaccccctccctagaactggagaagacttggaggcggcggggcggccaggtgaagagcggacaagggtgccggtagggggaggggcagaggagcgcggggacgccccgaatgcggcccggggccgggtccaagggcagcggggctgcggggcgctgcacccggcgccgccttacctggagtcaatgtccgtctttggcggagagctgcgggaggacgctttttattcggctcggtgggaacttgggagagccctgcgtscagctcgcattccgggcacggcgcggggactgcaggcgtgggggtacctggctcctagcagcctggctcatactcagccgtaaagtccccttcgctggtcccgaggacaggcatgaatcccggctccggaaggcggtcactactccctctgcctcccggctctctcgctctcgctctcgctgttgctcgctcgctctctccctctctcgcgggttcgctcgcctgcgctctcctcctccccgcgcgccagatcagtttgcagccgtggggtccgggagcgaggcggctggcgaatggagagggaagtccaagtgcgccgcggtctccgggcggggagcggcggaggccgggctacgccgggggagggacttagccggcgacggccgaaaatgaatg

SEQ ID NO: 726068 - DNA, 843 bp, Homo sapiens
catcaatgaaacaaaaagttgattatttgaaaagataaatagaattgatccagcactagatagtttaacgaagaagagagaggattcatataagctcaattagaaatgaaaatggggacatcacaamtgacaccacataaatatgaaagatcatttgagactactataaatacctctgtgcacatcaactagaaaatctagaggaaatgaatacatttctggaaacatacaatcaccctagcttgaatcaggaataaatagaaatcctgaacagaccaaaacaagcagaaatattgaattcctaattaaaaaaaacactgccaacaaacaaatagccaaattctgtcagacattcagagaattgatacaaattctactgaaattattccatcagattgagagagaatgctccctagctcatactacaatgccagtatcactccaaaactacagaccaatatatctgatgaacgttagatgcagaaatcctaagcaaaataccagaaaactaaattccacaacctatcaaaaaaataattcatcatgatcatgccagtttcattccagagatgaaaggttcaacatatgcacatcaataaatgtcatttatcaaataaatggaattaaaaaccatatgatcatctcaatagatgcagaaaaatcattagataaaatccagcatcctgttatgataaaaaatcctcaacaaactaggcatagatgaaacatacctcaaaataataaaagccatgtatgacaaacccacagcccacatcatactgaaaggggaaagttaaaagcattccctctgagaactggaatgagacaagatgcccactttca

SEQ ID NO: 726069 - DNA, 596 bp, Homo sapiens
cgagaccagcctggccaacgtggtgaaaccctatctctactaaaaatacaaaaaattagccaggcgtggtggcaggtgcctgtaatcccagctactcggtaggctgaggcaagagctactctcagcctctgctttctcatctgtaaaataaggaggctatgccaggtgcagtggctcacgcttgaacccaggaggcggaggttgcagtgagctgagatcacaccattgcactccagcctgggcaacaagagcaaaactccgtctcaaaaaaagaaaaaaaaaaattagccaggtgtgatggtgcgtacctgcagtcccagctagttgggaggctgaggcaggagaattgcttgaacccaagaggcagaggttgcagtgagctgagattgtgccactgcacttgagcctgggcaacagagcragactccatctcaaaaaaaaaaaaaaaaaaaaatttgtggagtgactcatccttcttgtgcaggcctcggcccagctcatcagttggtctctgagcaagtctgtccttcactcaaacacccaccgccctgacctcttgcgtgtgtgggctcacagtgcaggctcctactgtgggg

SEQ ID NO: 726070 - DNA, 626 bp, Homo sapiens
agaggaatgcacttcttaaaggcagcacacagcccagccttacttgaggcctcttttcaatgcttcgaagatcttcttcacctgctggggcttcgggtctgcacagaccgaccccttccgcagcgtgccgtacatcttggaggattttgcaggcattcgcgatctcacggagttcctgttgatggactttctgtgagaagggttggagggcaagagaagtcagagaagggccctgacaaagccctccccaggggcaggcactttggaaatagtgaccagagccacagggagtcaggagacccggctcagtcccacccccatcaccaccaagcagtgtggtttccagaaagttatggagcctctctgggtctctgctttctcatctgtaaaattaggatcctgggccaggtgcggtggctcacacttgtaatcccagcacttcgggaagctgaggtgggtggatcacctgagatcaggggttcaagaccagtctggccaacatggcgaaaccctgtctctactaaaartacaaaaattagccggatgtggtggtatgtgcctgtaatcccacttactccggaggctgaggcacaagaatcgcttgaacccaggaggtggaggtttca

SEQ ID NO: 726071 - DNA, 626 bp, Homo sapiens
agaggaatgcacttcttaaaggcagcacacagcccagccttacttgaggcctcttttcaatgcttcgaagatcttcttcacctgctggggcttcgggtctgcacagaccgaccccttccgcagcgtgccgtacatcttggaggattttgcaggcattcgcgatctcacggagttcctgttgatggactttctgtgagaagggttggagggcaagagaagtcagagaagggccctgacaaagccctccccaggggcaggcactttggaaatagtgaccagagccacagggagtcaggagacccggctcagtcccacccccatcaccaccaagcagtgtggtttccagaaagttatggagcctctctgggtctctgctttctcatctgtaaaattaggatcctgggccaggtgcggtggctcacacttgtaatcccagcacttcgggaagctgaggtgggtggatcacctgagatcaggggttcaagaccagtctggccaacatggcgaaaccctgtctctactaaaaatacaaaaattagccggatgtggtggtaygtgcctgtaatcccacttactccggaggctgaggcacaagaatcgcttgaacccaggaggtggaggtttca

SEQ ID NO: 726072 - DNA, 626 bp, Homo sapiens
agaggaatgcacttcttaaaggcagcacacagcccagccttacttgaggcctcttttcaatgcttcgaagatcttcttcacctgctggggcttcgggtctgcacagaccgaccccttccgcagcgtgccgtacatcttggaggattttgcaggcattcgcgatctcacggagttcctgttgatggactttctgtgagaagggttggagggcaagagaagtcagagaagggccctgacaaagccctccccaggggcaggcactttggaaatagtgaccagagccacagggagtcaggagacccggctcagtcccacccccatcaccaccaagcagtgtggtttccagaaagttatggagcctctctgggtctctgctttctcatctgtaaaattaggatcctgggccaggtgcggtggctcacacttgtaatcccagcacttcgggaagctgaggtgggtggatcacctgagatcaggggttcaagaccagtctggccaacatggcgaaaccctgtctctactaaaaatacaaaaattagccggatgtggtggtatgtgcctgtaatcccacttactccggaggctgaggcacaagaatcgcttgaacccrggaggtggaggtttca

SEQ ID NO: 726073 - DNA, 1063 bp, Homo sapiens
ggagacaggcacagagatgcttgctgagagctgcttatcataggaaatgatgggaaataactgaaatgctcatccaataatgactgcttgaacaagatgtgaaagatatggtacatcaggcagcggttttttgttttttgtttcctgacaatgggccttgtctgtcatccaggctgaagtacagtggtgtgatctcagctcactgcaacctccatctgctgggctcaagcaatcctcctgcctcagcctcccaagcagctgggaccagagacgtgacccaccatgcctggctaatttttttaaaacattttttgtagagtcagggtcttgccatgtttcccaggttgggatgaggcagcaaggtacttttttttcttatttttttatttttaaaaataaagatggtgtctcactatgttgaccaggctggactcaaactcttggcctcatgtgatcctctcatcttgttctcctaaagtgctaggattacaggcatgagccactgtgtcagcttagccagcagttttaaaagagctatgtctgtattgaagagcagaggtggatctccaagacatattactgartgaaaagggggtcagcatgatacatttggtagaatgctgattgtgtaacattccccctttacacacataaaatgaaacactgtggaaacacttagacagcaagacaggctggaaggatgtaaaccaaactgagttgctacctctgggaaaagagtttgggagtgacgcttttacctgtaatcctttcatttctaaaagtgagaatagattggtctgttacttttgtcccagccatcttccttctttttaaaaaatgtgttttattttttatttaaacggagtctcgctctgtttcccaggctggagtgcagtggcacgatcttggctcactgcaacctccacctcccaggttcaagcaattctcctgcctcagcttcccaagtagctgggattacaggtgcctgccaccacgcctggctaatttttgtatttttagtagagactgcttttcaccatgttggccaggctggtctctaacc

SEQ ID NO: 726074 - DNA, 2416 bp, Homo sapiens
gtggacagagctagatatccaattgtttttaaagggaaaacacaaggccaggcgtggtggctcacacctgtaatcccagcattttgggaggccgaggccggtggatcacctgaggtcaggagttcaagaccagcctggccaatatggtgaaaccctgtctctactaaaaatgcaaaaaaaaaaaaaaaaaaaaaaaaaaaaatagctgggcaaggtggcaggctactctggtggctgaggcaggagaatggcttgaacccagaggtggaggttgcagtgagctgagatcacaccattggactacagcctgggtgacagaccaagactctatctcaaaaacaaaaacaaaaataaaaaacacagagggttcctgttgctacttccaattccaaaccagaatgaccttctcctgtgcagagaatcccagatttcagggcaaaggaggggaaggacaaagtagaaagtcacacaactgtgcctgcttgatccaaagcacacacgacagtctcacagcccagtgctagtccgctacccacagtgcaatcactgcaaacagctccagttgtttcctcaagttcctttggttctgggatataacccactagggctatatgtaagctccgaggattggcttttaatattcctggcagctgagaagaacaaggtgccgtgaagagccacagcccctccagaaactgcacctgggcagcgggccgtgtggccacagctgagaccctgaggagtgggtccccaggggactggtctcggggagaggggctgcctcttaaaacacgacgatggacagacagatggatacgttcaacagcagcatgaacaagttctacaactagaaatcattatttgtaaaggaaaaacccatttacgagttgaatcagaggagaggctcgtgtctctgagttctgaattcatgtggggaggaacaaatagaggaattacctgaaacgtaaagcaaaaatactgcctcgaggaagttatgagggaaaagagattttgagaacagatccagtagccccatatgcaaataatagggaaataaaatataatagaaaaaaggccgggcgcgatggctcacgcctgtaatccctacattttgggaggctgaggtgggcagatcacttgaggtcaggagttcgagaccagcctggctaacatggagaaaccccatctctactaaaaaatataaaatacaaaaaattagccgggcatggtggcaggcacctgtaatcccacctacactcgggaggctgaggcaggagaatcacttgaaaccatgaggcagaggttgcagtgagccgagattgtgccactgcactccagcctgggcaacatagtgagaccctgtctccaaaataaataaataaataaataaataaaagaagacggactgatgtttacaaagcattcagaggaaagggctctgccctgacactctataccccagcatggataataataataatcagtgatataataatagccgatgcccatggacagttttccctatccaggcacagcttcagtgttgtctgagcttgtttaatttgtttcctctccttaaggagaaacatattagaattatctccatctcacaagcacagacaggtcaagtgacttatgcaccatcacacaaccagggttagaaaccagaaaaccgggccaggtgcggtggctcacgcctgtaatcccagcackttgggaggccgaggcgggctgatcacgaggtcaggagatcaagaccatcctggctaacacagtgaaaccccgtctctactaaaaaaaaatacaaaaaatcagccgggcgtggtggcgggcgcctgtagtcccagctacttgggaggctgaggcaggagaacagtgtgaacccaggaggcagagcttgcagtgaggcgagatggcgccactgccctccagcctgggcgacagagcgagactccgtctcaagaaaaaaaaaaaaaaaaaaaaaaaaaaaggaaaccagaaaacctggctttgggatgggtctgtgttctcagccactctctcactgcctctgcagatagaatgcatgggtcacagagaaagaaagacatgtccaggttggcaaggatgaagggaagatgacctccggaccctcctctgagcagacgagcatggacttagcacagagccggcaggaggaagaggaaggagggctactcacctccgtgagacattcaaggcgacgtgagagccaccggaaagtgaggtttgagtgtggaatcaggagcatgcgatagagaggcatcccacggctgacctcctaggcctgggggtgtaagtggccagaagcccccgggggctcaggcgcggtggggagaaggtgcacccagtccctggtggagggtggcgttccggttcctgtcctgcaggactggga

SEQ ID NO: 726075 - DNA, 2416 bp, Homo sapiens
gtggacagagctagatatccaattgtttttaaagggaaaacacaaggccaggcgtggtggctcacacctgtaatcccagcattttgggaggccgaggccggtggatcacctgaggtcaggagttcaagaccagcctggccaatatggtgaaaccctgtctctactaaaaatgcaaaaaaaaaaaaaaaaaaaaaaaaaaaaatagctgggcaaggtggcaggctactctggtggctgaggcaggagaatggcttgaacccagaggtggaggttgcagtgagctgagatcacaccattggactacagcctgggtgacagaccaagactctatctcaaaaacaaaaacaaaaataaaaaacacagagggttcctgttgctacttccaattccaaaccagaatgaccttctcctgtgcagagaatcccagatttcagggcaaaggaggggaaggacaaagtagaaagtcacacaactgtgcctgcttgatccaaagcacacacgacagtctcacagcccagtgctagtccgctacccacagtgcaatcactgcaaacagctccagttgtttcctcaagttcctttggttctgggatataacccactagggctatatgtaagctccgaggattggcttttaatattcctggcagctgagaagaacaaggtgccgtgaagagccacagcccctccagaaactgcacctgggcagcgggccgtgtggccacagctgagaccctgaggagtgggtccccaggggactggtctcggggagaggggctgcctcttaaaacacgacgatggacagacagatggatacgttcaacagcagcatgaacaagttctacaactagaaatcattatttgtaaaggaaaaacccatttacgagttgaatcagaggagaggctcgtgtctctgagttctgaattcatgtggggaggaacaaatagaggaattacctgaaacgtaaagcaaaaatactgcctcgaggaagttatgagggaaaagagattttgagaacagatccagtagccccatatgcaaataatagggaaataaaatataatagaaaaaaggccgggcgcgatggctcacgcctgtaatccctacattttgggaggctgaggtgggcagatcacttgaggtcaggagttcgagaccagcctggctaacatggagaaaccccatctctactaaaaaatataaaatacaaaaaattagccgggcatggtggcaggcacctgtaatcccacctacactcgggaggctgaggcaggagaatcacttgaaaccatgaggcagaggttgcagtgagccgagattgtgccactgcactccagcctgggcaacatagtgagaccctgtctccaaaataaataaataaataaataaataaaagaagacggactgatgtttacaaagcattcagaggaaagggctctgccctgacactctataccccagcatggataataataataatcagtgatataataatagccgatgcccatggacagttttccctatccaggcacagcttcagtgttgtctgagcttgtttaatttgtttcctctccttaaggagaaacatattagaattatctccatctcacaagcacagacaggtcaagtgacttatgcaccatcacacaaccagggttagaaaccagaaaaccgggccaggtgcggtggctcacgcctgtaatcccagcactttgggaggccraggcgggctgatcacgaggtcaggagatcaagaccatcctggctaacacagtgaaaccccgtctctactaaaaaaaaatacaaaaaatcagccgggcgtggtggcgggcgcctgtagtcccagctacttgggaggctgaggcaggagaacagtgtgaacccaggaggcagagcttgcagtgaggcgagatggcgccactgccctccagcctgggcgacagagcgagactccgtctcaagaaaaaaaaaaaaaaaaaaaaaaaaaaaggaaaccagaaaacctggctttgggatgggtctgtgttctcagccactctctcactgcctctgcagatagaatgcatgggtcacagagaaagaaagacatgtccaggttggcaaggatgaagggaagatgacctccggaccctcctctgagcagacgagcatggacttagcacagagccggcaggaggaagaggaaggagggctactcacctccgtgagacattcaaggcgacgtgagagccaccggaaagtgaggtttgagtgtggaatcaggagcatgcgatagagaggcatcccacggctgacctcctaggcctgggggtgtaagtggccagaagcccccgggggctcaggcgcggtggggagaaggtgcacccagtccctggtggagggtggcgttccggttcctgtcctgcaggactggga

SEQ ID NO: 726076 - DNA, 815 bp, Homo sapiens
ctgcagtggaaaagctctcattaggacaagcacaggtttttatggatgtgtttttatcactaactggctgtgagtctcctcaaagtcaatgcttctctgcaggcccttgctayccagcttgttcacctttaagctggggtgagggagggtgggtataaggacaagatgatatgaaagaaatataaagagaaaaaaatgtaataccaataaaactggtcattatgaaactttcttcattggacaacccaacaatataaataacagcgtggcatattgactgaagtcaggtaaattgtaagaattaaataaaataatataaatataatctctgtcatttactaaacattcggtcttgaatgagttatttcccttaacctcagttttcatacttatatactagagctaatatttccaaaaattggaataaggaacaggctaatcatgctactgtctaaggtattgatccacagcagtgccagaagaccaatagacaggattgaagctttgctgttagttgactcgagtccccacacatggctcctgataaaactggtgatgtgtccttggttctcttttgaccaaagcagtcaaagccctccagttgacatttaaaaacttctttatttatagacctaactccaaataaataaatgtacaaacatataaataatatctatttgaagggacactatattagtgaggatagtttatcatatagtgccataataaataactctaaaatctcagtgactcaaaaaatagaggtatatttcttactcactcaatgtcttggttggctgttcttcagtttgaat

SEQ ID NO: 726077 - DNA, 815 bp, Homo sapiens
ctgcagtggaaaagctctcattaggacaagcacaggtttttatggatgtgtttttatcactaactggctgtgagtctcctcaaagtcaatgcttctctgcaggcccttgctatccagcttgttcacctttaagctggggtgagggagggtgggtataaggacaagatgatatraaagaaatataaagagaaaaaaatgtaataccaataaaactggtcattatgaaactttcttcattggacaacccaacaatataaataacagcgtggcatattgactgaagtcaggtaaattgtaagaattaaataaaataatataaatataatctctgtcatttactaaacattcggtcttgaatgagttatttcccttaacctcagttttcatacttatatactagagctaatatttccaaaaattggaataaggaacaggctaatcatgctactgtctaaggtattgatccacagcagtgccagaagaccaatagacaggattgaagctttgctgttagttgactcgagtccccacacatggctcctgataaaactggtgatgtgtccttggttctcttttgaccaaagcagtcaaagccctccagttgacatttaaaaacttctttatttatagacctaactccaaataaataaatgtacaaacatataaataatatctatttgaagggacactatattagtgaggatagtttatcatatagtgccataataaataactctaaaatctcagtgactcaaaaaatagaggtatatttcttactcactcaatgtcttggttggctgttcttcagtttgaat

SEQ ID NO: 726078 - DNA, 1281 bp, Homo sapiens
gcaacatgagagttccagttgctctacatcgttgtcaatatttggtgctttcaatcttcttaattttagccatcctaatatgtatatataggtatcacattgtgattttttttcttttctttttttgagatgaaacttcactcttgttgcccaggctggagtgcaatggcacgatctcagctcactgcaacctccacctcctgggttcaggcgattctcctgcctcaccctcccaagtacttgggattacaggtatgagccaccacgcccggctaattttgtatttttttagtagatacagagtttcaccacattggtcaggctggtcttgaactcctgagctcaagtgatccacctgcctcggccttccaaagtgctgggattacaggcgtgagccaccatgccaagccatatattgtgattttaagttgtattttcctaatgcctaaaggtgttaagcatcttattttgcatatcttcttttgtcttcgattgacttttcaggtttttgagcattctttgtggctacatgctgtcccagctgttactctcagacatcaccttcacagcaccctttgagtgctragaatacccctttttcacattaccttactggtttgtgctggcttttaaatttgtttttagatttatgctgctcttttcatctttgatacaggaacttgccaaatctcaacttttggagacaatctcctataaaaatacattccttcatcagatgaaaatttactcaatgttttatttattttgatatcaattttatctatcattattattattagttattgttattattattttgagacagggtctcactcggtcacccaggctggaatgcagtggcactatctcagctcgctgcagcctcagccttcagggctcaagcaatcctcccacctcagcctcccaagtatctgggattacagggccataccaccatgctcaactagttttgtatatttttttgtagagacaagttttcatcatgttgcctaggctggtcttgaactccaaggttcaagcaatctgcctgcctcaacctcccaaagtgctaggattacaggcatgagccgccatgcctggcctaattttatcaattattttttatataagttcaaggtatcagactggaatatttattttaaaaactacatctaacttgaaaaatcctaatcacttagcctctcagccaagacaataatatgaccttctgcctacttcctacagactggctttaaaaattagaagttaaaagaactagaa

SEQ ID NO: 726079 - DNA, 1235 bp, Homo sapiens
ataacgctgaccccatgttctgcgggttaatgagaggctgctggttgctaaaaggtcccacttcctaccctggcaaaccatttcgggtctgaatgtggcttgttgatggcccctgggaggttgagcttaagtccccaagccctccattcatgcaaacacaccatccctctctcattgtgggccccggactacattctctcgcctgccacctcccaccttttcttttctttttcttgtctttttttttttctttttttttttttttttatgagactgagtctcgctccgtcgcccaggctggagggcagtggcacgatcctggctcactgcaacctccacctcctaggttcaagcgattctcctgcctcagcctcctaagtagctgggattccacaggcaggcrccacctcgcccagttaatttttgtattttgagaagagatggggtttcaccatgttggccaggctggtctcaaactcctggcctcaagtgatccacctgcctcggcttcccaaagtgctgggattacagtcgtgagccatcgcgcccggccccaccgtttctagtacacaaatcctccgctggctcccacggcctacagactgggacgcaagtccctttaatacaccttacaaagccaccatcagctgaccctgatgtcttcaatgtaaagtttttgtatcggttggaaccctgcgagcacgccaacagacaacacgaggcggtgtggagcaacatgctgttttaatgagcgcctggatgcaggcgggctgaggcctaaaatggcgtcagccccaagtgaggacggaacaaaggtttcatagtctcctgtaacaggaagtctcctagtcgtacgaaactgctacgtgatacccggatggcctctttctcgatcttcaggggtacgtatcttccggccagggcaggtgtcttccggccggctctcttcctgattccgctatcttgcttcggcacgctgctgacgcaagtagccttgcgccctgggactgggcctgagaagggaggagtgatgcatctccttaagctttcaggccccggggagaatcttacactcaggaaccctctaattcagccacgtggacctgtgaatgttctttgactatgctgagatccttcccacctccaggcatttgcacgtgtcacctgacaggaacagtgtttccgaatgtttaggagtcttagcaagcccaccttataccataagctctctgagg

SEQ ID NO: 726080 - DNA, 1235 bp, Homo sapiens
ataacgctgaccccatgttctgcgggttaatgagaggctgctggttgctaaaaggtcccacttcctaccctggcaaaccatttcgggtctgaatgtggcttgttgatggcccctgggaggttgagcttaagtccccaagccctccattcatgcaaacacaccatccctctctcattgtgggccccggactacattctctcgcctgccacctcccaccttttcttttctttttcttgtctttttttttttctttttttttttttttttatgagactgagtctcgctccgtcgcccaggctggagggcagtggcacgatcctggctcactgcaacctccacctcctaggttcaagcgattctcctgcctcagcctcctaagtagctgggattccacaggcaggcgccacctcgcccagttaatttttgtattttgagaagagatggggtttcaccatgttggccaggctggtctcaaactcctggcctcaagtgatccacctgcctcggcttcccaaagtgctgggattacagtcgtgagccatcgcgcccggccccaccgtttctagtacacaaatcctccgctggctcccacggcctacagactgggacgcaagtccctttaatacaccttacaaagccaccatcagctgaccctgatgtcttcaatgtaaagtttttgtatcggttggaaccctgcgagcacgccaacagacaacacgaggcggtgtggagcaacatgctgttttaatgagcgcctggatgcaggcgggctgaggcctaaaatggcgtcagccccaagtgaggacggaacaaaggtttcatagtctcctgtaacaggaagtctcctagtcgtacgaaactgctacgtgatacccggatggcctctttctcgatcttcaggggtacgtatcttccggccagggcaggtgtcttccggccggctctcttcctgattccsctatcttgcttcggcacgctgctgacgcaagtagccttgcgccctgggactgggcctgagaagggaggagtgatgcatctccttaagctttcaggccccggggagaatcttacactcaggaaccctctaattcagccacgtggacctgtgaatgttctttgactatgctgagatccttcccacctccaggcatttgcacgtgtcacctgacaggaacagtgtttccgaatgtttaggagtcttagcaagcccaccttataccataagctctctgagg

SEQ ID NO: 726081 - DNA, 631 bp, Homo sapiens
tttcacttctagtaatattgatccaaggcaagcttttgagaaaagctagaacagttaggctttgaacgtgactcccatttgtgaactaactcatagagaaaagtgaaagattgtaatcccagcactttgggaagccaaggtgggcagatcacgacatcgggagatggagaccatcctggctaacatggtgaaaccccgtctctactaagaatacaaaaaattagcggggaatggtggcaggcgcctgtagtcctagccgcttgggaggctgagacaggaaaatcgcgtgaacctgggaggcagagcttgcagtgagctgaggtagcgccactgcactccagcctgggtgacagagtgagactccatctcaaaatcaatcaatcaatcaatcaatcaatcaatcaatcaatccagcctgggtgacagagtgagactctgtctcaaataaatamattaattaaaaaataaattgtagacaacgtgaggttctggagcagaagttgcaaactggtggttcatgcacgtatagcccttagactgtttcatttggcctgttgagtgtctgacttatttcattagttgctaatgtctaaaatctgttttacatggatattgagctctgtatcacctg

SEQ ID NO: 726082 - DNA, 1365 bp, Homo sapiens
taaaacaaaaaataatgaccttattcttctctagaactgctcaacctctacaaactcctacatctgttatttgactcagttctcaattttcttagcaagttactcttttaagtgttttgacttcattgactccttaaaatatctccattagagtgtcgatttcttagtttttctttaatagcacctattctattgaaatattttctattatgggtttaaatgatcttgggaaatgttaactcaactaataggcctctgtgattacgtaatctacaccactattaaaataattataacaacttggatcatacaatgtcttgatgtaaaygatacattaggtcatgttatggaaatgtttactagccattgaatattttaatcttatttagaatctctaatcaaatctatagagtttaattatttcccagatttttctatttctatacttacctaccactgacattattcttatctctgaattttaacctaagttatttgacaaggtagttaattattgcctactcagtcatagaaatcaaaattcaaacataaaaagatatttgttgtaagttttactgttcttgagatcagagaagctattacaattaatagcataaaaattactagaaaagtagaatttttagataaaagaaaaatttagttctctaaactagtctgggttagaaaaatgcatgaaaattatatagtcatgtaatttcttaaaatattatatctattttgagcaaaatatctgaaagttttctttaagaattcctttttgtttctattataaattatttaggaaaaggttatatttttatgacaggttttttccccccatattataactttaacatgttttctttgatataaaaatataaatcaagtaccattatatttatatgtcattaaggtactgttcttgagcctatatcatgtatagcgtattgtgcattattttttctggcaaccataatctagaaatgggctatagaatgaaattcattaatgctatgttatactagaaggcacagaacataaagtaaataaatcttttgtaatatcataccaaccttataaattgctttaagggaataacaatctataggggtggtagatgattttctaatcagatattacacaatatacatcaaatattctcattctgtagtatttaaaataagcagttgtctacaacatacaatcaccagtcacaataaactattcatgcttttgtagacccccaatttgataactgcataaaacaaccaaatattttagaagaagaaatattataaggaatgtatatccaagcttctgtggttcgaccaggagctattgcctgaactacacctccttagttgg

SEQ ID NO: 726083 - DNA, 337 bp, Homo sapiens
caccacgcccagctatttttgtttgtttgtttttagtagagaaggggtttcaccatgttggccaggatcatctcaatctcttgacctcatgatccgcccgcctcagcctcccaaagcgctgggattataggygtgagccactgcgcccagccacctgtgagctttcttttcctcctccatctctggtcctgacccctcatcctcttaagcaaccctctcctagttccagaagctttcctgccagtgaggatggagataggaaatcagaaaacctaggggctccaggcatcctgaggtgtgaaccagagccctccagaccccctaggcctgtcacagt

SEQ ID NO: 726084 - DNA, 1779 bp, Homo sapiens
tactataacttttgtacttagtatatgttttatatttggaaaacagcactacgcttagttttcctgtagttcctgagtgatgtctgtgtgttccttgcctgcccttttttgtgagcacagattagtctgttatccatggctggcacttcacttatgatcctttctctgctagatttttatgcagctctctatgaagtttcatggcccatagatattcaaaagcaagatattctatacatatgtgtatatgtatatatactccttatgttaatactaaagtgtttatgctgagttgctgcctttccccgtcatgtatccatgtgcatgctcttagagaccttgaatggttgagggtaaagtgatttattagtaattctacttgccttgtgtatgtctgagctgaaaacaatcgtgattaagaaatttagaggtggctgggcgtggtggctcacgcctgtaatcccagcactttgggaggccgaggcaggyggatcacctgaggtcgggagttcaagaccagcctgaccaacatggagaaaccctgtctccactaaaaatacaaaattagccgggtgtggtggtgcatgcctgtaatcccagctactcggaagtttgagacgagaatctcttgaacccgggaggcggaggttgtggtgagccaagatcgtgccattgcactccagcctgggcaacaagagggaaactccgtttcaaaaaaaaaagaaaaagaaagaaattgagaagtaacgcctcataatatttgttcccagctttttaaattgaagctggttgcataatctggggaatagtcataatttcatgtgttatacagtttaaaaagcctgcaaaagtgactttgcttgtttactttctgcctcagattgactattttaaccaatattgtcacgactagatcatagctcctagtgaataacatgaggtgttttaaagttaggtctattacagaattaacataagcacaattttaattttatgatatctgatatgcctatctaatacatcttaatgcattaaatgctgcagataagaatcttgctatttttcaagtagacaacattagaaagttgaatcatgaactcattcaattcatcaagtcaaaagcactgagtgttttgctagtctagtgacatgggttattgtatttccgagaagtgcctctcatttctggggagttgtttacatataccctgcatttaaaccaattaaaacaatccaagtttctttaaaaaaaaaaaaaaaaagaaaaagaaaaagaaaaatattttaggcttagaattatctaatggaaaaaatgtaaaaaagtacaaaaatgaactaaaagtatatcagtatttgcagtatttgctgtgattacttaggtttagactttctcaacttcttagatgactaaatgggctgaagacttgtaactaacttgaataggatagacttcataccctgtgacaaaaaggatggggaagagaatatcattggtcttgccatatacctcctagctaaaaggaaaatggtttgtagttgttcttgggcctactgtgttgcttttcagaaggacataagactttctactttatctgatatggatatcgtctacttcctcattcctttatgctcacttatggagtagttacatagaaatataactcttggtggtactgtattttaaggtaattcagaagcagtatgtattatttatgtacatgtacaggacaccattcaaaatggcttgaaaatattcagcatgtttgttatttgctgtta

SEQ ID NO: 726085 - DNA, 1095 bp, Homo sapiens
catactgccttcaagcatcggcttaacaaagcacatcctgcatagccctaaatcctaaaccttgagtcacagcacatgtttctgcaagcacagggttgggggtaaggttacagattaacagcatctcaaggcagaagaatttttcttagtacagaacaaaatggagtctgttatgtctgcttctacatagacacagtaacagtctgatctctctttcttttccccacatctgtaaactagacttttatcatttttattatgcccatttccctcattttatggctgtataaattgaggctcagagagggcaagtggttttccaaacatagaacagcaagtgtaatggctggactggattcagagccacatgccctccaagaaccctttgcacaacctccatctttctactgaggagtttcactaggcctggcccccagcctggagggtagagaagatttatttagctctctcacagacaatgcgaaacatttgcccaattaatttcttaattgctccccttaaggtagtgcttctcgaacttcaatatgcagagaaatcacctggcaatcttataaaaatgtcagattgaactcagcagttctggatgaggcctgggactgagaacgtcttgcatggtcccaggaggtgaggaacactgtcttcaggagctaacagtcccgctgggtcagggagcttccatgmgatgactagagctgcacattaggattacctggagagatttaaaactatcccattgctgggctgcgccagagaccactgacatcagaacacagatgggtgaagcccaagcctcaggatgtttaaagtccctcaagagattccagagtgcagctagggttgagaagcactgaattagggaaagttggtatgaattttttggtgctagagggaagttcaggggtgggagggaggcaggaagggctttctagaagagcagcttctagagtttcccaagggaaggccctagaacggcactgtctgggacaggagctatgagcccccagttgttatgggtcatctgaaactgcattgagcaaaatacacacttgatttggaaaatttggtataaataaa

SEQ ID NO: 726086 - DNA, 2056 bp, Homo sapiens
attcaaggtgatctctcaaggacatcatcatgcataagaaccaaacataggtagatataatcatgctgtgggcatttggtggggaaaggtagagaagcaggaaggcagagtcaagagaagctgactgtagtaggattgttgcataatggacataacatttgctacctgaaacaacacacaactgcatcatgctgactggatgagagcctgcattcctgtcaaccaggacaagaccactaaagagtcctagattggccaaccaatgagtaattttctgacactaaccatttgttrtaaaatcaaacaacttttcggtgccagaactctccgtctcagaaacatttaattccatgcaaaacatttaattattttatttaaggaaaaaataaaccacacttctcattctatgagtactatgcccatgctccttagactgctgtgggatttcccatgtcctctcttgttcagaaaacttactaacttcgggaaacattcttaaatatcttcttaaaaatcaaggcccaaacaatagtttcataacttaaagatgtttaccttgttggaaagtccctaggaaatttggagtcaaggctacattctgccgctcaccagctaggtgccttcagttaagtcatgccttgctcaatcactgagatgttgctccctcccagccagttaatctctccctgatttagaataatcttttttaaaagtcttatctccatttccaaactgtgagctcttcgatggcagagaaaatgtcttgaagaaaataatggctgatttattgagccatgtgttccctccagcactcagccaagtcccgataaatcatggaaattatttctgttttacagatagggaaactgaatgtgtagagaagttagctgactgtttcaaagctgtacagatacagtcaggattcacaccctctgtaaatcaaaaattcatactcttttccccaaatcatgcttctagaacatgagagaccctggaggaaatggttgatggttgagaataaattaaaaaatggaaaatgaagcagagacatgtttgcactaaacatgaactataccacctccgggatgctagaaaccacgagttgtgtgagagagggcaagcagaggcagatagaaagagcagtggtttacacaataaagccttacaaatgaacaactctcctcaatgcccaaagcaattttcataggtggtgttttatttgattctcataagatacctgggtggcatgaagtataaggaagtgaattctcacttttagtaattgaaatgccaactgaggtgttaagtggctacagttcctaagtagtagggccaggattcaaagccagttcataaaaatccttgtgcagtgctttttccactaggcaacatagctctctccccacatggactttccttgtaggccacaaatacagcctgctcaagtgctctgaggccagcctgcttccatcagcccctaccaccaccacacatgcatgtgcgtgcactcacacacacacacacaaacacacacatacatgcagagtttgctatatttacaatgccttaggaatgaagaaacaagggtggggggcctggagaatggatatggaatctgaaaaaacaaaagaaccagacttaatgacattgtcctcacagctttctcagatgttcttgagaatttttttcccaatggcctttataaacaaactatatatgtacatatatttttgggtgtgactgatgcttatgccataagaaaagtcacagatcacccaatataagcaagatatccttgaaaagcttaaaagtcagtcctaggcaaacacctagccccctatcctgcagtgagacagtgggccagttacctgactccacgtgttaaggggaaccacagaatgactttaaggatgatggtggctatcagtacaatgtgtctaacacagatccaagcaaattatcagtattcaacatattcaattaacctaattcttatataaattgaatatatctacatatccattctttgaaaatgtaacaatttggctgcatcagt

SEQ ID NO: 726087 - DNA, 586 bp, Homo sapiens
aaacccagccgcccttaaagtcaataaggttcaaaacaagaaacctggcaaaatcctcacctgcttcttaaggggagcagagacaaaaggaagaggcctccctcaccatggaaacaggaaatagtctaatgattctctaactcagcccaaggcaggaagatgtgattaacagcactcaggctcaggcaaaggagacattctgttcttgctcagcctgctccacatttgaayccaattgtctctagagcacttatccctttcaagtggctctgaagcactaagtgcatttcccctccacacagtaacagcagctcatcattcacacagtgccctgagaatgagtatctcaggccagtctacatgtaacatcatgcttttgctcccacacttctttccaaaacctaccaagacacagggagatgctgtggctggctgagaggctgcagccaaaaaggaaaatagggtactgcaattactcaactccacttccaaacaccagccctcactaagttttgcagaaaactgctatttgaccgtgagtggcatggatgctgatatgcacagcgttatctctgcaccatggcct

SEQ ID NO: 726088 - DNA, 631 bp, Homo sapiens
ggtgaatgtggagaattttattgctgatgaaagtggctcttggtgggaaagggagttagaaaggggctggagcaggtaagtgatcttcccctggagtttggccagcgcattcccttcaaaagccacaccaccaagccatccctctgaaatcaagctgcctctctttgatgtccaactgtactctccaacatccagctgcttttcctcttttcttcctctcctccttctgctgkcagagcctggggtttttatgggcacaggacgagggatggggcaggccatgggtggttttggaaaaggcaacattcaagtgggaaaacagggatataaaattctcaatttgggccatgattccaggtgtgagggtggagttctttcccaaggacccaccctcttctgcccagaatttccctgcctcctctctctatgacatacatctcaacaatctgttttggatttttttaacaccatgtataaggcagtatgtatgctgatagtgacaatgactttgctccctatgaagatgtaagggaagtcattaagacgctagcatagggagtttaatgggagtgtcagatagtgatagtagaagtaataagagcagacaaccaatgacaattgtgataagagg

SEQ ID NO: 726089 - DNA, 915 bp, Homo sapiens
gcagggtttccagcagagctcaggcctgtcaggaggaggtgcaggccttcttcaaatggcactggggtccgggacatcctgtgggggactcccctcccctcagcacccaccctccaccttgagcatctctgcctccaagctcgttccccaggggtgtaggagagtgctgcctcccacaggtatgatgaggtgggagaaatgatgaaaactcttgggcttgtgttgagaatcccaggaatgttccagacttcatccccagaaaactcccatcaccactcccaaaaagtagagtcacaccttttgccaaaaatgcttaacaaacacagtaagtatgagaaatgacataggataaggtcagtctacacttccttgcagtatggactactaaactrcctgggtaggagacacaggaacgttttccacgtagagaagagcaacagaaagccacaagggcttcctgagaatgtcccccatgccctatgtagaatttctcatttctcaaagctcctaaccagagttggcctgtgatcacacttcaacaaacacagcaagggttgggggcacttcatgaaagatccagagttttctcttcactttaggatgcatcattctctcctttgaaaatttaaatttgagaagaaataacctagccaggcattctacattttatgacttaatctgttattcaaaatagaagagaactaattacatcttccatttaattactacaaaaatacagccagaatgcatgcattatatcacatttacgccaccatgaagagaaccaaccttcccccaggctttggttgcctctactggaactttaagtatttccgtgcttcttccagctcctctcattttcaaccagcaatggaagagatcatataaaaagtgtgaaactcattcatataaatc

SEQ ID NO: 726090 - DNA, 643 bp, Homo sapiens
ttatatagtttagtttagaacttttgaatgcaaaagaaataaacgtaggctgggcacagtggctcacacctataatcccagcactttgggaggctgaggcgggtggatcacgaggtcaggagattgagaccatactggctaacatggtgaaaccccgtctctactaaaaaatacaaaaaattagccgggcgtggtggcaggcacctgtagtcccagctgctcrggaggttgaggcaggagaatggcatgaacccgggaggcggagcttgcagtgagccgagatagcgccacagcactccagcctgggcgacagagcaagactccgtctcaaaaaaaaaaaaaaagaaagaaatgtaacacatccatgaacagaattaacaacaaaaaccatctcaatagatacagaaaatgcatttgataaaatccagcattgctccatgatgaaaaccctcaacaaactagtcaaagaaggaacatacctcaaaataataaagcccatatacaacaaacccacagccaacatcatactgaacagggaaaagttgaaagcaatccctctaacaactggaacaagacaagtgtggccgcttttaccacctctattcaacatagtactagaaatcctagccagtgcaatcaggca

SEQ ID NO: 726091 - DNA, 643 bp, Homo sapiens
ttatatagtttagtttagaacttttgaatgcaaaagaaataaacgtaggctgggcacagtggctcacacctataatcccagcactttgggaggctgaggcgggtggatcacgaggtcaggagattgagaccatactggctaacatggtgaaaccccgtctctactaaaaaatacaaaaaattagccgggcgtggtggcaggcacctgtagtcccagctgctcaggaggttgaggcaggagaatggcatgaacccrggaggcggagcttgcagtgagccgagatagcgccacagcactccagcctgggcgacagagcaagactccgtctcaaaaaaaaaaaaaaagaaagaaatgtaacacatccatgaacagaattaacaacaaaaaccatctcaatagatacagaaaatgcatttgataaaatccagcattgctccatgatgaaaaccctcaacaaactagtcaaagaaggaacatacctcaaaataataaagcccatatacaacaaacccacagccaacatcatactgaacagggaaaagttgaaagcaatccctctaacaactggaacaagacaagtgtggccgcttttaccacctctattcaacatagtactagaaatcctagccagtgcaatcaggca

SEQ ID NO: 726092 - DNA, 1265 bp, Homo sapiens
ccccttgtaaaaactgagtataacacctagcaaagaacagacctgttaaaagaatcaactttcttctcctcaaatgatatcacatgtaatatatatatttttaatgggcatgttgatttaaaaggaacacaagagataagaatgctcactcaggttgtgagtctaacagggctctggtttccatttatgtcctacatcgttagagcagttttcttctctcctagttgagagatgaatcactattgcaataagccaatcatctggttacctcgcagacccctgaagatgaaggtgcaccttttttgtttgaagtcgataagagtgtacaggggattgaggcccaagtatgtgggtcaagtcagagtagagacaagactgtaaataaattccccttgacctccctgcaaacagttagctcgggttttcccatccagattataacatttttaaatgctaaggacgtgatttgagagggacttttgtatgtgtttaaatccaggccgaaggtttgaattacaaagaataaaaaatcatatttggtatcatgctactcaagtgaaaatatcctgcagaacttctggtgagtgtggggatgtacattactcccaagagaggaggacacacatcattgtttaacccggtgggctcaatcaggagtcaactcctgtaatcagatgcactgacctaggggaaactagctgccgattccctttattttcccccactcacatcccaaggtagagatgccatgagcctctgctctgtgtcttactcactcactcactcatttttaattttcccgaagtcgatgcttacttatttgtcataaatatacatagtttttaaaaagtattcatgctgtgaggtatataacaaaaaacaacagctccttgactcactcctcccttcctcaccaccatcttctttcccaraaacacccactttcaacattattagcagtttttcagtttttctaaatatttttaaatattgtgcttatgtcattctttcccgatttcaattttacccactatatgttgacttctcattgtggtagaggagactttagctcttttacagcactcttcctcataccttcactaaccctttctgcgccttcctgatataatgcactgttcaggctcatgatcatttcacatatacattattgtgactgttgaatgttgctcacctgtgtgacaagtattaagcatgattacctttagcatagaaacttttgcttttcgtgggatttgtttagacgt

SEQ ID NO: 726093 - DNA, 592 bp, Homo sapiens
tgccactgcactcctggctgggtgacagagcaagatgctatatctaaaaaaaaaaaaaaatgtttgatgatatgtattggaaaaagaaatgaatggtaagtaattgatcttgaatgatgtagtttggagtacatgtctataagccagagaagtctggctaatgttaaattttgggaattaaagtttcagtccttttaaacttttcactctttggatgatgtctcatgacaggttaatgagtgcatgctctagtcttcaaagatttaggacatgtctggctaatattaacactgacatctgcmaagtaatattggaatggacatccaaataataaagaatggctagggccttgatcatcctgaagctttggacacatcctagactttcctacagttttagggtattttccttttcattccattaaggcacttaaaatactctccatagagccaggtgcagtggtccacatttgtaatcccaaagctttgggaggcaggagtgggaggattgcttgaggccaggagttcaagaccagcctgggcaacatagcaaaacccccatctctaaaaagaaatatttttttattagctgg

SEQ ID NO: 726094 - DNA, 628 bp, Homo sapiens
cgagattgcaccactgcactctagcctgggcgacagagtgagactcgatctcaaaaaaaaaaaaaaaagaaagaaagaaaaagaaaaacaaaataaataagagaatttctctgctcttgwgttctctagtgctcttttaggggagggggcttccaactgggcagggtgcattgggtgccgctctccacctgcctctcatctcagcctgtagtgacaggcgtttgctgttgacccttatgtagctgttccaattatgggtgctcattctaatgtaattgtcctacaaatgatgctggtggggactttcctcaggatctaggtttgctcacaggcatggtgagcacatgagaacttgatccatgagatatttttcattatggaaaaaaaagttcagaagagcttccttaaaatctaggaaattaaagagtctgctcggtcgtgccagagagcagggctgaaccctgatcctggagcccaaggctgtggccctcagacctggatctctgagtcgtctggtcatgcgtggtcctggtttctgttttcaccgagaacaccagctcgaatgaagccccgatagatcgcgtgtagtgcttcactcttcacctaactaccgacggtgcctgccaaa

SEQ ID NO: 726095 - DNA, 869 bp, Homo sapiens
ccgtgcttctcttccatagcactggtcacaacctgcactcacacgtgcactggctcccttgttcatgcctcttcctccagaccagcactgcccaacagaaacataatacgagcctcttacggagtttaagtttcctagtagtcataggaaaactcactttacctagttttaatcaaaggaactttaagaatatatttcttacatggacatgttgcgtgatgaaaaacaaaaacaaaaaataatatatttcattgaactcaatacattaaaaatgcctatcatttcaacacgtcatcagtatcaaaaaatatcaacgatgtattttacattcggttcttcatcttgagccttcaaaacccagcatgtgttttactctgacagcacatctcaatgtggactaactacattwcaaatgttccacaggcccaggaggctgctggtcaccatactggaagacacagctctagaagggaagttccatgagggcagagatcttgtcggtttcgtatactatgttatccataatgcttgacagacaaaagatggctttactgtataaactgcataaacatgcaacaaatggctttactgtaaatatgtaactacttgagaaatgtaaagtgcattcatcctacataaaaatacatgttgggagcaagccccccccgcaaactggccataaacagaatctctgcagcactgtaacatgttcatgatggccctaatgctcacgctggaaggttgtgggttcacgggaatgagggcaaggaacaccgggcccacccagggcggaaaaccgcttaaaggcattcttaagccacaaacaataacatgagcgatctgtgccataaggacatgctcctgctgca

SEQ ID NO: 726096 - DNA, 634 bp, Homo sapiens
tttattttaaaaaagagagatttaactgactcacagttctgcatggctggggaggcctcaagaatattacaatcatggcagaaggcaaaggggaagcaagacacatcttgtatggcagcaagacagagagagagatcaaggaactaccacactttaaaaccatcagttctcatgacaactcactcactatcacaagaacagcatgggggaaaccacccccatgatccaatcacctcccactaggtccctccctcagcatgtggggattaccatttgagatgagatttgggagaggactcaaagccaaaccatatcagtagccatggtagtaataatgtgttcagccaagaaacatcaacagatatggcaaactagaggcatgagtgggckggaatccactgttaaatcttcacgaattttgtgaaccaattgttaaaattattacaatctaaattatatgaatgtgcaattaaataaattatatttgaaataaaggcccatttgaaatgaaaagcccatcatttgggttcaaacaccctacttcaggctactgcacccctgagcagatattcatttgctttggccctgtcaccctgcacagatgccctctttaccctgtagcccctttttcctt

SEQ ID NO: 726097 - DNA, 615 bp, Homo sapiens
gccaggggcatgggagggttggagaattggggccacttctatcgtctaccccaacccttctccactctgctttgtgtcctgggaggctgacctctatacacagtatcccagggccgcctcccagcacaggccttggagccatttgcttagactacagtgtgaacggttctcccaagaccgggcagtacacagcttacacaaccacatgcaggtgccctcagtgaagccatctgcaaaaggaggcrtctgggctggatgactctacattccttcatcctgagaactcacaaatactttatacccaagatcctagcatttctcttctgacctgcctgaagaggtggtatggctggcatccatgcgtgcgcttccatgcgtgtgattgggtcactagcacgcacacaataggaacctggtaaaagggatgattaaatgaattcacatacatgtgtttgaaatacactgtgcacacattccatttcagttcccctcaccgcctcgccttgagaccccagcagacatgacaccatcctgcaaaaacagagttgagaactgccagcctggtgcatcaaaccttaaaaattcaaagctaaagttagaaatataaaaacatca

SEQ ID NO: 726098 - DNA, 2033 bp, Homo sapiens
ttcaaacgatgtctgaaattttccataataaaaggttaaaaaaatctacttccattatggattttaaaacactaaaagaaaataaaggtggctctatacgttgcaaaacaaagtcaaaataagggctccttttctgtaacattaggtactaaaatgagaattgcaggaggcttcaccatagttggtcagtttttccattgatggaacattccaaatctttataaaccatctgcagaggaaggatttggatagattttcattccactgtaataacaagactttttttgagaaagaatttcaaaaagaacagcttttattttgattctatgcatacactggaaactaattaataaaacacttaaagcaattctcatcccaattacaaaatgtagacacatgaaataatgtaaacaatgtccaattattctgatcatatattacatatatataacacaaccaaaattattactttgacagcatcttggttatatggttatgacataatttttccaactacttactttttagtaaccagataaccaaagaagaaatattagtaatgaaaaattatcttttaatattcagcaataaatataggaggaaagagagatgaattaatccagaaaacagtattttaaaagggagtattttattagagacacaaatagtgaatttcaaagttcttgctttttctagtttgctcccattctttctaaattttcttcttttctacaagtctattttatataattattttatataattcctaacattgatgttcttggtgttataaactttgggtcaaatagcataggttgctccaatctctcttttcattgcatcccacctctatcctaaagacagacttctggccaccaaataattcaaactagaaaaacaagattggtagaggaaagaaagtaatatttcagagtacacttggtcagatcatatgccttgtccacccctcatggatgttataatgttatgtatagttagtcttatttgagcaatcctgtggggtatgtaaatatgtatctaaattttactggcaaggagattatagaataatgttctcttggtacttcagtttaactgaacagacctttatcaagcatttactatttgtgaggcaaagcagatggtgctgaggattcagagaacagaatattgtacctgccctcaatttgctcaccatttgctggaaaagacaaaccaaagaggaactgataaaatattaaatgataaaatattgatgataaaatattacatgagaagtcttgaatgaacaaagtgctatggagaagcagagctgattgctggttttgcaaggatcaggaagactcctgcggtgaggtgagacatccatgtgggctaaggagaatggtcatggggtctcacagcggaagggggaaataacagatctaagcaaaaagaacacaatactcctccccagtaaggaaaataatgagtgaaaataaactacaacagtcaagggcaaaagtccaagaagaaaagtagaaaggagtgacgggatacagaacacaagaatacagctgaggggaaataaagataaaaaagatggagtctcttatgctcatcttacatgcattttgcacggtctgagtttttaatcgaaggtaaaataaaaaactcatttgcaccggtccctggcttccttaagtgtgtttaatcaccaagtaataagcttttttcataacaagtaatatctctccattcttccaaacattatgggaattgttagagtgttacatgcttagggacaagaccaaagtgctccttctttagtgcttctgccacagtgaacaatgctttcctatgtgaagctttgtacctgcaatccagatgcctttcctgttactactgtraggtttaacggcatctatatgcatttttatattacaggctctgaataagttgaatgagacagactgtgcctcctatcggctgacagttgtttttaccaacctcttagacttcagggcattctataaaatgttggaggaatgatg

SEQ ID NO: 726099 - DNA, 583 bp, Homo sapiens
aagaccttttctttctttcctccctatttttcttttttctctcattccccattcttctcatatttttatttatttcattactactaaaggaaaaggttaatactcatgctagaaataatactacaaagcaaaactatctcaaggcttaaagtaagttttgcccagtcatacagaaacccaatactgtgtaatgtcttcaccagatgttcaagtagcattaataatagcttatgtaaagttactataatccaaataaaattaattaaacagttcagaaaaaaatcttattgtgttatttccatttttgccctactctctgttgagagatctcaaaccaatggaaaagttaagagaatattacaaagaacacccatgtatcatcctagacttgctagttgttaatttcaccacaattgcttctctrtgtattttatactatataaaattatatgtatataattattttatttaatatatgtatatatacattttatgtaataattatatatatttatatgttttattatataaaaatttatattttataaaattatataaatataatttatatataaatttaaac

SEQ ID NO: 726100 - DNA, 1199 bp, Homo sapiens
ggccttcaatatacgaatttaaagagaaggaggaagggacacacctcaattcataacaggctggtttaaagttgctgttagtctggttggatttggagacttgggactaaatgaattgagaagtccagacacaagctggcaaaggaaaaactgccaggtctatgaagcacaggggccaccttacatcctggggaaatcctgaggaaaagagcctgggactrtgagtcaagggcatggctcttccaactctgccaacatctggctatgagaccttgagcaagatccttgtttatctgggcctcagtttcctcctctataacatgggcacacaacgtcagtttaaaatgaatcactagatgatgtctaaattctctagaaacccgtaatccacaaaaagcacacaacactcagatttcacttcctgtatcatcgcaatcttgtcacactcttccctagagacttgagttcttcagctccatcatggggctcccctgaactgatgcccctgacctggccccgcttccctaccattccctgactgttctcctcttctatcaatgtctagaaaaatccttccctttcctgccatatcccccattctcaagactctgctcaaatgcagcctccttcataaaacctttcctaagcagaggtctctcccttgtattgtttggttttacctcttttactggacacctgtcattctccctggtctcatgattatttcgtttcttataactatctacatagactcttgagtaaagaatatctaaagtatgctacctgctgtgtaagaaaaaaagagaatgagaaaatatatctatatataaaaatatatctatatgtcatacaactatatagatatatatagttatgtttatatatgcttatatagctatatagttatataatctgtgcacattttgcaaaagcaaatacagtaaagttaaaccagaaacaaatgagactgagcacctatggacatggggtgagcaggaatgaggtggaaatgatgggagggtggaaaggagcagaaggaagatgagagggacatgtctttgagtatttctttttgtatcattctgacttccaaaacatatgaatgtttcacacataaacagacaaacacataaataaaatcagtgaagtgggtaaaaaaaaaaacctaaaatggaagacaaactaaataaatgaaccca

SEQ ID NO: 726101 - DNA, 866 bp, Homo sapiens
tcacgaggtcaggagttcgagaccagcctggccaatatggtgaaaccctgtctctactaaaaaaatacaaaaattagctaggcgtggtggcaggcgtctgtagtcccagctactcgggaggctgagacaggagaatcgcttgaatccgggaggtggaggttgcagtgagctgagattgcaccactgcactccagcctgggcgacagagagamttcgtctcaaaaaaaaattatcatcaagagattaagtcatggtatgaacaagtgatatattgtctaaaaatacttctctgtaagatgctttaaaattttaattactaagttgccatcatttctatgggaaaatcttatattatttgacctaaagcacaaataccagcacttaaatatgagtaagtaaaagcagataaataatataattgctttccatttacactcaggttagaggcaacctcagtgatttgaggaggtggtagtgattgggcttttctataaaatgtttatttaaacatttatagaaaataaaatgctaaatcaaataggatttaaacttaacaataaacaaaataactgaataattgtgaagtttttatcttttatctccatgacttttgctccatgaagatagtcagatacaaacactatgccagtatcagaaattaaaattgtatacttattttaccttttgatttcaatttttgaaggaaaaaaatatgaggttacttcagaaaaaaatgtgtcaaaaagatgtatttttttgttttgcacaatttttaattaggacagaagtagaagctgctcttaataacttttcactgacccggagccacttggaaatgtcctacagaggtgaaaaaacaaaaaaaa

SEQ ID NO: 726102 - DNA, 866 bp, Homo sapiens
tcacgaggtcaggagttcgagaccagcctggccaatatggtgaaaccctgtctctactaaaaaaatacaaaaattagctaggcgtggtggcaggcgtctgtagtcccagctactcgggaggctgagacaggagaatcgcttgaatccgggaggtggaggttgcagtgagctgagattgcaccactgcactccagcctgggcgacagagagacttcgtctcaaaaaaaaattatcaycaagagattaagtcatggtatgaacaagtgatatattgtctaaaaatacttctctgtaagatgctttaaaattttaattactaagttgccatcatttctatgggaaaatcttatattatttgacctaaagcacaaataccagcacttaaatatgagtaagtaaaagcagataaataatataattgctttccatttacactcaggttagaggcaacctcagtgatttgaggaggtggtagtgattgggcttttctataaaatgtttatttaaacatttatagaaaataaaatgctaaatcaaataggatttaaacttaacaataaacaaaataactgaataattgtgaagtttttatcttttatctccatgacttttgctccatgaagatagtcagatacaaacactatgccagtatcagaaattaaaattgtatacttattttaccttttgatttcaatttttgaaggaaaaaaatatgaggttacttcagaaaaaaatgtgtcaaaaagatgtatttttttgttttgcacaatttttaattaggacagaagtagaagctgctcttaataacttttcactgacccggagccacttggaaatgtcctacagaggtgaaaaaacaaaaaaaa

SEQ ID NO: 726103 - DNA, 866 bp, Homo sapiens
tcacgaggtcaggagttcgagaccagcctggccaatatggtgaaaccctgtctctactaaaaaaatacaaaaattagctaggcgtggtggcaggcgtctgtagtcccagctactcgggaggctgagacaggagaatcgcttgaatccgggaggtggaggttgcagtgagctgagattgcaccactgcactccagcctgggcgacagagagacttcgtctcaaaaaaaaattatcatcaagagattaagtcatggtatgaacaagtgatatattgtctaaaaatacttcyctgtaagatgctttaaaattttaattactaagttgccatcatttctatgggaaaatcttatattatttgacctaaagcacaaataccagcacttaaatatgagtaagtaaaagcagataaataatataattgctttccatttacactcaggttagaggcaacctcagtgatttgaggaggtggtagtgattgggcttttctataaaatgtttatttaaacatttatagaaaataaaatgctaaatcaaataggatttaaacttaacaataaacaaaataactgaataattgtgaagtttttatcttttatctccatgacttttgctccatgaagatagtcagatacaaacactatgccagtatcagaaattaaaattgtatacttattttaccttttgatttcaatttttgaaggaaaaaaatatgaggttacttcagaaaaaaatgtgtcaaaaagatgtatttttttgttttgcacaatttttaattaggacagaagtagaagctgctcttaataacttttcactgacccggagccacttggaaatgtcctacagaggtgaaaaaacaaaaaaaa

SEQ ID NO: 726104 - DNA, 866 bp, Homo sapiens
tcacgaggtcaggagttcgagaccagcctggccaatatggtgaaaccctgtctctactaaaaaaatacaaaaattagctaggcgtggtggcaggcgtctgtagtcccagctactcgggaggctgagacaggagaatcgcttgaatccgggaggtggaggttgcagtgagctgagattgcaccactgcactccagcctgggcgacagagagacttcgtctcaaaaaaaaattatcatcaagagattaagtcatggtatgaacaagtgatatattgtctaaaaatacttctctgtaagatrctttaaaattttaattactaagttgccatcatttctatgggaaaatcttatattatttgacctaaagcacaaataccagcacttaaatatgagtaagtaaaagcagataaataatataattgctttccatttacactcaggttagaggcaacctcagtgatttgaggaggtggtagtgattgggcttttctataaaatgtttatttaaacatttatagaaaataaaatgctaaatcaaataggatttaaacttaacaataaacaaaataactgaataattgtgaagtttttatcttttatctccatgacttttgctccatgaagatagtcagatacaaacactatgccagtatcagaaattaaaattgtatacttattttaccttttgatttcaatttttgaaggaaaaaaatatgaggttacttcagaaaaaaatgtgtcaaaaagatgtatttttttgttttgcacaatttttaattaggacagaagtagaagctgctcttaataacttttcactgacccggagccacttggaaatgtcctacagaggtgaaaaaacaaaaaaaa

SEQ ID NO: 726105 - DNA, 866 bp, Homo sapiens
tcacgaggtcaggagttcgagaccagcctggccaatatggtgaaaccctgtctctactaaaaaaatacaaaaattagctaggcgtggtggcaggcgtctgtagtcccagctactcgggaggctgagacaggagaatcgcttgaatccgggaggtggaggttgcagtgagctgagattgcaccactgcactccagcctgggcgacagagagacttcgtctcaaaaaaaaattatcatcaagagattaagtcatggtatgaacaagtgatatattgtctaaaaatacttctctgtaagatgctttaaaattttaattaytaagttgccatcatttctatgggaaaatcttatattatttgacctaaagcacaaataccagcacttaaatatgagtaagtaaaagcagataaataatataattgctttccatttacactcaggttagaggcaacctcagtgatttgaggaggtggtagtgattgggcttttctataaaatgtttatttaaacatttatagaaaataaaatgctaaatcaaataggatttaaacttaacaataaacaaaataactgaataattgtgaagtttttatcttttatctccatgacttttgctccatgaagatagtcagatacaaacactatgccagtatcagaaattaaaattgtatacttattttaccttttgatttcaatttttgaaggaaaaaaatatgaggttacttcagaaaaaaatgtgtcaaaaagatgtatttttttgttttgcacaatttttaattaggacagaagtagaagctgctcttaataacttttcactgacccggagccacttggaaatgtcctacagaggtgaaaaaacaaaaaaaa

SEQ ID NO: 726106 - DNA, 623 bp, Homo sapiens
tggatgaccagttattctascaccatttgttgagaagactaccttttcttttgaattgcccttgcttctgtgtcagagatcagttcactacgtacatgtgggtctattttttggcccgctggtatgttccattgatctatttttttattctttcaccaataccacactgtcttgatcactataactttatcatagattttgaagctatacagtgtaagactttcaaacttgttcttctttaacatttgttggctaatctggatcttttgcctttttatataaactttggaatcagtttgtcaatacccactagataacttgctgggatttctattgggattgcttttaatctatagatgaaatttgaaagaactgacatcttcacaatattgagtctttctatccatatacttagaacaactctccatttatttagatcttcactgaatgccttcatcacagtttgagttttcctcctatagatctgataaaatcagaacaatgatgtggagctatcactgtctttgttgaaggaaacaacaaaacatatgtgctcattgggagaaatattagcaaattatcacacactctgatttgttttctcttaaatgtcaattaataga

SEQ ID NO: 726107 - DNA, 623 bp, Homo sapiens
tggatgaccagttattctagcaccatttgttgagaagactaccttttcttttgaattgcycttgcttctgtgtcagagatcagttcactacgtacatgtgggtctattttttggcccgctggtatgttccattgatctatttttttattctttcaccaataccacactgtcttgatcactataactttatcatagattttgaagctatacagtgtaagactttcaaacttgttcttctttaacatttgttggctaatctggatcttttgcctttttatataaactttggaatcagtttgtcaatacccactagataacttgctgggatttctattgggattgcttttaatctatagatgaaatttgaaagaactgacatcttcacaatattgagtctttctatccatatacttagaacaactctccatttatttagatcttcactgaatgccttcatcacagtttgagttttcctcctatagatctgataaaatcagaacaatgatgtggagctatcactgtctttgttgaaggaaacaacaaaacatatgtgctcattgggagaaatattagcaaattatcacacactctgatttgttttctcttaaatgtcaattaataga

SEQ ID NO: 726108 - DNA, 623 bp, Homo sapiens
tggatgaccagttattctagcaccatttgttgagaagactaccttttcttttgaattgcccttgcttctgtgtcagagatcagttcactacgtacatgtgggtctattttttggcccgctggtatgttccattgatctatttttttattctttcaccaataccacactgtcttgatcactataactttatcatagattttgaagctatacagtgtaagactttcaaacttgttcttctttaacatttgttggctaatctggatcttttgcctttttatataaactttggaatcagtttgtcaatacccactagataacttgctgggatttctattgggattgcttttaatctatagatgaaatttgaaagaactgacrtcttcacaatattgagtctttctatccatatacttagaacaactctccatttatttagatcttcactgaatgccttcatcacagtttgagttttcctcctatagatctgataaaatcagaacaatgatgtggagctatcactgtctttgttgaaggaaacaacaaaacatatgtgctcattgggagaaatattagcaaattatcacacactctgatttgttttctcttaaatgtcaattaataga

SEQ ID NO: 726109 - DNA, 639 bp, Homo sapiens
tttcaggaccacacaatagtggttggatagctgggcctctgagctctctccagccatccaccgaggagtagcagtcatgtacaaagctgtcacccattttatctccaatttcaggctaccaaaacaattccaaacccaagaaataacacattatcatatgtttccttataagaatgattttgaaacaaatgcctccattaaaagtataatttatcaataattgctacaaaacactatttgtattcttcttcatttcttgacttttttaaagaatagaagacttattttggcaataagaaataacagagaaaatggtaggaagtggctaaactatgatgttcaaagccttaggaaaaggcaaaagtactggtataactattctaagttgtagcagtcagtggattttataccattcggtgtaagctttacaccattacacaggatggatatcttttcaawatattttaacagacatgtaatggggaggcaaataagaagggagttggatatgagtggacgccgcctaacatgtccactgaggaaaacgaggggaaaggcaatcttcactgtagttcaaaagatacttgcctttaaaaatcaccataaccccataatctagaaaagtcactaatattgcag

SEQ ID NO: 726110 - DNA, 656 bp, Homo sapiens
acataaaaataaaaaggatttttaaaaagattcccttaaatatcaagttgtgctaaagcagttaagccgggatttgatctacaaaattaaatatatatatatacactttatttttaaaagctcacctattattaaaaacatgtcttttgcaagtttaactgccttgaaatttccattaaaaagaaaattatgtgttaaacatgatgttagttattataaacaaagtgtaataaaattgggagacatataggtatattagcagatacackgacatatttttagaatgaattcagttcttgcattcttaaaattaacagacatatttatccaacttcatagctaactaaaatctacatgtgacgctgatgagttacagcagggtgatggtgcataaggctaattacatgattcattctacttttgtataagacagctttatgcatgtatgcaacttaaaacatggtcaaaaatagaaatacatacattaattacctgaaggagattcagacaaagacataatgtaataatccattaacaaaggaaactgtctagctcactgaaagcaaggtttctatcttctaaagaacctgaacaagtcactcctgggtagcatccaaaccaaacactttgggttaagaggtggagctacactaaaa

SEQ ID NO: 726111 - DNA, 633 bp, Homo sapiens
ctcatcttgaattttaatccccaagtgttgaggaaaggatctggtgggaggtaattggatcatgggggcagttttcctcatgytgttctcaagatagtgagtgagttctcacaacatcttatggtttgaaagtgtgtggcttccttctcatgctctctctcctgctgtcatgtaagacatgccttgctttccctttgcctcccaccacgactgtaagttccctgaggcctctccagccgtgcagaaatgtgagtcaattaaaagtattttctttataagttgcccactctcaggtaattctttatatcagtgtgaaaatggaccaatacaataagttaaaatgccacagacattttaacattagttaattttcagagttcttaaaatattgattctgatcatgtttgccagctttcttattgtttttatggatgaaataatttttcctatttctaccaacatactaacttctgctattcaataatttaaagtaaaaaattttatatttgtttcagaatatctttattggactttctagtattagttttcagatggctaatagaaccaagaaacaaacaaaaaagtttattttaagtttttctcctcacctctttccaaaattgacatgaggtc

SEQ ID NO: 726112 - DNA, 633 bp, Homo sapiens
ctcatcttgaattttaatccccaagtgttgaggaaaggatctggtgggaggtaattggatcatgggggcagttttcctcatgttgttctcaagatagtgagtgagttctcacaacatcttatggtttgaaagtgtgtggcttccttctcatgctctctctcctgctgtcatgtaagacatgccttgctttccctttgcctcccaccacgaytgtaagttccctgaggcctctccagccgtgcagaaatgtgagtcaattaaaagtattttctttataagttgcccactctcaggtaattctttatatcagtgtgaaaatggaccaatacaataagttaaaatgccacagacattttaacattagttaattttcagagttcttaaaatattgattctgatcatgtttgccagctttcttattgtttttatggatgaaataatttttcctatttctaccaacatactaacttctgctattcaataatttaaagtaaaaaattttatatttgtttcagaatatctttattggactttctagtattagttttcagatggctaatagaaccaagaaacaaacaaaaaagtttattttaagtttttctcctcacctctttccaaaattgacatgaggtc

SEQ ID NO: 726113 - DNA, 633 bp, Homo sapiens
ctcatcttgaattttaatccccaagtgttgaggaaaggatctggtgggaggtaattggatcatgggggcagttttcctcatgttgttctcaagatagtgagtgagttctcacaacatcttatggtttgaaagtgtgtggcttccttctcatgctctctctcctgctgtcatgtaagacatgccttgctttccctttgcctcccaccacgactgtaagttccctgaggcctctccagccrtgcagaaatgtgagtcaattaaaagtattttctttataagttgcccactctcaggtaattctttatatcagtgtgaaaatggaccaatacaataagttaaaatgccacagacattttaacattagttaattttcagagttcttaaaatattgattctgatcatgtttgccagctttcttattgtttttatggatgaaataatttttcctatttctaccaacatactaacttctgctattcaataatttaaagtaaaaaattttatatttgtttcagaatatctttattggactttctagtattagttttcagatggctaatagaaccaagaaacaaacaaaaaagtttattttaagtttttctcctcacctctttccaaaattgacatgaggtc

SEQ ID NO: 726114 - DNA, 633 bp, Homo sapiens
ctcatcttgaattttaatccccaagtgttgaggaaaggatctggtgggaggtaattggatcatgggggcagttttcctcatgttgttctcaagatagtgagtgagttctcacaacatcttatggtttgaaagtgtgtggcttccttctcatgctctctctcctgctgtcatgtaagacatgccttgctttccctttgcctcccaccacgactgtaagttccctgaggcctctccagccgtgcagaaatgtgagtcaattaaaagtmttttctttataagttgcccactctcaggtaattctttatatcagtgtgaaaatggaccaatacaataagttaaaatgccacagacattttaacattagttaattttcagagttcttaaaatattgattctgatcatgtttgccagctttcttattgtttttatggatgaaataatttttcctatttctaccaacatactaacttctgctattcaataatttaaagtaaaaaattttatatttgtttcagaatatctttattggactttctagtattagttttcagatggctaatagaaccaagaaacaaacaaaaaagtttattttaagtttttctcctcacctctttccaaaattgacatgaggtc

SEQ ID NO: 726115 - DNA, 627 bp, Homo sapiens
aactgaaaaatcaacaagggtctgtatattcataatatttaatgatagggagataaatacaaaaagaaacagctgaaaaaattgaaaaatttaactctggaaggtaacaaattgggggaagataggagttgggtacagatttttttcacaataaatcttgaactatttatttgactgtttaaactatgccatgcatatgatcaaataaataacagttttactatactccacacttgaacatgcatagcctcaaactcatttgttcaacttttgttttcatttacatccaaagacagaaataagggtcctgaagttttccagagcattccaaatatctgaacatasacatgttgtgtgaatatctatgaatccaactttcctcttaacctctgaaacccaacaggtgtagaggtctcaatatttcctgcccactgatttggagaaaatcacaagcttacctccatgcattgcatcaacgcgaatcttcagttggctgggcccagtcagcaaactcttgatggcatgaaagtcaaagatggtctgaaggaggttaagatagatatccactgggtccactatctccactaaagatagaaaaacaaaggaaaatgtcattgactgtaccca

SEQ ID NO: 726116 - DNA, 627 bp, Homo sapiens
aactgaaaaatcaacaagggtctgtatattcataatatttaatgatagggagataaatacaaaaagaaacagctgaaaaaattgaaaaatttaactctggaaggtaacaaattgggggaagataggagttgggtacagatttttttcacaataaatcttgaactatttatttgactgtttaaactatgccatgcatatgatcaaataaataacagttttactatactccacacttgaacatgcatagcctcaaactcatttgttcaacttttgttttcatttacatccaaagacagaaataagggtcctgaagttttccagagcattccaaatatctgaacatacacatgttgtgtgaatatctatgaatccaactttcctcttaacctctgaaacccaacaggtgtagaggtctcaatatttcctgcccactgatttggagaaaatcacaagcttacctccrtgcattgcatcaacgcgaatcttcagttggctgggcccagtcagcaaactcttgatggcatgaaagtcaaagatggtctgaaggaggttaagatagatatccactgggtccactatctccactaaagatagaaaaacaaaggaaaatgtcattgactgtaccca

SEQ ID NO: 726117 - DNA, 627 bp, Homo sapiens
aactgaaaaatcaacaagggtctgtatattcataatatttaatgatagggagataaatacaaaaagaaacagctgaaaaaattgaaaaatttaactctggaaggtaacaaattgggggaagataggagttgggtacagatttttttcacaataaatcttgaactatttatttgactgtttaaactatgccatgcatatgatcaaataaataacagttttactatactccacacttgaacatgcatagcctcaaactcatttgttcaacttttgttttcatttacatccaaagacagaaataagggtcctgaagttttccagagcattccaaatatctgaacatacacatgttgtgtgaatatctatgaatccaactttcctcttaacctctgaaacccaacaggtgtagaggtctcaatatttcctgcccactgatttggagaaaatcacaagcttacctccatgcattrcatcaacgcgaatcttcagttggctgggcccagtcagcaaactcttgatggcatgaaagtcaaagatggtctgaaggaggttaagatagatatccactgggtccactatctccactaaagatagaaaaacaaaggaaaatgtcattgactgtaccca

SEQ ID NO: 726118 - DNA, 627 bp, Homo sapiens
aactgaaaaatcaacaagggtctgtatattcataatatttaatgatagggagataaatacaaaaagaaacagctgaaaaaattgaaaaatttaactctggaaggtaacaaattgggggaagataggagttgggtacagatttttttcacaataaatcttgaactatttatttgactgtttaaactatgccatgcatatgatcaaataaataacagttttactatactccacacttgaacatgcatagcctcaaactcatttgttcaacttttgttttcatttacatccaaagacagaaataagggtcctgaagttttccagagcattccaaatatctgaacatacacatgttgtgtgaatatctatgaatccaactttcctcttaacctctgaaacccaacaggtgtagaggtctcaatatttcctgcccactgatttggagaaaatcacaagcttacctccatgcattgcrtcaacgcgaatcttcagttggctgggcccagtcagcaaactcttgatggcatgaaagtcaaagatggtctgaaggaggttaagatagatatccactgggtccactatctccactaaagatagaaaaacaaaggaaaatgtcattgactgtaccca

SEQ ID NO: 726119 - DNA, 787 bp, Homo sapiens
atgtgttaataatttttttccagaattgtattttgagaattttgtttttttaggattgtaattttcaggattttagactgtacagatttagatcttatgggacttcaacatttgggattatgacgttcaggattgtgtcttcctgggctgtggcccaaacccgtgtggtccaacactatttcacacaagaggaaagcaaaccacgtgcatagatgcaatgaaggcttaaatgggcgtcacgtatagattatatcccaggaaaacatgattaagatgatacatggcgactttttttcccagtgaaaaagatccacattctttttcttgtgtggaattaaacacaatttctgaatcaatgtaagtgtatgcaaatcaccatattcacttagctgatgctcctttattaacaggaatagaagggaggtcattcgaagagatgatggcgcgggacccaggacctgaggaagctgcagtgggtgaaggggagaaacagaggagcaggggctggagaaagagtgggaaatcatcaactaccctccttactcctggtgtctggtgttcggaacccagaggtcttctctagggcctyggagaagcttccaagtctgttcatttctctttccccacgcctgcttgtatcacaaataaagaaattattgacaactgagttcctgactagttggcacgattttagggacccttcacctcatccgagcctcatgaaggtagtgggagtcccatgggttagttagcaatagtccttgagattatttggtcatataaataa

SEQ ID NO: 726120 - DNA, 3028 bp, Homo sapiens
agttgcctttcttgtgggggctggccaaagactgactcagctggtatgaaacaaatcagcaagtgacctcagtagtgacccctrttttccaaatgccattgtgcctaccagattcgagtgcagaattggtgatgaatatattcctgggtttgcgtgaaatctcattcatgcccaatctagcacccaatttccaagtgaatggcaaatatctagaagttctcattaaacacaaatgctttccagtatctagcaccacccagtaaccaagaatccaaaaagttttattcatttatgtgacataccaaaaagctcagaatacatttttcatacttgtcaatcagtgtataattaatgctcggaaagtacttttccaagaagtagtaaatcaattctttaggtgctaaaatttgtccaggagccctgcttttttaaattcttagctaaattttgaaacttatgtatattgttttcagatttttcaaatacatactactttgaaaccctgaaatacttttaaacttgcactgaagatattaccaacccactttcaataatttttagtaaatccaggtgtgatatttaatggatgagatcttaatatgccatatattatcccttcatctgatcaaatacatatctaaaaatattttttcttacacttaagtcaatgtaatctatgtgttcattcaaatatagttatatttgtaacatggatacttttaaattatctttttacatgaggagcataataatctacgaagtaattaaaaattaacctgtataaagtgtacacctgacagtggttaaaatggtaaattttgttatgtatattttactgccataaaaaaattaatctgtaagacaaaaggttatgccctgagtactttggaagttttactcactctacattataggataatgtttttgacaatttcattctggctcttcaattcttgaaccacttgcctaaatacatttggtatttacaataggtaacacacagtaccaaacaaatgtgaaaaacgagggaacaagaagtcagtaaaaattgaaagttcacatcatatagttcatgctcttgacactttaaagtgaaatgcaaaggaattatttgttcctaattaactcaagctttgctcaacacttgaaccagcaagaatacagcacataaattatcccaaacgattatctccaaattcttggaagccagggaatccctctacctatctcctggtatcagtaacatttttagaaaactcattcaactagcaatgtggctgcagcaatgagcctgaatgagagcccacgaagattcgggtctcttggacaactataaaaattgtgaagatgccaaaaataagcctagtccttccaaccatatgtaatcagcgtattgaaatcattttgcttaatataatgtaccccttgcctttaattgtccagccatcccatgcgtgtgcacacatatgcctatgcattctcccagctagattagcaaaagcaggccctgttgcttccagtgagtatcatggctctctgtaaatttctgctcattacctaagcaaacaactgactcaaaacttctcaagaaagatttggtaacactgggcaaatactgtgacccccacacaatccattttaatcttttctctatccctaaaatatcacatggacacaaaccaggtatttcctcttttgggctaagttaaattacttataaaatgaggataccatcttaacacaaactgcattcaagcttatagaagcactaaaaaagtaaaacatattagatctattgctattctatgccttctaggaaaaagcaatatgataaaatatagggggaaaatgttgtatacatacatgttattaatgttgttgtcatatggtctaaaattaatctataaaacaaaaagctatcttctgaatactgtagaagttatatttgctttacaatataagataatatttttgacaatctcattttggttctttaatttttgaatcacttgcctaaatatatttggtagttactgaattcctttgtaaaatctcctaacacggtgcttggtatagggcaagtgatcaataattatgcattcaataagctgatgcgtaattattccaagcttggttatggcttggaaaagaaactcctacctttcatgagaaatttaataacccattgacttgttaggtttcttcttaactaaggcattccagcatcttcaccttaattgcttagacaagttttggcaattcacagcctatttttggaatgctataatgaagtcaaccataaaacttttcctatgttgaaaatgatatcgagtttgggaagtggtttttgaaagtttccagttctgaatatcttggctgctctcatgtcttctctctacaccatattaagtttacacacatttatcgagtcacccctgagattaacaatgcaataattttcatgagtttacttccctacagaaaccagtcagccccatccacatagttactctgacttcttcaaaataaaatctctgttacctctgaatggtttgaatttgttctctaggtcaaattcttgtcttcctagtcgagataggtcgatttggagatcaggacatatagcatattcctcaatcgttttgctgatttggtagattttgtctgagacaacatcgggtgcaggacctaaaatttgaacaccaaaaatacatgtttttaaaagtctcgtgagtttcaagcagtgaaatgttaccatcctcctccaccaggcagagaaagattcatttgttctctaaacaatgatcaatggttcacagttcaattagccttgatatttcttatactgtactcatccactatgggggaaatttgatcagcctcacctgttctatgtagactaacaacccatatgtttgtttgtttgttttaatccacttctaagcaatgacacatctttcctaaaaatagtttcacacctgccagggaaacctggttatgtaatcagctttattcaggttatgagaca

SEQ ID NO: 726121 - DNA, 3028 bp, Homo sapiens
agttgcctttcttgtgggggctggccaaagactgactcagctggtatgaaacaaatcagcaagtgacctcagtagtgacccctgttttccaaatgccattgtgcctaccagattcgagtgcagaattggtgatgaatatattcctgggtttgcgtgaaatctcattcatgcccaatctagcacccaatttccaagtgaatggcaaatatctagaagttctcattaaacacaaatgctttccagtatctagcaccacccagtaaccaagaatccaaaaagtttyattcatttatgtgacataccaaaaagctcagaatacatttttcatacttgtcaatcagtgtataattaatgctcggaaagtacttttccaagaagtagtaaatcaattctttaggtgctaaaatttgtccaggagccctgcttttttaaattcttagctaaattttgaaacttatgtatattgttttcagatttttcaaatacatactactttgaaaccctgaaatacttttaaacttgcactgaagatattaccaacccactttcaataatttttagtaaatccaggtgtgatatttaatggatgagatcttaatatgccatatattatcccttcatctgatcaaatacatatctaaaaatattttttcttacacttaagtcaatgtaatctatgtgttcattcaaatatagttatatttgtaacatggatacttttaaattatctttttacatgaggagcataataatctacgaagtaattaaaaattaacctgtataaagtgtacacctgacagtggttaaaatggtaaattttgttatgtatattttactgccataaaaaaattaatctgtaagacaaaaggttatgccctgagtactttggaagttttactcactctacattataggataatgtttttgacaatttcattctggctcttcaattcttgaaccacttgcctaaatacatttggtatttacaataggtaacacacagtaccaaacaaatgtgaaaaacgagggaacaagaagtcagtaaaaattgaaagttcacatcatatagttcatgctcttgacactttaaagtgaaatgcaaaggaattatttgttcctaattaactcaagctttgctcaacacttgaaccagcaagaatacagcacataaattatcccaaacgattatctccaaattcttggaagccagggaatccctctacctatctcctggtatcagtaacatttttagaaaactcattcaactagcaatgtggctgcagcaatgagcctgaatgagagcccacgaagattcgggtctcttggacaactataaaaattgtgaagatgccaaaaataagcctagtccttccaaccatatgtaatcagcgtattgaaatcattttgcttaatataatgtaccccttgcctttaattgtccagccatcccatgcgtgtgcacacatatgcctatgcattctcccagctagattagcaaaagcaggccctgttgcttccagtgagtatcatggctctctgtaaatttctgctcattacctaagcaaacaactgactcaaaacttctcaagaaagatttggtaacactgggcaaatactgtgacccccacacaatccattttaatcttttctctatccctaaaatatcacatggacacaaaccaggtatttcctcttttgggctaagttaaattacttataaaatgaggataccatcttaacacaaactgcattcaagcttatagaagcactaaaaaagtaaaacatattagatctattgctattctatgccttctaggaaaaagcaatatgataaaatatagggggaaaatgttgtatacatacatgttattaatgttgttgtcatatggtctaaaattaatctataaaacaaaaagctatcttctgaatactgtagaagttatatttgctttacaatataagataatatttttgacaatctcattttggttctttaatttttgaatcacttgcctaaatatatttggtagttactgaattcctttgtaaaatctcctaacacggtgcttggtatagggcaagtgatcaataattatgcattcaataagctgatgcgtaattattccaagcttggttatggcttggaaaagaaactcctacctttcatgagaaatttaataacccattgacttgttaggtttcttcttaactaaggcattccagcatcttcaccttaattgcttagacaagttttggcaattcacagcctatttttggaatgctataatgaagtcaaccataaaacttttcctatgttgaaaatgatatcgagtttgggaagtggtttttgaaagtttccagttctgaatatcttggctgctctcatgtcttctctctacaccatattaagtttacacacatttatcgagtcacccctgagattaacaatgcaataattttcatgagtttacttccctacagaaaccagtcagccccatccacatagttactctgacttcttcaaaataaaatctctgttacctctgaatggtttgaatttgttctctaggtcaaattcttgtcttcctagtcgagataggtcgatttggagatcaggacatatagcatattcctcaatcgttttgctgatttggtagattttgtctgagacaacatcgggtgcaggacctaaaatttgaacaccaaaaatacatgtttttaaaagtctcgtgagtttcaagcagtgaaatgttaccatcctcctccaccaggcagagaaagattcatttgttctctaaacaatgatcaatggttcacagttcaattagccttgatatttcttatactgtactcatccactatgggggaaatttgatcagcctcacctgttctatgtagactaacaacccatatgtttgtttgtttgttttaatccacttctaagcaatgacacatctttcctaaaaatagtttcacacctgccagggaaacctggttatgtaatcagctttattcaggttatgagaca

SEQ ID NO: 726122 - DNA, 1191 bp, Homo sapiens
gcagaagtacttcctgaaagagggtataatttaatcaaagtttttcttttttatwaaaaaaaatgtttggtacagggtcttgctctgttgcccaggctggagtgcagtggcatgatcatagctcactgcagccttgacctcctgagctcaagcaatcctcctgcctcagcctcccaagcagctagcactacaggtgcatgccaacacaccaggctaattaaaaaacattttgtagaggcaggatctcactatgttgctcaggctagtctcaaactcctggcctcaagtgatcctcctacctcagcctcccaagtgctgggattatgaccaaagtcttaaagatgtatgggtattctacaggcaggaatcatgcctcaaaagagtaccacataaagccaggcctagcaaagccagtgtggttggtgaccaagggaaccttggggagtgacaagtcctggcagagagcttgatggaaacccaggttttgcaaagtcggcatgggagagcagtgtggaaatgtagaccaggcccaggcctaggggacctggagtagcaaaaccaaccagtacgttattcaggcagtacgttattcaagcatttaaaacacattgttttaaatgctttttttcccccaaatgtcacacattaagaattagtgtagggaaatggttcaaagcctggactctagagctgggtggccatgggtaagtcacgtgaaaccttgatgcctcagtttcttcatctgagaaacagcacaatagtactttacatatgctatatatgcttcagttcctctacacagtaagaataataacaaatactgctcaaacaccacagcatgcacacaccgtcttgggcgcatcacatatattaagatgtttcatccttctaccattccgtggagaggggaaaggtgtcacgggaacagagcctgagcttagggatgcactggcacatgctctcctgtgctattacaaagggtgtgtattcatcccacgagagaaagccagctggagactagaagcaagtggaatttgacttgaacagtttaaccacagtggaagccgacgtgactttggccttcagggagtgtctgtacttgggctatgctgctccagagttccttttgcttctgttcctgctcctggctgtctgggatggttcccagtgcaggacttgtgctgctcaatg

SEQ ID NO: 726123 - DNA, 577 bp, Homo sapiens
aggaagcacaagaaggagaacatggtctaccagatattaagttatactctaaattatagtagttaaacccgtgtgtgagcttacagaacgaatcaaagagagtaatgaaacccaagagagcataaacatgaaacatagaatattctactagtagcattcaagtgcagggaaagwttgaactggtcaactaagggtattgaaacaactgattctctatttagaaaaaaatgttaaattcctacctcacaacatgcagaataatatattctagatgaattacggagctaaatataaaaaacaacaacaacaaagaccttagaaaacactaaaaaaaaggagaatagattgtattttaaaatttggcgatggactacgggttttgaagcaataaaagatacagcaaggaaatttcaggaggtctgactacacaaaaattgaaatctatggaccaagaagacctcataaattaagtcaaaatgcaggcaacaaaatggcttgagctcctaaaaaattacttctcaattaattgtcctgtgacattagccttcttgaaaaggtagagatttgtaaatatgca

SEQ ID NO: 726124 - DNA, 587 bp, Homo sapiens
tggcatgggaataaattcctatattttcattagcataaccaatttttcttgtgtcatttgttgaaagactattctttccctgtagaagtgacctagcacctttgcttgaaaataacttgaacatcattttaaggatttatttctggactctaaattgatatctaaatgtggatctttaaaccattacctcartatcttgattactatatctttgcagtatgtttgaaatcaggaaatgtttaagtcctcctactttgcattcttcttcaagtttgttttggttactctgtgccccttgcattttcatataaattttatgattcatttatcaatttctgtcaaaaaaagccagtagtgattttgataggcattgcgttgaattcatagaccacttttaggagtactgagtcttcaaattcatagttatggagtatatctacatttattttgactaccttaaaactgaaaaacacatttaaaaatattaacattatatttacattgtaagaacaattatttttatatactctacttcgtctcttttcaccttatttaatgtatgttctacaaaattaaatattgttcct

SEQ ID NO: 726125 - DNA, 634 bp, Homo sapiens
ttttcatcctcttttttacttaacataacattgcatgacattatactatgatgttttttgttgttccattttatggatttttttgtaaaggtgtaaaaaccttgtggtttaaaatagtccttcaaactttataaagttctcttttctgttagtgtgcaatattttaaaatatgatggcttgctttctgatctttcatgactatctgtctcttcttgactttttctgataaatattttagtagagacagggtttctccatgttggtcaggctggtctcgaattcccgacctcaggtgatccgcccttctcggctttccaaagtgctgggattacaggagtgagccaccgcacccggccgaactagcttatcttttagctaataaaggggtcctacaaactcttcttgcactcataacatgttttccaccaatgttacaaggtgagcatctctaatccaaaaatctgaaatttgaaatgctgcaaaactcaaaactttttgcgtgccaacatgacaccagaagtggaaaatttcacatttggcacmtttgctttctgatggttcaatatatacaaactttgtttttggcacaacagagttgtattaaaaatattgtataaaattaccttcaggcta

SEQ ID NO: 726126 - DNA, 577 bp, Homo sapiens
tttaaaaaaagtgtctggatcttgacctgtggttagatcttccctcactccatggataaaaaggaatttacctgtgttttcttatgattccatgtttcactttctatgtttctaaatatataaaatatctgtcctacccagttatcccaacttaaaagtcatctttgccccaccggcttgtgatgacacctttatcacatattgaatttccatatgttggttcatcttagtacttcctgtttatactattggtctataattcataygctcatgttataccatttattgagacttcatggaatattttgctagcttgtagaacttgtctttctccctcccccattacttatcctttcaataactttcttgacttatttgttcattttttcatgtgaattttggatcacctacagatcagtttctcctacaggttttagttctcatccagggtcattggtgccttagcccaggctttgctgctggcaatacaaccaatagataaggcttgttacttatgctcagggctacgggaagctgtggcatatacagggacatgccctgttggctcctgcccaag

SEQ ID NO: 726127 - DNA, 577 bp, Homo sapiens
tttaaaaaaagtgtctggatcttgacctgtggttagatcttccctcactccatggataaaaaggaatttacctgtgttttcttatgattccatgtttcactttctatgtttctaaatatataaaatatctgtcctacccagttatcccaacttaaaagtcatctttgccccaccggcttgtgatgacacctttatcacatattgaatttccatatgttggttcatcttagtacttcctgtttatactattggtctataattcatatgctcatgttataccatttattgagacttcatggaatattttgctagcttgtagaacttgtctttctccctcccccattacttatcctttcaataactttcttgacttattygttcattttttcatgtgaattttggatcacctacagatcagtttctcctacaggttttagttctcatccagggtcattggtgccttagcccaggctttgctgctggcaatacaaccaatagataaggcttgttacttatgctcagggctacgggaagctgtggcatatacagggacatgccctgttggctcctgcccaag

SEQ ID NO: 726128 - DNA, 577 bp, Homo sapiens
tttaaaaaaagtgtctggatcttgacctgtggttagatcttccctcactccatggataaaaaggaatttacctgtgttttcttatgattccatgtttcactttctatgtttctaaatatataaaatatctgtcctacccagttatcccaacttaaaagtcatctttgccccaccggcttgtgatgacacctttatcacatattgaatttccatatgttggttcatcttagtacttcctgtttatactattggtctataattcatatgctcatgttataccatttattgagacttcatggaatattttgctagcttgtagaacttgtctttctccctcccccattacttatcctttcaataactttcttgacttatttgttcattttttcatgtgaattttggatcacctacagatcagtttctcctacaggttttagttctcatccagggtcattggtgccttagcccaggctttgctgctggcaatacaaccaatarataaggcttgttacttatgctcagggctacgggaagctgtggcatatacagggacatgccctgttggctcctgcccaag

SEQ ID NO: 726129 - DNA, 655 bp, Homo sapiens
ttctctctctcttttttttttttttttttttttgagaccgagttttgctcttgttgccgaggctggtgtgcaatggcacgatctcggctcaccacaacctcctcctcccaggttcaagcaattctcctgcctcagcctcccaagtagttgggattacaggmatgtgcgaccaccccggctaattttgtatttttagtagagacggggtttctccatgttggccaggctggtcttgaactcccaacctgaggtgatccacccacctcagcctcccaaagtgctgggattacaggtgtgagccaccgcacccggccttacaaaattctctctttatctttactctctctcgactcttttttccttgatgtgaatgagggattcaaggttgtgtaattttcagctatctgctttgaaattctgcaaataatctaagatctcctttatataatatgacatttattgtagcgtggtgaaacttccaatttaacattgtgttatgataatagtcctaacaatgtgctatgctaggtgtttgagatatcttagtcttcacagccattctgcgaagctaagtgttattatccccaatttacacatgaagaaactgaagctttgagagatttcatgacttgctcttggctccacaaatgaaaga

SEQ ID NO: 726130 - DNA, 655 bp, Homo sapiens
ttctctctctcttttttttttttttttttttttgagaccgagttttgctcttgttgccgaggctggtgtgcaatggcacgatctcggctcaccacaacctcctcctcccaggttcaagcaattctcctgcctcagcctcccaagtagttgggattacaggaatgtgygaccaccccggctaattttgtatttttagtagagacggggtttctccatgttggccaggctggtcttgaactcccaacctgaggtgatccacccacctcagcctcccaaagtgctgggattacaggtgtgagccaccgcacccggccttacaaaattctctctttatctttactctctctcgactcttttttccttgatgtgaatgagggattcaaggttgtgtaattttcagctatctgctttgaaattctgcaaataatctaagatctcctttatataatatgacatttattgtagcgtggtgaaacttccaatttaacattgtgttatgataatagtcctaacaatgtgctatgctaggtgtttgagatatcttagtcttcacagccattctgcgaagctaagtgttattatccccaatttacacatgaagaaactgaagctttgagagatttcatgacttgctcttggctccacaaatgaaaga

SEQ ID NO: 726131 - DNA, 1374 bp, Homo sapiens
taattctttttatatccattgactctttaaaaattttatttttattcagataaaacttatgtaacataaaattaaccagtaaccattttaaagggtacagttcagtggcatttaatatatttacaacgtgtgtggctatcacctctgttataggacttttcgtcaccccaaaataaaacccatacccattaaaagtcactccccatttcaccctccccagtcccctgcccttgataaccactagcctgcattctgtttctatgtatggatttacccattctggatgtttcattacagtggtgttttttcaatgctataggtacaattgtgcaagtttacttattctatatttttaaaatcttattattacacaattaactgaagataaggattttgatcaggtgtattgattttggtatatcacacttgttagcctaaattgagaagtacctactttactaaaagaatgcaacatcaattagaaattgtggagcctgcaaagtaattatgaacttgtgaaattttccccagattacctagtagaatttgaagtttattgttttcttgcctattaggatagaataatattgttactcaatttaaccataatttgctagtccttattaaagcattcctgcttatttttaatataaagtttcttttagagtatcaaatacttagaccaacaaatattcatgtataagtttgtatatattttatgggacttaagatattttttatgaagctttcttagtaagcaacacaaaaacattggttgattttgacacatattatgtagagaaagtatactaaatagtatgaaataaaaatctgtttaaatttttttyttttttttttttttttttgtgagacaaagtcttcctctgttgcccaggctggagggcagtggcgcaatcttgactcactgcaacccaagcctcccacattcaagcaattctgtgtctcagcctcccaagtagttgggattacaggcatctgccaccatgcccagctaatttttttatttttagtagagatggggttttaccatcttagccagactagtcttgaactcctgacctcgtgatccacctgtgttggcctcccaaagtgctgagattacaggcgtgagccaccgtgccctgccttaaatgtttttcctaactcttacttgtgtatccaaacctatattacccatctgcctatttatttttatgtcaaattcaaaaacttagatatttaatagttaaagctttattttctctgttattgaccctcatatttctttcttgttatagtactgttaatttattggtaaattacttcatcatatatgtattgaatgccaactacatgcttgatacagtactaggc

SEQ ID NO: 726132 - DNA, 1374 bp, Homo sapiens
taattctttttatatccattgactctttaaaaattttatttttattcagataaaacttatgtaacataaaattaaccagtaaccattttaaagggtacagttcagtggcatttaatatatttacaacgtgtgtggctatcacctctgttataggacttttcgtcaccccaaaataaaacccatacccattaaaagtcactccccatttcaccctccccagtcccctgcccttgataaccactagcctgcattctgtttctatgtatggatttacccattctggatgtttcattacagtggtgttttttcaatgctataggtacaattgtgcaagtttacttattctatatttttaaaatcttattattacacaattaactgaagataaggattttgatcaggtgtattgattttggtatatcacacttgttagcctaaattgagaagtacctactttactaaaagaatgcaacatcaattagaaattgtggagcctgcaaagtaattatgaacttgtgaaattttccccagattacctagtagaatttgaagtttattgttttcttgcctattaggatagaataatattgttactcaatttaaccataatttgctagtccttattaaagcattcctgcttatttttaatataaagtttcttttagagtatcaaatacttagaccaacaaatattcatgtataagtttgtatatattttatgggacttaagatattttttatgaagctttcttagtaagcaacacaaaaacattggttgattttgacacatattatgtagagaaagtatactaaatagtatgaaataaaaatctgtttaaatttttttttttttttttttttttyttgtgagacaaagtcttcctctgttgcccaggctggagggcagtggcgcaatcttgactcactgcaacccaagcctcccacattcaagcaattctgtgtctcagcctcccaagtagttgggattacaggcatctgccaccatgcccagctaatttttttatttttagtagagatggggttttaccatcttagccagactagtcttgaactcctgacctcgtgatccacctgtgttggcctcccaaagtgctgagattacaggcgtgagccaccgtgccctgccttaaatgtttttcctaactcttacttgtgtatccaaacctatattacccatctgcctatttatttttatgtcaaattcaaaaacttagatatttaatagttaaagctttattttctctgttattgaccctcatatttctttcttgttatagtactgttaatttattggtaaattacttcatcatatatgtattgaatgccaactacatgcttgatacagtactaggc

SEQ ID NO: 726133 - DNA, 1222 bp, Homo sapiens
ggtggcagcaaaacaaagtatgaatttcaaaaagataaaaaattgatccatagttttaagatatacatttaaatgcccaacataccatcttttctgtctctcatcttctgataactgaatattctttttttgtttaatttcagaagacaaaaaattttgaaaaacactacctaaggaaaaggtagtggaaaaggttgtgttcacttcaaatgaacacaactacataaatgggtttctaacttactatctgtaccaattcattaacaagtatgcatgagaaagtcatagcacagctacttgggtaatctattttattaagtccaaactgagtgtgtaattacaagttttaaagcattatttccttaaagctgtcttgaaaacagaaagaaaattaaaagtagatgattttccatcactttaatggtcattttataccaaggcaagaaatacctaagccctgaatttgttaaacaagagatatttaaaataggtagttagacacacataatggactctataagtagaaaaaaaatacattcagtccaggtgcagtggctcatgcctgtaatcctagcactttgggcggccgaggcgtgcggatcacctgaggtcaaaagttcgagaccagcctggccaacatggtgaaccctcatctctactaaaaatacagaaattagccaggcgtggtggccagcacctgtaattccagctactcgggaggatgaaacagaatttcttgaacccgggaggcggaggctgcagtgggccaagatggcgccacagcactccagcctgggtgacaacgcgagactctgtctcaaaaaaaaaaaaaaaaaaaaaaaaaaaaawtttcacacacatactcatgtatctgccagaaaacttacagaagaccatatgtaagtttctgtcacttatttctgagtcatggaattactgctgggtttgtttgtctgcttatctgtactttctaatttattctagaaggagttcatctatttttgaaatgagattaaaaagaaaaaaatgcttacgggagaaaaagggccattaattttaaagtcatgtaacaattctggaatgatctttaagaaattctctagctaagctctagaagcacagaacacttatgatacccatggaggtcaatactcaaaacttaaagtttacccagaaaaagtagagtaggtaaggaggaagggttcattcaagatcacagata

SEQ ID NO: 726134 - DNA, 1222 bp, Homo sapiens
ggtggcagcaaaacaaagtatgaatttcaaaaagataaaaaattgatccatagttttaagatatacatttaaatgcccaacataccatcttttctgtctctcatcttctgataactgaatattctttttttgtttaatttcagaagacaaaaaattttgaaaaacactacctaaggaaaaggtagtggaaaaggttgtgttcacttcaaatgaacacaactacataaatgggtttctaacttactatctgtaccaattcattaacaagtatgcatgagaaagtcatagcacagctacttgggtaatctattttattaagtccaaactgagtgtgtaattacaagttttaaagcattatttccttaaagctgtcttgaaaacagaaagaaaattaaaagtagatgattttccatcactttaatggtcattttataccaaggcaagaaatacctaagccctgaatttgttaaacaagagatatttaaaataggtagttagacacacataatggactctataagtagaaaaaaaatacattcagtccaggtgcagtggctcatgcctgtaatcctagcactttgggcggccgaggcgtgcggatcacctgaggtcaaaagttcgagaccagcctggccaacatggtgaaccctcatctctactaaaaatacagaaattagccaggcgtggtggccagcacctgtaattccagctactcgggaggatgaaacagaatttcttgaacccgggaggcggaggctgcagtgggccaagatggcgccacagcactccagcctgggtgacaacgcgagactctgtctcaaaaaaaaaaaaaaaaaaaaaaaaaaaaattttcacacacatactcatgtatctgccagaaaacttacagaagaccatatgtaagtttctgtcacttatttctgagtcatggaattactgctgggtttgtttgtctgcttatctgtactttctaatttattctagaaggagttcatctatttttgaaatgagattaaaaagaaaaaaatgcttacgggagaaaaagggccattaattttaaagtcatgtaacaattctggaatgatctttaagaaattctctagctaagctctagaagcacagaacacttatgatacccatggaggtcaatactsaaaacttaaagtttacccagaaaaagtagagtaggtaaggaggaagggttcattcaagatcacagata

SEQ ID NO: 726135 - DNA, 649 bp, Homo sapiens
tatagagattaaagggctttggattaaaaggtttgaagtagttgaaacctttacagaaacaaaagcaacatgtcattactttcccattaaaaatttcaaatgaacaccctcagttaatgctttgctgccatatctttttttccctttggaaatccaaaagcctgtgaatctggtccatgtcaattattttgtttacaggatattgcattactaaacccaaggtgatctccaagttggagaaaggagaagagccatggtmtttagaagatgaattcctgaaccagaggtacccaggtgagtgggcattaacagaaggagccccctgggggtacttagtctttagagggagagcacctttgaaagtttttttggaacagctttattgagatataattcacatgcctacaattcactcctttaaagtgtacaggtcagtgacttcaagcaaccacagatcaaaactattcagggaagaaatattgcactttcattcaacatgtatagacatttttttcctgtcactattccctgaacaatatagtataacaactatgtacatggcatttacattgtattaggtagcataattaatatggtgatgatttaaagtatacaagaggatgtgcataggttatatgcaaatactatg

SEQ ID NO: 726136 - DNA, 857 bp, Homo sapiens
gattccagaaatcttagaaagttatagttttcaatgtcatttttagaataaaaaagtaaaatcatcttattagaagtgaagcacaattaaggtttttgtttgaagccataccaacaaatagcatcacataaagagtgacataatttagatcaagtatgttgctgagtcactaaatgtaaattattggatcatattgattgtctaaaaaggatatccctaaataagtaacatagaaagatcattataaaagatcagtaaagttgggccaggcgtggtggctcatgcctgtaatcccagcactttgggaggccaaggcagacagatcacgaggtcaggagatggagaccatcctggctaacacggtgaaaccctgtctctactaaaaatacagaaaattagccaggcacctgtagtctcagctacttgggaggctgaggcaggagaatggcgtgaacccaggaggcagagcttgcattgagccgagattgcaccactgcactccggcctgggcgaaagagcgagactcagtcccaaaaaawaaaaaaaaaaaaaaaatcagtaaagttgttgagtcaataaagataaaataatgtagatttcatgttctatatcattcagatttgaattcaggcaagaaattcattaaagtaggaaaagctctcattcaagagcacagggaaatgaaaacctttaaggatttgaatgactgcaccaaataatataatatcaatgtttctaaaacataaaataatggagttctaagaacttaaaactcattagaattaggacatcataatgtctcatctgattaaacagtaggtacagtggacattaaataaatatgcctagagaggcta

SEQ ID NO: 726137 - DNA, 857 bp, Homo sapiens
gattccagaaatcttagaaagttatagttttcaatgtcatttttagaataaaaaagtaaaatcatcttattagaagtgaagcacaattaaggtttttgtttgaagccataccaacaaatagcatcacataaagagtgacataatttagatcaagtatgttgctgagtcactaaatgtaaattattggatcatattgattgtctaaaaaggatatccctaaataagtaacatagaaagatcattataaaagatcagtaaagttgggccaggcgtggtggctcatgcctgtaatcccagcactttgggaggccaaggcagacagatcacgaggtcaggagatggagaccatcctggctaacacggtgaaaccctgtctctactaaaaatacagaaaattagccaggcacctgtagtctcagctacttgggaggctgaggcaggagaatggcgtgaacccaggaggcagagcttgcattgagccgagattgcaccactgcactccggcctgggcgaaagagcgagactcagtcccaaaaaaawaaaaaaaaaaaaaaatcagtaaagttgttgagtcaataaagataaaataatgtagatttcatgttctatatcattcagatttgaattcaggcaagaaattcattaaagtaggaaaagctctcattcaagagcacagggaaatgaaaacctttaaggatttgaatgactgcaccaaataatataatatcaatgtttctaaaacataaaataatggagttctaagaacttaaaactcattagaattaggacatcataatgtctcatctgattaaacagtaggtacagtggacattaaataaatatgcctagagaggcta

SEQ ID NO: 726138 - DNA, 651 bp, Homo sapiens
tgcctgtaaattgactcagtttcttaccttcttattcttataccacagttggcaaagtagttataaaataatagaattattattaagagcaagtaacaaaggatgaaaaaattgcctaaaacactgtcacacagtagaaaccacagctaatctttataactttgtactttttgtttagatattttactataatttttcatgcatattttgaaggtaagtaacatgacgtatgcatgattttgtttttgtattatttcagtttagcatgagctaaacatttattagacaaaataacataaatctaagttataaagaaactgataattatgattatattaaaatataaatgctacatatatcacaccaataaaaatraacacacattattgtctaaaatatttaaaacacatgtaaacaacaaatgattactatatagaagagtccacaaaatcgagagcaagacaacgcaatggaaaaacaagcaaatgacattcagataagagtaaatttgaatagtcagtaaagataattcaaaatgctaaaattagactagaataaaaatatttaaaagcacacaatgaaaatcatttcacacaataatatttacaaaaatattaaactctgaaaatgccatgtattggtttttggtga

SEQ ID NO: 726139 - DNA, 651 bp, Homo sapiens
tgcctgtaaattgactcagtttcttaccttcttattcttataccacagttggcaaagtagttataaaataatagaattattattaagagcaagtaacaaaggatgaaaaaattgcctaaaacactgtcacacagtagaaaccacagctaatctttataactttgtactttttgtttagatattttactataatttttcatgcatattttgaaggtaagtaacatgacgtatgcatgattttgtttttgtattatttcagtttagcatgagctaaacatttattagacaaaataacataaatctaagttataaagaaactgataattatgattatattaaaatataaatgctacatatatcacaccaataaaaataaacacacattattgtctaaaatatttaaaacacatgtaaacaacaaatgattactatatagaagagtcyacaaaatcgagagcaagacaacgcaatggaaaaacaagcaaatgacattcagataagagtaaatttgaatagtcagtaaagataattcaaaatgctaaaattagactagaataaaaatatttaaaagcacacaatgaaaatcatttcacacaataatatttacaaaaatattaaactctgaaaatgccatgtattggtttttggtga

SEQ ID NO: 726140 - DNA, 1950 bp, Homo sapiens
catatgcagtgtgctacttaatccttatcacaattcaattaggaccttcaatctgagttcttttccagacttcattcactgcagttgtaggaaaaattcttcccttcaccttgaaaatattaactcagtcacttcatcttatagaaagaatacagcattgtctaatgactagaaaggtcagggaaacagaacaattttcaaagagaaagaaggattcagacatcaaaatatttattcaatggtgagaaaaaaaaatttgctatgaaaggacaaaaatttgtgtggatttccaaatgtttcctgcttgggtctggctggccctttgagctaataaggttcccctctagctggaagagaagcctgaagcctccaagtgatattttaattcaattagtgtcttaccaatttgatgcagcaaccaaggacctatggtgtctgattaatatgctgatgctaagacacaagagtgaacagaatgcctatttggataaggcctggcagcaaagcgtggcattgctatggaaaccacagaaggacattaattagctatcaaataaaatcattggaaaattctggaccctggcacatctgcccccttcaaagagaagggcaagaagaggtcacactaacagcaaagctcccttcagtgattaaaatcaaagttacatgtagtccagagactacatgttgcaaagtggaagaaagatgggggagcaaaacgggtgaacacaataggaatgaggctttgggattattcaagtccaagaatataatttggaatgtggagtatcttgttgggttgtctgtattgataaaatgatccaaatgacaaatatgttatcctatactctgttatgtagaaagaaaatgataataatgatacrgatccatccactagacggtgataaatgatcaggggtagagaccatagagtccaagactaagggtgattaacccctaatataatagatgcagatcctataacttttaagttaatagagaaaaaaacaattgaaaagaaggcaaaaaagacaacaaaagaatcattaaaatagctggacacatacaaacatgtacaataacgaaacttactatacagataatcacaataaacataattggataaaactggtcagtaaaaaaccagagactacaagttattaatttaaaagtagataaaggttgaaaataaaagaattgacaaaaatatgttagacacatattgactaaaagaaagctaatgtagcactgttcgtggcagtcaagatagatttttaggaaaactactttattagagttacagaggattaatttaccaggacaaatggagagaagactgcacaggtggaattatagacttttagggctaaagaagatgttacagatctttaaaacttcaactttttgaattatataattatataatttatataaagaatttgtataaagagaggattataccaaaagtttgaacactgaccgtgagtttagtcctctttttactgtctggaagtaaaaggttttctagtctaatcttctagtcagtataagaatcaaggatcaaccccatgatatttatactaatgggttaccaaacactctctctctcttcatatctatatagatatatacacacatacacacacacacacacaaatatatatgctgccagaccacatatatataaacatataatttcttgttaccaaaattttatacatagacatttttccaactaaggatcaactaaatccttggatgttcataataatcttaggctgagtggaggtcgatctcttcttgagaattgcttatcagtgactccagccttagcaactctaaaaacctaaaaggaggaggctgcctgagtaaactcttatcaatattccttctctctctaaattgttaccaggacctgcagttacacatgtgatgccattccttactttt

SEQ ID NO: 726141 - DNA, 652 bp, Homo sapiens
tgaaatatattttwaacagccaggataatgccacataactatcagggctagtgttcccctcctcaatcaggtgaatcagacagaacacagaggctgaaaattcatggtacattcaggaaacaatgtggaatctgaaacaatgtggagccagtaggtgaggacccagaggcaatccagaaaattgttggtctggaccatgcgaggtcctgtttgccaccccacaaatgcaccatctgcattgcatttcactctgcagcaagataatgtagctaacgccaggtaggtgcctgcagaggtggaggtggtggcaacacttacctctctctaggcagctggtggttgggattgtggcgacagcgtacactgaggccgaaaagcttgcgggcagtgcgttggatcttttgtctctgtgcctccgtggcactctgcaggagcttgtagcggttctgcaggtcccagtcattgccccagtgctgatggatgcttccgatggtcaggaagtggttgctggggaggcgcttcataaatgatttaaactcatctagtgagagacaaaggccgagagagaagggctaagcatgataacacccatctaaagtggccttgaatgcttagtgtcactttccaataaaccaggcctgcaaacataatt

SEQ ID NO: 726142 - DNA, 615 bp, Homo sapiens
tgcatgccttcagaagatggtagctataaaaataaatatgttgaagataatgttaataaattctagtcagacactgttgcctgctaaaaaaatcaaacctccatgactgctctcatgttgaaatgcaggmaattagcaagtgttaggtgttaaaggcatgctagcaccaaactgaaactttttgatgtaatctgcaggttccacagagaactgaaatggatcaacttccccacccggtgatccagtgttgtttgaagttgtatgggtgtcccatctagcatcaactcacatttcaaaaaactccagcttaagagatggtgacaaactcttgggcctcccaggtaaaagtttctgcctcagtttgtgatgctgagtttcagagtgtcaacttggcacatccatagaaattatctagttcagctcttttgttctatgaataggaaaactgaagcccaaaatgggaagatgatttcttaaaggtaacgtggctgataaatgacaagatccaggtctgtgtcctgagtttctgttttccaatctaataatccaatctgttgtaattctaatccctatcaccccatccctggaaaattaaaaatatcaaggggttgatca

SEQ ID NO: 726143 - DNA, 1060 bp, Homo sapiens
ttggctgcccctggggctgatgcccatgtctgacacaatcagctgtggtgtgagcagaagttgccagtcacatggtaccaaagaaggtgacttctgctctgtctttagaagggtctgtgggtaagtggggcagacatcatgactgacatgtacagtaacatccttaacaggtttgcaatgtagttgattgataatagccagaaggtttaaaatatttttttttttgagatggagttttgctctttttgcccaggctggtgtgcaatggcgcgatctcggctcactgcaacctctgcctcccaggttcaagtgattctcctgcctcagcctcgtgagtagctgggattacaggcatgtgccactacacctggctaattttgtatttttagtagagatggcggtttctccatgtgggtcaggctggtctcgaattcccagcctcaggtgatctgcccgcgtcggcctcccaaagtgctggaattacaggtgtgagccaccacgcctggccaacaacttttaaaaaataaatgaatatacatcattttagtgtgaaatttaagtcagtaataattgacttagcccctttctcctcagctatcaatgtaggttgagatttttaggtctataaattgtattgttwaaaaaaaagggatagtaatgatgtagtttttaacttcgtgatactatccatataaatatgaaaattttcagaaacaagcttaatttatatacatataagaaaaagactgttcttatgcttggccagaaatatacttctttctgtcctgtacttttattaggttggtgtttgccaagcttcaggcatttacatcccaccttcatatctaaggctagcatttttagtttgtttagagaatttggattgggtgcagcaagacatttttgaagtcattcttttaaatagatgttccatgaaggagggaaaatctgaaagaaggaatttcaaagcaacccaagcagtgttttgaaaattctcaagactgaagaataatgactgactagtaggcaggaagcctgcagttgtattgtggtattgttc

SEQ ID NO: 726144 - DNA, 576 bp, Homo sapiens
gagaatgttctctttctgttttgccaacctcatcttcatattcaactgttgcaaataactctyataaatgtcatgcatacttataaaacagtatgttttggctggacacggtggctcatgcctgtaatcccagcactttgggaggccaagcccggtggatcatgaggtcaggagattgaggctaccctggccaacatggtgaaaccctgtctctactaaaaatacaaaaattaactgggcgtggtggtgcacgcctgcagtcccaactactcaggaggctgatgcaggagaatcgcttgaactggggaggtggaggtggcagtgagccaagattgtgccactgcactccagcctggcaacagagcgagactctgtctcaaaaaaaaaaaaaaaaaaaagcaatttggaggggtggagccaagatggccaaataggaacagcttcagctcccagcatgagcgacacagaagacgggtgattgctgcatttccaactgaggtaccaggttcatctcactggggagtgccggacagtgggtgcaggacagtgggtgcagcgcactgtgcatgagccgaa

SEQ ID NO: 726145 - DNA, 576 bp, Homo sapiens
gagaatgttctctttctgttttgccaacctcatcttcatattcaactgttgcaaataactcttataaatgtcatgcatacttataaaacagtatgttttggctggacacggtggctcatgcctgtaatcccagcactttgggaggccaagcccggtggatcatgaggtcaggagattgaggctaccctggccaacatggtgaaaccctgtctctactaaaaatacaaaaattaactgggcgtggtggtgcacrcctgcagtcccaactactcaggaggctgatgcaggagaatcgcttgaactggggaggtggaggtggcagtgagccaagattgtgccactgcactccagcctggcaacagagcgagactctgtctcaaaaaaaaaaaaaaaaaaaagcaatttggaggggtggagccaagatggccaaataggaacagcttcagctcccagcatgagcgacacagaagacgggtgattgctgcatttccaactgaggtaccaggttcatctcactggggagtgccggacagtgggtgcaggacagtgggtgcagcgcactgtgcatgagccgaa

SEQ ID NO: 726146 - DNA, 1031 bp, Homo sapiens
acacagtaaaaccccatctctactaaaatacaaaaaattagccagctatggcagcatgcatctgtagtcccagctacttgggaggctgaggcgggagaattgcttgaacccaggaggtgggggttgcagtgagctgagatcacgccactgcactccagcctgggtgacagagtgagactccatctcaaaaaaaaaaaaaaaaaaaaaaaaaagaaaggaaagaaaaataaaatgcaatgtctgtgtcaatcctggtagcccctttgtgaagaaatgacctgtctccaagggcatgattcagtttcatctgagacactggggctacaccccaagtgcgctcaccctgaaatgacctgagggcccctctctgcaaagtataggcagactctgaggctcagggggagagtggcagccccagaagccactgctctgcctgcagaggtaattttttgaaaattcttggcctttcatttttgccgggtactttgatggagacttgaaattggttttctttccccagtgcatttttttcatatgaacttaaattgccagtatttctggcatgacctaatatgttgttatgccacccacatcatttttcataatggagaaggtaagaagcccaggactacttcccaggtgagatctgcgactcctgtcttggaatcaccgtggccccatggtgatgcagaagtccaggctccactttgatgcatggagtcagaaccgggtgcatggtggggtatgcaagggacactgygtggcaaggctagagtctggttgtgaagcaggctccacaggtgacttctaatacaaactcaagtttgagaaccaccatcaatgcccagtctcatgggaaaacacagctaaagagaggaatcctgtacccagtctaagaccatgtttgacttcaacttctattcttatctctttgatttgcaaatactccagccacagtgaacttgtcctcattccttgaacatggtctaaagattcagaagttccttctgcctggtctgtctattttttca

SEQ ID NO: 726147 - DNA, 652 bp, Homo sapiens
ttgctgagcacccctaaaaaggcactgcagactaaggctcttccacgtccctccccgccctggctcctgcagttggggtccgacttgcattgtggtctgatgctctgtcttctggtgatattgaggatgggccttttatctgttcttattctttttttttttttttttttgagatggagtctcgcgctcttgttgcccaggctggagtgcaatggtgagatctcggctcactgtaacctccacctccgggttcaagcgattctcctacctcagcctcccaagtagctgggattacaggtgcacgccaccatgcccagctattttttttgtatytttagtagagacggggtttcaccacgttggccaggctgctcttgaactcctgacctcaggtgatcctcctgccttggcctctcgaagtgctgggattacgggcgtaagccactgcgcctggcctgttcttcttattctttatagttttttggagaagacattaagagttttgggtttaaatggctgccattccctggactggccagcacccagttgcacctgacattttgccacgtttttcatagcacttctcacacttctcacaccaccctgacagtggtgttctggagctggctggtactggctcatgaaagctgag

SEQ ID NO: 726148 - DNA, 413 bp, Homo sapiens
tctttatccatgcattttcttcaattttttaatcatatttaagaataagtctaagaggagttcagtttttctatttccttagggacagtttccattaaattctgctatgaacagacaatatwttcttattttttgtgtgctttatatttttggttgaaaaatcagcacattttaatattcataatctgataactttagaaatcagaatcatgtctctcttcatagtttctttttctttcttatatatgttatagtggttctactctctctggaaccaggaaacatggtttcacactaggacatggactgccatcttcaagaccgcaatggaaccaaagaggacaagtaaaaataccacaaagctctactgccatttctatgttgattctttcttgatttagcatttgcttgct

SEQ ID NO: 726149 - DNA, 1397 bp, Homo sapiens
tgtattcaaagtacgtgcttgacaagaagtctacacctgtactccagcaggtttggatccctgatggacttacacttacatgatctcccaaattgtaaactccatttaacaaactctccaaacctgcttgactggcttactcatggagtaactcagcctttcctgtgtgtttgtgcagagtgaggcccatttccccagcctagtcctctcccaagactttcgtaagtgagttccacccaactaacttcagagcaagcttgggttctgtgcctctgagagcagctgtggyaagattgattgcttattcacagggaggaggaaacttgagttgggattccaagagatgccttttaataaatgtgttaaaaaacattcctgcattttcctcttagaaattctgaactgttttgacctctgttgctgttaacttccatctctttggattcttccccatctcctctgagtttggaaaaatctttcagttgccctgttccaaaaagcctctcccaaatatggacacgtggcaaaatatctgtggagtggggaaaaggttcttttttaaagcaatgttgatgatcactgagtggtgttaaaagtaaatttaaaaaataataatgccaaaataagtggatgttcgtgtggaaagcaaacttgactcctaccttacactatacattaaactcaatttcagggggaatagagatcctcaatgtgaatgaaagtataagcttttagaaaatatcctaatgactttagagcataataccctgttgttctcaacaatgagcaatatggacattgtcataatgaagtgatgactgcttagcctctaaatctggtaactactttgggacaatatgggaggaaaagtgaagacagtgatggtgtaagagctaaatcctcatctgtcatatcaagaaatcactatataatgtataaaacaatcaagaaatgcctaagtagttatgtgagaaaaaaatagaggacattgctaaaagagttaaaagtcattgctctggagaattaggagggatagggtaggggactggtaggatgcattataaactgaagaggcttttaaaaatttcatgtattaatatatgcattcacttgaaaaactaaaaaaataataattggaaaaacccatgaaggtaactaccagaaggaaaaactgagagaatgagaagtgcttgcctctggaaagaacaactggcaggactgttgctttcattgtaaggcttttggagccatttgattgtacttaatcatttttatctatttctttaataaaaacaattttatcttaataaagagttacacttgttcgaaaaaaaaatcttcatgattttgcaggttggaaaagatattttagacaagatacaggaaagagaagcaac

SEQ ID NO: 726150 - DNA, 626 bp, Homo sapiens
gataatagcctggttgttacctctacaatggatgcataatggcaaaacccagcatttcaaacctcataaaatgcaatataggaattttcttagggctgtctactttttccttcactggggaaaaaaaaccatcagaatggggtctttttaaaacatatctaacacaaaaaagaaaaatcttctagaggtgcattaaaatatatgttacaaagctctacaccatgccagtaatcacattacaatgcacacaaaggagttttaaaatttaggttgatagttcaatctggaatgagtgtttgggagtcttgataatatgattaatgcagatgctgaacatgtacattatatgtgctgttctgctttggagctatgctactcaatttattgcataaatgctgcatctaaggcttattatgcacagcacatccagcactaataaggatttgtgtgcaaatcttcrtcctcgaactttaagagcattaattaatacattcagccccctgttgaaagaggtgagttctgtctccctattttcggagactcaggattatgtgcacttcacctcagggtgctaagtgaagcagtgatgaaactcgggtattaaatgtgtaaaattattatcttca

SEQ ID NO: 726151 - DNA, 626 bp, Homo sapiens
gataatagcctggttgttacctctacaatggatgcataatggcaaaacccagcatttcaaacctcataaaatgcaatataggaattttcttagggctgtctactttttccttcactggggaaaaaaaaccatcagaatggggtctttttaaaacatatctaacacaaaaaagaaaaatcttctagaggtgcattaaaatatatgttacaaagctctacaccatgccagtaatcacattacaatgcacacaaaggagttttaaaatttaggttgatagttcaatctggaatgagtgtttgggagtcttgataatatgattaatgcagatgctgaacatgtacattatatgtgctgttctgctttggagctatgctactcaatttattgcataaatgctgcatctaaggcttattatgcacagcacatccagcactaataaggatttgtgtgcaaatcttcgtcctcgaactttaagagcattaattaatacattcagccccctgttgaaagaggtgagttctgtctccctattttcggagactcaggattatgtgcacttcacctcagggtgctaagtgaagcagtgatgaaactygggtattaaatgtgtaaaattattatcttca

SEQ ID NO: 726152 - DNA, 1092 bp, Homo sapiens
gtgagccaccgcacccggccaactctgagctactcttataatttcatgtatgtttataattatttccaaataaaaagtttaaaatatatgtatgtaatatgtgacatgtgcatcaaaatgtgatttgatttttatacgctttttgagagttaacacacagcagtccctcttttcctgggttttgggggacacttcaaggctcccattggatgcctgaaaccatgtatggtactgaaccctatgtgtcctctgcatgaatttctttttccttcttcacaatttcacagatagatctgttcttatcatagatcttagcaacctcagcataggatttttttctttccttattaggttgagaatgtttaccttttcacttaaagggagtaccttatggcttctctttggcatgtccaatttgccagcacatcattactcttgtgctttggggccattattaagtaaaataagggttccttgacatgagcaacatgatattgcaacagttgatcctaaatgactcacagacagggcgcgtagccagcgtggatctgccggacaaagggagccaggtcctgtgagggatggagtgagatttcatcatgctattcagaatggtgtgcaattgaaaacttgtttatttctgggattttccatttaatattttcagactgaagtggaccacaagtaactgaaaccatggaaagtgaaactgaggataaaggaggctcccataaattcacaagccagaagagtcatttggaaaggcaagtgtgtcctytgtgcttcttctttggaaaatatgatcaccacgggatttttttgtttgtttgttttgtttttgtctttgttttagatggaatcttgctctgttgcccaggctggagtgcaatggcatgatctccactcactgcaacctcaattaaaactaaaaaaaatcaaagtcaaaaataacgtttcagtttctaatgcccctaaaaactgtgtagtaaattgtaaaaaaaagaaactcagagaccggtgcccatgcaggtcctctgtatactaaacgccggtctcctgggcccactgttctttctctatactttgtctctg

SEQ ID NO: 726153 - DNA, 1683 bp, Homo sapiens
gaattcatgcttacttaaatatgtattctctgctattttgtttcaagataataaatttcatttttttaaaaaaacttaaagcatatgtagacattcttgtacataatgtgatagattttcaccaaaatcagacaccctttagaaaattactgtgaaaagctagacacataacttgaaatgcaagccagtcagttgaagaaactgcccagtctaagatctgagaatgatggagcaatatagaagataagttaataaaaaaaataggctattctgcttgactgaatagaaatggaatgttttaggagaatggaactcttgaacctaatcttgtataagaagacatgggatgtatatagttaattcacttgtttatggagtgatgatttgcttaattatctcatttcctttttacagtaagaaatctaaaagctaaagcccatgtaagtattttatataaggaagagtgttggtgtccacaaaatgtataataactggtgtatattttctgcaagaaaaaaatacacagataacagccactgacattatcatcactaaaaatagacaacaatagcaacagctacatgaattggtgtcatgcttttggcaatatttactaagttcttttataccattcatttctttcctttgattctacttctggaaatctgttccaaggacataatgtatgtccttgcatgtatatcagcctgcatttctacatacagcatatgaagaaaaactctttatacatacagaggcagcacagcctggtggttatgggcatagtctctggagttggagagcctgggcttaaatcctgactccactactgaccaaatgcgtgatgttgagaacttacttaaggcccgtgcttcagcctcctcgtctatgagatgaagataatctttgtaacacacacagtcttcatgaggattaaatgaggtaataagtgtcaatcactttattagtgaatttgataaatgttggctgttactattaatatgtttataatggggaagattaaaaataagaaaaagtaggaagagcaccattgctctgcaataggagactgggtgcatgagctctgatatatacactcaaggatagagtcatgaatttttttttttttttttttttttgaaacaggatctcactcgattgcccaggctgcgaccagtgcagtggtgtgatcttggctcactacaacctccacctcccaggttcaaatgattttcctgcctcagcctcccgagtacctgggattacaggcacgtaccaccatgcctggctaatttttgtatttttagtagagatggggtttcaccatgttggtcaaactggtctcgaactccggacctcaagtgatctgcccgccttggcctcccaaagtgctgggattasaggtgtgagccaccgctcccggcctagcatcattcaatttcaccatattatatatgctgtttagcacaggaactaactcatacaagtgtttagtgaagcctggatttcactgtgaaatactcaagatatccattgggttacattttaatataattgaaactgggacatatcttgcagtcaagggtgtgttagagtttaattggaagcgtgtgatgcatctcacatttgatgcactctgtgctcaacagaataatggcctcccaaagatgtccatgtcctaat

SEQ ID NO: 726154 - DNA, 1683 bp, Homo sapiens
gaattcatgcttacttaaatatgtattctctgctattttgtttcaagataataaatttcatttttttaaaaaaacttaaagcatatgtagacattcttgtacataatgtgatagattttcaccaaaatcagacaccctttagaaaattactgtgaaaagctagacacataacttgaaatgcaagccagtcagttgaagaaactgcccagtctaagatctgagaatgatggagcaatatagaagataagttaataaaaaaaataggctattctgcttgactgaatagaaatggaatgttttaggagaatggaactcttgaacctaatcttgtataagaagacatgggatgtatatagttaattcacttgtttatggagtgatgatttgcttaattatctcatttcctttttacagtaagaaatctaaaagctaaagcccatgtaagtattttatataaggaagagtgttggtgtccacaaaatgtataataactggtgtatattttctgcaagaaaaaaatacacagataacagccactgacattatcatcactaaaaatagacaacaatagcaacagctacatgaattggtgtcatgcttttggcaatatttactaagttcttttataccattcatttctttcctttgattctacttctggaaatctgttccaaggacataatgtatgtccttgcatgtatatcagcctgcatttctacatacagcatatgaagaaaaactctttatacatacagaggcagcacagcctggtggttatgggcatagtctctggagttggagagcctgggcttaaatcctgactccactactgaccaaatgcgtgatgttgagaacttacttaaggcccgtgcttcagcctcctcgtctatgagatgaagataatctttgtaacacacacagtcttcatgaggattaaatgaggtaataagtgtcaatcactttattagtgaatttgataaatgttggctgttactattaatatgtttataatggggaagattaaaaataagaaaaagtaggaagagcaccattgctctgcaataggagactgggtgcatgagctctgatatatacactcaaggatagagtcatgaatttttttttttttttttttttttgaaacaggatctcactcgattgcccaggctgcgaccagtgcagtggtgtgatcttggctcactacaacctccacctcccaggttcaaatgattttcctgcctcagcctcccgagtacctgggattacaggcacgtaccaccatgcctggctaatttttgtatttttagtagagatggggtttcaccatgttggtcaaactggtctcgaactccggacctcaagtgatctgcccgccttggcctcccaaagtgctgggattacaggygtgagccaccgctcccggcctagcatcattcaatttcaccatattatatatgctgtttagcacaggaactaactcatacaagtgtttagtgaagcctggatttcactgtgaaatactcaagatatccattgggttacattttaatataattgaaactgggacatatcttgcagtcaagggtgtgttagagtttaattggaagcgtgtgatgcatctcacatttgatgcactctgtgctcaacagaataatggcctcccaaagatgtccatgtcctaat

SEQ ID NO: 726155 - DNA, 1683 bp, Homo sapiens
gaattcatgcttacttaaatatgtattctctgctattttgtttcaagataataaatttcatttttttaaaaaaacttaaagcatatgtagacattcttgtacataatgtgatagattttcaccaaaatcagacaccctttagaaaattactgtgaaaagctagacacataacttgaaatgcaagccagtcagttgaagaaactgcccagtctaagatctgagaatgatggagcaatatagaagataagttaataaaaaaaataggctattctgcttgactgaatagaaatggaatgttttaggagaatggaactcttgaacctaatcttgtataagaagacatgggatgtatatagttaattcacttgtttatggagtgatgatttgcttaattatctcatttcctttttacagtaagaaatctaaaagctaaagcccatgtaagtattttatataaggaagagtgttggtgtccacaaaatgtataataactggtgtatattttctgcaagaaaaaaatacacagataacagccactgacattatcatcactaaaaatagacaacaatagcaacagctacatgaattggtgtcatgcttttggcaatatttactaagttcttttataccattcatttctttcctttgattctacttctggaaatctgttccaaggacataatgtatgtccttgcatgtatatcagcctgcatttctacatacagcatatgaagaaaaactctttatacatacagaggcagcacagcctggtggttatgggcatagtctctggagttggagagcctgggcttaaatcctgactccactactgaccaaatgcgtgatgttgagaacttacttaaggcccgtgcttcagcctcctcgtctatgagatgaagataatctttgtaacacacacagtcttcatgaggattaaatgaggtaataagtgtcaatcactttattagtgaatttgataaatgttggctgttactattaatatgtttataatggggaagattaaaaataagaaaaagtaggaagagcaccattgctctgcaataggagactgggtgcatgagctctgatatatacactcaaggatagagtcatgaatttttttttttttttttttttttgaaacaggatctcactcgattgcccaggctgcgaccagtgcagtggtgtgatcttggctcactacaacctccacctcccaggttcaaatgattttcctgcctcagcctcccgagtacctgggattacaggcacgtaccaccatgcctggctaatttttgtatttttagtagagatggggtttcaccatgttggtcaaactggtctcgaactccggacctcaagtgatctgcccgccttggcctcccaaagtgctgggattacaggtgtgagccaccgctcccggcctagcatcattcaatttcaccatattatataygctgtttagcacaggaactaactcatacaagtgtttagtgaagcctggatttcactgtgaaatactcaagatatccattgggttacattttaatataattgaaactgggacatatcttgcagtcaagggtgtgttagagtttaattggaagcgtgtgatgcatctcacatttgatgcactctgtgctcaacagaataatggcctcccaaagatgtccatgtcctaat

SEQ ID NO: 726156 - DNA, 784 bp, Homo sapiens
tactcaaaacaatattccactattttgcagtcatacaggggttcctttgaaccagctttaactagatctttcatactatgcaatttgctgctaataccatcaccawcagatatttcagtgtcttctttttcaccatgtcagaaaataaactgcacagtttgaaaaggcttaaacgtgtgaggggttacggcagtagcagcagcctgaggtctggctagtccctgaggctttctagcttgtcactcagcagctctttgaagaatgcatttgtaactttgagaaggttgtctactttcttccaagaaaacgaagcacattaacagaacttaataacagacttccaattcaaggcaatgcgtgataatatctcaattactgatatcaaatgaagatgccatttctgaaatacgttttatatgaaatttcactggaagtctgaaatgtcctaggatatttattatgaacgtttttccaggaaatattggcagaatccctatttttcaaaggaaatgtaagtgatttaatccaaatcttaaggcacttacaagtcttgcagggcggaataaatcatgcgcatactggactctaatgcaaaacagaaagatgaatgccagagaaaggtaggggtgtatccctgcagatagagtttcagaagagaaagagattatacccagctgccgaggcaggaagatggtctagagaagcttatggggtacacagtatcaaaggccttttggctcctaaattcaagaactaatatgggaagggaggaaatttttttttt

SEQ ID NO: 726157 - DNA, 784 bp, Homo sapiens
tactcaaaacaatattccactattttgcagtcatacaggggttcctttgaaccagctttaactagatctttcatactatgcaatttgctgctaataccatcaccaacagatatttcagtgtcttctttttcaccatgtcagaaaataaactgcacagtttgaaaaggcttaaacgtgtgaggggttacggcagtagcagcagcctgaggtctggctagtccctgaggctttctagcttgtcactcagcagctctttgaagaatgcatttgtaactttgagaaggttgtctactttcttccaagaaaacgaagcacattaacagaacttaataacagayttccaattcaaggcaatgcgtgataatatctcaattactgatatcaaatgaagatgccatttctgaaatacgttttatatgaaatttcactggaagtctgaaatgtcctaggatatttattatgaacgtttttccaggaaatattggcagaatccctatttttcaaaggaaatgtaagtgatttaatccaaatcttaaggcacttacaagtcttgcagggcggaataaatcatgcgcatactggactctaatgcaaaacagaaagatgaatgccagagaaaggtaggggtgtatccctgcagatagagtttcagaagagaaagagattatacccagctgccgaggcaggaagatggtctagagaagcttatggggtacacagtatcaaaggccttttggctcctaaattcaagaactaatatgggaagggaggaaatttttttttt

SEQ ID NO: 726158 - DNA, 784 bp, Homo sapiens
tactcaaaacaatattccactattttgcagtcatacaggggttcctttgaaccagctttaactagatctttcatactatgcaatttgctgctaataccatcaccaacagatatttcagtgtcttctttttcaccatgtcagaaaataaactgcacagtttgaaaaggcttaaacgtgtgaggggttacggcagtagcagcagcctgaggtctggctagtccctgaggctttctagcttgtcactcagcagctctttgaagaatgcatttgtaactttgagaaggttgtctactttcttccaagaaaacgaagcacattaacagaacttaataacagacttccaattcaaggcaatgcgtgataatatctcaattactgatatcaaatgaagatgccatttctgaaatacrttttatatgaaatttcactggaagtctgaaatgtcctaggatatttattatgaacgtttttccaggaaatattggcagaatccctatttttcaaaggaaatgtaagtgatttaatccaaatcttaaggcacttacaagtcttgcagggcggaataaatcatgcgcatactggactctaatgcaaaacagaaagatgaatgccagagaaaggtaggggtgtatccctgcagatagagtttcagaagagaaagagattatacccagctgccgaggcaggaagatggtctagagaagcttatggggtacacagtatcaaaggccttttggctcctaaattcaagaactaatatgggaagggaggaaatttttttttt

SEQ ID NO: 726159 - DNA, 784 bp, Homo sapiens
tactcaaaacaatattccactattttgcagtcatacaggggttcctttgaaccagctttaactagatctttcatactatgcaatttgctgctaataccatcaccaacagatatttcagtgtcttctttttcaccatgtcagaaaataaactgcacagtttgaaaaggcttaaacgtgtgaggggttacggcagtagcagcagcctgaggtctggctagtccctgaggctttctagcttgtcactcagcagctctttgaagaatgcatttgtaactttgagaaggttgtctactttcttccaagaaaacgaagcacattaacagaacttaataacagacttccaattcaaggcaatgcgtgataatatctcaattactgatatcaaatgaagatgccatttctgaaatacgttttatatgaaatttcactggaagtctgaaatgtcctaggatatttattatgaacgtttttccaggaaatattggcagaatccctatttttcaaaggaaatgtaagtgatttaatccaaatcttaaggcacttacaagtcttgcagggcrgaataaatcatgcgcatactggactctaatgcaaaacagaaagatgaatgccagagaaaggtaggggtgtatccctgcagatagagtttcagaagagaaagagattatacccagctgccgaggcaggaagatggtctagagaagcttatggggtacacagtatcaaaggccttttggctcctaaattcaagaactaatatgggaagggaggaaatttttttttt

SEQ ID NO: 726160 - DNA, 648 bp, Homo sapiens
tttttttgagasagagtctcgctctttcacccaggctggagtgcaatggcgtgatctcagctcacttcaacctctgcctcccaagttcccaccattctcccacctcagcctcccaagtagctgggactacaggcacctacgtccatgcctggctaattttgtttttgtatttttagtagagacggggtttcactgtgttagccaggatggtctcgatctcctgaccttatgatccgcctgcctcggcctctcaaagtgctaggattacaggcgtgagccaccgtgcccagcctaaaatggctaagtctttaggagaggaagagtgaatagtcattcctcctttcatctcatattttaaacaatactttccttccttaagttaaaaacaaatcttttcccccttaagttaaagatttagcagctgtcgtggttaggacacagggtgattgatgtgtgagaggagatgagtgggaagactcagggtggggccgactcttttccagactgtgtgcaggtagaaatgccatcagtcatcgcttcctctggacagactaatttttgtctgtctcttcatagatgcccatgaggttactcaaagccccatatcggatttccctgcccaggacctctgtttccaggactcttcag

SEQ ID NO: 726161 - DNA, 648 bp, Homo sapiens
tttttttgagacagagtctcgctctttcacccaggctggagtgcaatggcgtgatctcagctcacttcaacctctgcctcccaagttcccaccattctcccacctcagcctcccaagtagctgggactacaggcacctacstccatgcctggctaattttgtttttgtatttttagtagagacggggtttcactgtgttagccaggatggtctcgatctcctgaccttatgatccgcctgcctcggcctctcaaagtgctaggattacaggcgtgagccaccgtgcccagcctaaaatggctaagtctttaggagaggaagagtgaatagtcattcctcctttcatctcatattttaaacaatactttccttccttaagttaaaaacaaatcttttcccccttaagttaaagatttagcagctgtcgtggttaggacacagggtgattgatgtgtgagaggagatgagtgggaagactcagggtggggccgactcttttccagactgtgtgcaggtagaaatgccatcagtcatcgcttcctctggacagactaatttttgtctgtctcttcatagatgcccatgaggttactcaaagccccatatcggatttccctgcccaggacctctgtttccaggactcttcag

SEQ ID NO: 726162 - DNA, 648 bp, Homo sapiens
tttttttgagacagagtctcgctctttcacccaggctggagtgcaatggcgtgatctcagctcacttcaacctctgcctcccaagttcccaccattctcccacctcagcctcccaagtagctgggactacaggcacctacgwccatgcctggctaattttgtttttgtatttttagtagagacggggtttcactgtgttagccaggatggtctcgatctcctgaccttatgatccgcctgcctcggcctctcaaagtgctaggattacaggcgtgagccaccgtgcccagcctaaaatggctaagtctttaggagaggaagagtgaatagtcattcctcctttcatctcatattttaaacaatactttccttccttaagttaaaaacaaatcttttcccccttaagttaaagatttagcagctgtcgtggttaggacacagggtgattgatgtgtgagaggagatgagtgggaagactcagggtggggccgactcttttccagactgtgtgcaggtagaaatgccatcagtcatcgcttcctctggacagactaatttttgtctgtctcttcatagatgcccatgaggttactcaaagccccatatcggatttccctgcccaggacctctgtttccaggactcttcag

SEQ ID NO: 726163 - DNA, 852 bp, Homo sapiens
ggcctcagtttctttayctgtaatgttggactagattctgtctatggtcctctagagctccaaagtgaagataaaactcctgttccactcagggagtttgtatcttcaaagtgaaagcttcctgggggaaatgaagcttgccttcaccaacgttagaaattagtggttgaaaaatagtatttttcagtgtctgtgagtcttgaagttatgttttcacagggtgacaagaaaacaaattaatgaaaggcagacatcttcatgaatgagagtcagagaaaatatgaacataacatatgacccagcatatagtctgttctccctgaatgaataaaatgtaggagttattccctggtttacaaaccaaaatgttaatcagaagtcccatttgagaagtgaagtgggactttattttattttatttattcatttatttatttaagacagagtctcgctctgtccccaggctgagtgcagtggcgtgatctcggctcactgcaacctccacctcccgggttctaacaattctcctacttcagcctcccaaatagctgggattacaggcgtgccaccatgcccagctaatttttgtatttttagtagagatggggttttgccatcttggccaggctggtcttgaactcctgacctcaggtgatccacctgcctcggcctcccaaagttctgggattacaagtgtgagccactgcatctggctggggctttaaagtatgtaagatatatagagagacgatgaagagggaggtacggagcgagagagagagtgtgtggctggaacttgaagttttttttttatttgaagttatatactttgggaataaacttaggttttca

SEQ ID NO: 726164 - DNA, 852 bp, Homo sapiens
ggcctcagtttctttatctgtaatgttggactagattctgtctatggtcctctagagctccaaagtgaagataaaactcctgttccactcagggagtttgtatcttcaaagtgaaagcttcctgggggaaatgaagcttgccttcaccaacgttagaaattagtggttgaaaaatagtatttttcagtgtctgtgagtcttgaagttatgttttcacagrgtgacaagaaaacaaattaatgaaaggcagacatcttcatgaatgagagtcagagaaaatatgaacataacatatgacccagcatatagtctgttctccctgaatgaataaaatgtaggagttattccctggtttacaaaccaaaatgttaatcagaagtcccatttgagaagtgaagtgggactttattttattttatttattcatttatttatttaagacagagtctcgctctgtccccaggctgagtgcagtggcgtgatctcggctcactgcaacctccacctcccgggttctaacaattctcctacttcagcctcccaaatagctgggattacaggcgtgccaccatgcccagctaatttttgtatttttagtagagatggggttttgccatcttggccaggctggtcttgaactcctgacctcaggtgatccacctgcctcggcctcccaaagttctgggattacaagtgtgagccactgcatctggctggggctttaaagtatgtaagatatatagagagacgatgaagagggaggtacggagcgagagagagagtgtgtggctggaacttgaagttttttttttatttgaagttatatactttgggaataaacttaggttttca

SEQ ID NO: 726165 - DNA, 2599 bp, Homo sapiens
cagtgattattagcttcatactgtcctaccttgcctgcatgtctgcacttgtgacctgctgctctctttcttctgaatggagacaagaaagggaccatcagatgctggggttctgctggtagacagcgagcagagctatagtccctgactatgatggttgcttcactgctttagcttgtctcctgttactcttgctgcagcatggaaggctgcaataatactattcatttctaaatgcttgccagtgaagatggagtgctcaaatcatctaatgggtggatttaagacagcgagaaggagaaggcttgttgccatttccaattttttctggttctttaagatggcatgagagggaaataattaatcttggatagattttagcaaaacgaaacacccatgttcctaatctttggtaaaatactttaccaatttagggccgggtgcggtggctcacgattgtaatcccagcactttgggaggccgaggtgggtagatcacgaggtcaggagatcgaaaccatcctggctaacatagtgaaaccccatctgtactaaaaatacaaaaaattagctgggcatggtggcgtgcacctgcagtcccagctacttgggagactgaggcaggagaatggcatgaacctgggaggcagagcttgcagtgagctgagatcatgccactgcactccagcctggtgacagagtgagactccatatcaaaaaaataaaaaaaaatawaaataaataaataaataaatattgactatgcaagttataggaggttataggagttcatgtgactaagtaaatcaaggggaggagtgtaatcaaggcatctgtccccctgataggtagactttgaatgggtagaggaaataagaatgggcaggcatctaagacaggccaaatgccccaaggcataaatgaacatggtatgtttgtgtggaagaaaagggatgggccaaatagatctgaggtgctgagttgaagtgtgtcaaatgatgcttctgtaaggtgtgataaggtcagattatagaaggctgtgctaacctaatggagagaaaagctcacagataataaaatgagggagtcactaggtctaagcagagataaagaaatacaaactttcacagattataagcaatagaagatattctttaaaaaattaaatgcatacaaatgaaaatatctgcataagaagactagagctatataaggaacacaacgaagttgggaaatattgtgaataatactaccatcatgaagacaactctctatattaagtaagttatttcaaaaaatagggaggaaattcaagagcagtaaaaaacaaaaggaaaaaactctattgtcaagatcacatatgagataatgtaaatagtttaaaaagtgggaaaaattttatctatctaataaccatagacatgcaagttacagtagttcaaagcaccattttatgtctaattactaataaaatctctctgaaaagataagcctttcctggcagtcctgtggagaacgggatgcatcatgtgctacttgtgaccttgtaacctaatgggtgcattcagaaagtaacatacagatgctatataatttataaaaatttcatcttcctttaactaatatctcactaccaggaatttatcctaagacaagttttttttcttttttttgagacagagtctcgctctgtcacccaggctggagtgcagtggcgcaatctccactcaccgcaacctctgcctcctgggttcacacgattctccagcctcagccgcctgagtagctgtgattacaggtgctcgccaccacacccggctaattttttgtgtttttagtagagacggggtttcactgtgttagccagaatgttctcgataaatctcctgaccttgtgacctccgcctcccaaagtgctgggattacaggtgtgagccacagcgcccgggcgttttcgcttgttcaagtgattctcctgcctcagcctcctgagtagctgggattacaggcacccaccaccacgcctggctaattttttgtatttttagtagagacggggtttcaccgtgttagccaggatggtctcgatcacccgacctcatgatctgccggcctcggcctcccaaagtgctgggattacaggcgtgagcccccttgcctggcccatagtatgttttataagtgttctgaaatcaagtaataagagttttttttaatgaaggtgagataagtttctggcaaatgtagaacttgagaattaatgaagtgtatacttctcattttctactctaaccttttgaaattaatacaattttaacatgaaatatttccatgaaattacaagagaactttgatgtttgtttctgcattctgggctcccagaaacatggtgtagcgtggtctgacctgcatatctttggaaatttataataggtttcattgtctgatcttaaccaaaacccaatccttaataaaatagcccagtatatatatggtttttttcctctactaaatgaattacaattctctgctagctaccagcacagggaaaattaaagagaaaacctttctttccttacagtgcatgaattctaccagtg

SEQ ID NO: 726166 - DNA, 919 bp, Homo sapiens
tcccagtcatggtaggcagttcctctcctcagtggatggctgccattatctagaaaatgggcaggtgctatcaatctgggtacaatttaatttaggttaaccaggattacctactacatgatttttgaaggttcattgcaaatratgcagttatccaaggcaaaacactaaatatttctaggcccatttgattccttaaatatttttgcctctcggtagctaatgttcatttctgggattggatttaaatactggtctgaattcaagtttcttattttaattaaaatcacttatttttaaaatatgctttatgggcctggcacggtggctcctgcctgtaatcccagcactttgggaggccgaggcaggcggttcacgaggtcaggagatcgagaccatcttggctaacatggtgaaaccccgtctctaccaaaaatagaaaaattagctgggtgtggtggcgggcacctgtaatcccagctactctggaggctgaggcaggagaatggcgtgaacccgggaagcagagcgcacagtgagccgagatcgcgccactgcactccagcctggacgacagagcgagactctgtctcaaaaaaaaaaaaaaaaaaaaaaaaaaaaaaatatatatatatatatatatatactttatgaaatttgacacataggagataaaaatctatgcaaattttattaaatatcaatttgtaagaaaaatttactatatatttctggtataaatttatatttctcccaaatctcatgcttttggcttgaaaatattttccttaccagcacaaagattagtactctcattgaagaaatagtgagtgagtatattagttcattctctcattgctatcaagaaatacctgagactgggtaatttattttataaatttatttatttatttattta

SEQ ID NO: 726167 - DNA, 919 bp, Homo sapiens
tcccagtcatggtaggcagttcctctcctcagtggatggctgccattatctagaaaatgggcaggtgctatcaatctgggtacaatttaatttaggttaaccaggattacctactacatgatttttgaaggttcattgcaaataatgcagttatccaaggcaaaacactaaatatttctaggcccatttgattccttaaatatttttgcctctcggtagctaatgttcatttctgggattggatttaaatactggtctgaattcaagtttcttattttaattaaaatcacttatttttaaaatatgctttatgggcctggcacggtggctcctgcctgtaatcccagcactttgggaggccgaggcaggcggwtcacgaggtcaggagatcgagaccatcttggctaacatggtgaaaccccgtctctaccaaaaatagaaaaattagctgggtgtggtggcgggcacctgtaatcccagctactctggaggctgaggcaggagaatggcgtgaacccgggaagcagagcgcacagtgagccgagatcgcgccactgcactccagcctggacgacagagcgagactctgtctcaaaaaaaaaaaaaaaaaaaaaaaaaaaaaaatatatatatatatatatatatactttatgaaatttgacacataggagataaaaatctatgcaaattttattaaatatcaatttgtaagaaaaatttactatatatttctggtataaatttatatttctcccaaatctcatgcttttggcttgaaaatattttccttaccagcacaaagattagtactctcattgaagaaatagtgagtgagtatattagttcattctctcattgctatcaagaaatacctgagactgggtaatttattttataaatttatttatttatttattta

SEQ ID NO: 726168 - DNA, 919 bp, Homo sapiens
tcccagtcatggtaggcagttcctctcctcagtggatggctgccattatctagaaaatgggcaggtgctatcaatctgggtacaatttaatttaggttaaccaggattacctactacatgatttttgaaggttcattgcaaataatgcagttatccaaggcaaaacactaaatatttctaggcccatttgattccttaaatatttttgcctctcggtagctaatgttcatttctgggattggatttaaatactggtctgaattcaagtttcttattttaattaaaatcacttatttttaaaatatgctttatgggcctggcacggtggctcctgcctgtaatcccagcactttgggaggccgaggcaggcggttcacgaggtcaggagatcgagaccatcttggctaacatggtgaaaccccgtctctaccaaaaatagaaaaattagctgggtgtggtggcgggyacctgtaatcccagctactctggaggctgaggcaggagaatggcgtgaacccgggaagcagagcgcacagtgagccgagatcgcgccactgcactccagcctggacgacagagcgagactctgtctcaaaaaaaaaaaaaaaaaaaaaaaaaaaaaaatatatatatatatatatatatactttatgaaatttgacacataggagataaaaatctatgcaaattttattaaatatcaatttgtaagaaaaatttactatatatttctggtataaatttatatttctcccaaatctcatgcttttggcttgaaaatattttccttaccagcacaaagattagtactctcattgaagaaatagtgagtgagtatattagttcattctctcattgctatcaagaaatacctgagactgggtaatttattttataaatttatttatttatttattta

SEQ ID NO: 726169 - DNA, 963 bp, Homo sapiens
acctgtaatcccagctacttgcgaggctgaggcaggagaatcgctggaatctgggagttggaggttgcagtgagtcaagatcgccactgcactccagcctggcaacaaagcgagactccgtctcaaaaaaaaaaaaagtacaggktatgagtgatagttaaagtcacgcctgtgaattggtggaaagatgtgaaacagccaactcagggtccgaaacgaaataagacagactcatgtttcctgactttactataacattgcctattgcatcttcaagcacgaaggggaaaatatatattttttatggagatactttgatctttcaaattctggacctgggatgtgaaatggccatggccttagttattttaactggctaactcatagaatcccttttctgtgttccacaaatgtgccacattttgtgctattcatattcctgtatctagtatatcctctttcattaatctattttagtgcagtaatagttatattttcagatctaagaactaattgcttgactttgttaatggataaaacaaactgtaatatattttaaagaggtttattctgaaccaatatgagtgactgaggcctggagaaaacacgcaaccaagaaggcttgagtaagtggttccgaggtggccgggttggtttggttttatacatttcagggaggcaggagttacgggcaaagacatcaacacatggaaggtatacactggttcggttcagaaagggggattatcttcaggagaggtcttataggttgtaggtggacttggggattctctggtttgtgattggttaaaggagtaaggccctgtctacagcttagagttgacagaaaggaaggtaagaatgctctgtcagagtcagccacaataaaatgccctggttagcaagcctgatggcctgcaggcctgacttacacctgccttgcatggccttagggtttgttca

SEQ ID NO: 726170 - DNA, 963 bp, Homo sapiens
acctgtaatcccagctacttgcgaggctgaggcaggagaatcgctggaatctgggagttggaggttgcagtgagtcaagatcgccactgcactccagcctggcaacaaagcgagactccgtctcaaaaaaaaaaaaagtacagggtatgagtgatagttaaagtcacgcctgtgaattkgtggaaagatgtgaaacagccaactcagggtccgaaacgaaataagacagactcatgtttcctgactttactataacattgcctattgcatcttcaagcacgaaggggaaaatatatattttttatggagatactttgatctttcaaattctggacctgggatgtgaaatggccatggccttagttattttaactggctaactcatagaatcccttttctgtgttccacaaatgtgccacattttgtgctattcatattcctgtatctagtatatcctctttcattaatctattttagtgcagtaatagttatattttcagatctaagaactaattgcttgactttgttaatggataaaacaaactgtaatatattttaaagaggtttattctgaaccaatatgagtgactgaggcctggagaaaacacgcaaccaagaaggcttgagtaagtggttccgaggtggccgggttggtttggttttatacatttcagggaggcaggagttacgggcaaagacatcaacacatggaaggtatacactggttcggttcagaaagggggattatcttcaggagaggtcttataggttgtaggtggacttggggattctctggtttgtgattggttaaaggagtaaggccctgtctacagcttagagttgacagaaaggaaggtaagaatgctctgtcagagtcagccacaataaaatgccctggttagcaagcctgatggcctgcaggcctgacttacacctgccttgcatggccttagggtttgttca

SEQ ID NO: 726171 - DNA, 963 bp, Homo sapiens
acctgtaatcccagctacttgcgaggctgaggcaggagaatcgctggaatctgggagttggaggttgcagtgagtcaagatcgccactgcactccagcctggcaacaaagcgagactccgtctcaaaaaaaaaaaaagtacagggtatgagtgatagttaaagtcacgcctgtgaattggtggaaagatgtgaaacagccaactcagggtccgaaacgaaataagacagactcatgtttcctgactttactataacattgcctattgcatyttcaagcacgaaggggaaaatatatattttttatggagatactttgatctttcaaattctggacctgggatgtgaaatggccatggccttagttattttaactggctaactcatagaatcccttttctgtgttccacaaatgtgccacattttgtgctattcatattcctgtatctagtatatcctctttcattaatctattttagtgcagtaatagttatattttcagatctaagaactaattgcttgactttgttaatggataaaacaaactgtaatatattttaaagaggtttattctgaaccaatatgagtgactgaggcctggagaaaacacgcaaccaagaaggcttgagtaagtggttccgaggtggccgggttggtttggttttatacatttcagggaggcaggagttacgggcaaagacatcaacacatggaaggtatacactggttcggttcagaaagggggattatcttcaggagaggtcttataggttgtaggtggacttggggattctctggtttgtgattggttaaaggagtaaggccctgtctacagcttagagttgacagaaaggaaggtaagaatgctctgtcagagtcagccacaataaaatgccctggttagcaagcctgatggcctgcaggcctgacttacacctgccttgcatggccttagggtttgttca

SEQ ID NO: 726172 - DNA, 963 bp, Homo sapiens
acctgtaatcccagctacttgcgaggctgaggcaggagaatcgctggaatctgggagttggaggttgcagtgagtcaagatcgccactgcactccagcctggcaacaaagcgagactccgtctcaaaaaaaaaaaaagtacagggtatgagtgatagttaaagtcacgcctgtgaattggtggaaagatgtgaaacagccaactcagggtccgaaacgaaataagacagactcatgtttcctgactttactataacattgcctattgcatcttcaagcaygaaggggaaaatatatattttttatggagatactttgatctttcaaattctggacctgggatgtgaaatggccatggccttagttattttaactggctaactcatagaatcccttttctgtgttccacaaatgtgccacattttgtgctattcatattcctgtatctagtatatcctctttcattaatctattttagtgcagtaatagttatattttcagatctaagaactaattgcttgactttgttaatggataaaacaaactgtaatatattttaaagaggtttattctgaaccaatatgagtgactgaggcctggagaaaacacgcaaccaagaaggcttgagtaagtggttccgaggtggccgggttggtttggttttatacatttcagggaggcaggagttacgggcaaagacatcaacacatggaaggtatacactggttcggttcagaaagggggattatcttcaggagaggtcttataggttgtaggtggacttggggattctctggtttgtgattggttaaaggagtaaggccctgtctacagcttagagttgacagaaaggaaggtaagaatgctctgtcagagtcagccacaataaaatgccctggttagcaagcctgatggcctgcaggcctgacttacacctgccttgcatggccttagggtttgttca

SEQ ID NO: 726173 - DNA, 963 bp, Homo sapiens
acctgtaatcccagctacttgcgaggctgaggcaggagaatcgctggaatctgggagttggaggttgcagtgagtcaagatcgccactgcactccagcctggcaacaaagcgagactccgtctcaaaaaaaaaaaaagtacagggtatgagtgatagttaaagtcacgcctgtgaattggtggaaagatgtgaaacagccaactcagggtccgaaacgaaataagacagactcatgtttcctgactttactataacattgcctattgcatcttcaagcacgaaggggaaaatatatattttttatggagatactttgatctttcaaattctggacctgggatgtgaaatggccatggccttagttattttaactggctaactcrtagaatcccttttctgtgttccacaaatgtgccacattttgtgctattcatattcctgtatctagtatatcctctttcattaatctattttagtgcagtaatagttatattttcagatctaagaactaattgcttgactttgttaatggataaaacaaactgtaatatattttaaagaggtttattctgaaccaatatgagtgactgaggcctggagaaaacacgcaaccaagaaggcttgagtaagtggttccgaggtggccgggttggtttggttttatacatttcagggaggcaggagttacgggcaaagacatcaacacatggaaggtatacactggttcggttcagaaagggggattatcttcaggagaggtcttataggttgtaggtggacttggggattctctggtttgtgattggttaaaggagtaaggccctgtctacagcttagagttgacagaaaggaaggtaagaatgctctgtcagagtcagccacaataaaatgccctggttagcaagcctgatggcctgcaggcctgacttacacctgccttgcatggccttagggtttgttca

SEQ ID NO: 726174 - DNA, 2738 bp, Homo sapiens
tatttctgtactctgtccaggtgctataatctctgacctggattccttagctcttgcaaaggtattttcattcatggatggttgttcaaattgatttttctgtgaggagatgagtgctgaaaatgcctatttcaccatcttgctgatgtcacactgaaaattcaaattctgtcttatgatgctggtttatggatggctttatagaagcccgtcctgtaaagagagagggaattaacacattccaagcagaggaaatggcaatggatggaagaactcagtgggttcaggaaactgaaataatggatataaatctccaatatatagaatacagagtgacaaagaggccaggacagttaatggtggggatggagtgggtgggtgatcagccataggcaaccttgaatgtcatggtctgtaggtaaaaacaataaatggtctcatatttttaaaatataaaatgtataaaatgatttcaaaagtcaccaggtgatagatgcaattctaaaaaaaatgtggatctttagaaaggttattaaagcgactaaatgagcaagttccagattttaactgattctagaggtttggatataaaatgagatatttcatatttggcttgcttgtactgaacatttactgacagatgtgcttttcttctgaactaattctaccatgtgtgtgctaataaattttatgtaaaaacgtgtccacagtcaattacatctggtaaacgctaatttgaaacaaaagtcttctttgaacccttaacctggtaaacatttaaaatctccaaaaataatgtagaaatgcagcagttactacatttacttgaccattgctaattcttttattgaagcatcttgaaagattagattttaggtcacaatatctgggtatttttggttctaagagataatagagactgtacaacaacaaatgtcactatagggtattacttgttgtggtaaactatttctgttatttatttcctgttgaattaatttagaaaatcatattctgaaagaacgcagtatatactttattttctgtggcagagttggtagattgaataaagcgacttatttgcatgttggttccagcaaatggggttgtcacctggctgtgagagcagcaggagctagctcaggcctggcatagagaaagagggcagggactgatcctccagcaggcaggagccgctgcttgctctggctcactttagtacattttagcagagaaatgcctgcaatccatatggattatagcagacagcacgttaattaggctctacattatggtgatcaattatttttaaaaatatacctcaggccaggctggacgcagtggctcacgcctgtaatcccagcactttgggaggccgaggcggacggatcacgaggtcaggagatcgagactatcctggttaacacggtgaaaccccgtctctaccaaaaatacaaaaaattagccgggcgtggtggcgggagcctgtagtcccagctactccggaggctgaggcaggagaatggcatgaacccaggaggcggagcttgcagtgagccgagatcgtgccactgcactccagcctgggcgacagagcgagactccgtctcaaaacaaacaaacaaacaaaaacctacctcaggccaggtgcagtggctcacgcctgtaatcccaacactttgcgaggacgaggtrgaaggattgtgtgagcccaggagttcaagaccaacctgggcaataaagtgagaccctgtctctacaaaaaattttttaaaaagttagccaggcatggtggtgtatgcctatagttccaactactcgagaggctgaggcagaaggatcgcttgagtccaggtggtcaaggctgcagagaaccatggtcacaccactacactacatgtctcattctgatgttacccaatttgttggcaaaagactgttagacgcttggttttcctgacttcaaggcccatgtacttcatccttcatgcccttgaatctgcccttttgtattaggtttaatttgtcatttgagctgactaagtttcagaaatcttaggcagattttaagtaaactgaataaaaaatagtccattctctcaaatttggattttctttctctagttaaaatggtagcattttcataacagtttagtagagaaaataatttcataaaaagggagttttttaaaaaatcacatctctttatgaatatagtgccatgccaaaggcatgtaccttttctcctaaactagggctttttagggttatatagaaagaatcttcacagtctaaagcattttgagtatgttgtgggccagaatacattaactgataatttactatgcatgaatcaattgactaatgtgtcaatgaaggacagatagcaagcaaacacctgcctactataatttattactcaatataaatgaaacttatcacattctctttttctgattaccagaaaaaaaaatccttttagttcattttggaagaaaattgaaacctacattaaaagcattataatttttggtaaaatatacccttgagcaaatatatgatatgaaaaatgttaattgtaagttggctgtcattcctacctaacgtgtagtttatctcaacacaaagctgagcagccaagcacaaagataatgctaattttttatagccattaatagttaatgctagaaaaactgtcatattttgttttaaaatattccctagaatgtagtatttca

SEQ ID NO: 726175 - DNA, 2738 bp, Homo sapiens
tatttctgtactctgtccaggtgctataatctctgacctggattccttagctcttgcaaaggtattttcattcatggatggttgttcaaattgatttttctgtgaggagatgagtgctgaaaatgcctatttcaccatcttgctgatgtcacactgaaaattcaaattctgtcttatgatgctggtttatggatggctttatagaagcccgtcctgtaaagagagagggaattaacacattccaagcagaggaaatggcaatggatggaagaactcagtgggttcaggaaactgaaataatggatataaatctccaatatatagaatacagagtgacaaagaggccaggacagttaatggtggggatggagtgggtgggtgatcagccataggcaaccttgaatgtcatggtctgtaggtaaaaacaataaatggtctcatatttttaaaatataaaatgtataaaatgatttcaaaagtcaccaggtgatagatgcaattctaaaaaaaatgtggatctttagaaaggttattaaagcgactaaatgagcaagttccagattttaactgattctagaggtttggatataaaatgagatatttcatatttggcttgcttgtactgaacatttactgacagatgtgcttttcttctgaactaattctaccatgtgtgtgctaataaattttatgtaaaaacgtgtccacagtcaattacatctggtaaacgctaatttgaaacaaaagtcttctttgaacccttaacctggtaaacatttaaaatctccaaaaataatgtagaaatgcagcagttactacatttacttgaccattgctaattcttttattgaagcatcttgaaagattagattttaggtcacaatatctgggtatttttggttctaagagataatagagactgtacaacaacaaatgtcactatagggtattacttgttgtggtaaactatttctgttatttatttcctgttgaattaatttagaaaatcatattctgaaagaacgcagtatatactttattttctgtggcagagttggtagattgaataaagcgacttatttgcatgttggttccagcaaatggggttgtcacctggctgtgagagcagcaggagctagctcaggcctggcatagagaaagagggcagggactgatcctccagcaggcaggagccgctgcttgctctggctcactttagtacattttagcagagaaatgcctgcaatccatatggattatagcagacagcacgttaattaggctctacattatggtgatcaattatttttaaaaatatacctcaggccaggctggacgcagtggctcacgcctgtaatcccagcactttgggaggccgaggcggacggatcacgaggtcaggagatcgagactatcctggttaacacggtgaaaccccgtctctaccaaaaatacaaaaaattagccgggcgtggtggcgggagcctgtagtcccagctactccggaggctgaggcaggagaatggcatgaacccaggaggcggagcttgcagtgagccgagatcgtgccactgcactccagcctgggcgacagagcgagactccgtctcaaaacaaacaaacaaacaaaaacctacctcaggccaggtgcagtggctcacgcctgtaatcccaacactttgcgaggacgaggtggaaggattgtgtgagcccaggagttcaagaccaacctgggcaataaagtgagaccctgtctctacaaaaaattttttaaaaagttagccaggcatggtggtgtatgcctatagttccaactactcgagaggctgaggcagaaggatcgcttgagtccaggtggtcaaggctgcagagaaccatggtcacaccactacactacatgtctcattctgatgttacccaatttgttggcaaaagmctgttagacgcttggttttcctgacttcaaggcccatgtacttcatccttcatgcccttgaatctgcccttttgtattaggtttaatttgtcatttgagctgactaagtttcagaaatcttaggcagattttaagtaaactgaataaaaaatagtccattctctcaaatttggattttctttctctagttaaaatggtagcattttcataacagtttagtagagaaaataatttcataaaaagggagttttttaaaaaatcacatctctttatgaatatagtgccatgccaaaggcatgtaccttttctcctaaactagggctttttagggttatatagaaagaatcttcacagtctaaagcattttgagtatgttgtgggccagaatacattaactgataatttactatgcatgaatcaattgactaatgtgtcaatgaaggacagatagcaagcaaacacctgcctactataatttattactcaatataaatgaaacttatcacattctctttttctgattaccagaaaaaaaaatccttttagttcattttggaagaaaattgaaacctacattaaaagcattataatttttggtaaaatatacccttgagcaaatatatgatatgaaaaatgttaattgtaagttggctgtcattcctacctaacgtgtagtttatctcaacacaaagctgagcagccaagcacaaagataatgctaattttttatagccattaatagttaatgctagaaaaactgtcatattttgttttaaaatattccctagaatgtagtatttca

SEQ ID NO: 726176 - DNA, 641 bp, Homo sapiens
gagtaactgatgtgtctaaagaaataataatgtaatgatccacattccagtcactaatatttgaaccctccaaacctcatgttgaaatttgatcccagtgttggaagtggggcctaatgggaggtgtttgggtcatggggtcggatccctcatggatgtcttggtgctggggagtgggggtaatgagtgagttctcgctctgttatctcctgcaagagctggttgttaagaagaacctggcacctcccctctctcttgcctcctctctcaccatgtgatctgtgcacactccaccccaccttcccgcatgagtggaagcagcttgaggccctctccaggtgtacatgtcagtgccacgcttctggtacagcctgcagagccctgagtcaaatacacgtcttttctttataagtttcccagcttcagatattcctttatagcaatgcaaaaatggactgaggcaccgagtgactcagagcacccttttatcagctactctattgattcyatcaggaactaagacctgttatggtcttacatcactgcagtgagccttgccccgtcacttgtgtgtattacctaaacactaaaagctgctaagtgacaactttgtgggcaaatgtaatatcaattccatcaga

SEQ ID NO: 726177 - DNA, 657 bp, Homo sapiens
tgggagcacgtgcctgtaatcccagctactcaggaggctgaggcaggagaatcacttaaacccgggaggtggaggttgcagtgagccgagatcacgccattgtgcaccagcctgggcaacagagggagactcagtctcaaaaaaaaaaaaaagctatgtccacaacatgacctcaactccataaaataacacagtcaaatcctcccctggggagcagctaggtgcyagtgtggttctgaccattggcatgcacccgagagtcagactgagaccacatgactagtttgggccaataggtaatgaatggacgtactgtgtctcgttgaggctaaggcagctaagaaccattggtgcctcttgagccactctggtgactttggtggccacatagtccaggtgccatacccaggaaatggaggagtgtggcccagtctgcatcagactttccatgaatgagaataaacctattcctcacttgaggtactgagagttggggggagttgaggaaaccagcaatgaatatagtcaaaatcacccttaaaaacattcacggctgggagcgctggctcgtgcctataatcccagcactttgggaggccaaggtgggtggatcacctgaggtcaggagttcgagaccagcctggccaacatggtgaa

SEQ ID NO: 726178 - DNA, 1971 bp, Homo sapiens
ctcatctctactaaaaaacaacaaaaattagccaggcatggtggcgtgtgcgtgtaatcccagctacgtgggaggccgaggtgggagaattgcttgaacctgggaggtggaggttacagtgagctgagatcacgccactgcactccagcctgggcgacagagcaagactccatctcaaaaaaaaaaaaaaaaatgttcagtgtaccaaaacaccatacttgggatctcgttctctgtgccccgacagtgctatatgtaggcaatttaccttttctctcttgggatcagaatgttttaaggacttagcctttacatgtggtatgaatagcaatcatttttgttttgtaacttatttttttatccactatcttacgggctatgttggtaaatactgggatgagacaaccagaatactgttggagacggcacatggcaatgtttttagcctggggtcatctgttctattacagacaggtcagccacttgtctcatagaggaaattaaaaaggtctccgatccacttggtttttctctattactgtctcagaggaacatcactaaagaactttggcagcgaaggaaggtaactcgcactattgttttagtgtatcaccagcgctggaatttacgacctgtgcaaaagaacctagaattccacatagctcttggtccctgcccaggcctcttctgcatcagccagcacacttcattttcactgcagatgtgtctgtgggctcaaaggccgggttctggggagggttaggctctgattttgcttggccgtggtttgctgaggaagttctgccttcttcagattctcttccttcagaacagggacttctcttcatcacgcaataagcagggaattgattcactttgcttggggtttttacccattgttatgacttctactcttttcctgagtagaaataattcaatcaggagttcaggaattttctgcccaagccagttcatccctcagtggcaaagcagactcccagaggcactcatttcatcccacacttgccttgaaattaaaagctccaacccctgagctttgtttgtgttttttgktttgcagaattttctctttttgtcatttcattaagcacactgaaaaaatgaggagggaatttttgaggcaggtggtttcagtcattgatgccatctgctcctgtgggcagacctgataagatttgcccacgtcgtcctcattgagtacgtgcccctttttttcagtccttgcagtgaaacatacttcttaaaggaaaaaaaaatgtacctgttattttatcatcacacactttgctaattaattagttgctctttcctccaccccccactgctccacatgcacgtgtgtatgcacatacacaacatgcatgtctaatgactaataaagaggtgaatcatgcacatggtaatctaagggacaaagaactggataacttcagactccaaacagtagctgcaatatatatggtgcttgataagcactcctttctttttctgttaaaatttagctgcctctttttgacccagtaataccacacaaagggcttcttgttaatacaaaagaactaaattttcactgacttcatataaccttccagacttttaccaaaaaggatccataagattttctggctaaaagagaatagtgtaggtgtgctgaatttttttgtgtaaaacatatcagagaccgaaaacccacaccccccaaaatcattgagaagaaacatagatgcttccagagtacggacctcttgtgtgctctagaactccccattgcctgtgagggtgagattagagactctgggccacgagctttaggaaaagggaaaagaggcctactgagtagagcattagtttgttccttttaggttgtattctgaaacaaatttaaaaataggagattcaaacaaaattattactcaagtcttgggcaaagatactggggattatttttta

SEQ ID NO: 726179 - DNA, 1060 bp, Homo sapiens
tgcccactccagcacagctcaccccacgcctctgtctcactccctgcatgatcccaggaggtgccttgcatcgcaccttgatggagccattcatggacaagcctggcctctctcatcttgttagctccttccctccagtctctgtccctcctgtgtgggccagatccaaccttggtacaagaactttcttctctcagggtccagggcttgcttctgtgttgctttcctgagctgtttgttgtagttcaggcttagcagagatcagagatcctgggccaagagcctgtggtacagccctgggcagggcagccactgtgtgagtatccttctcatcctggagctctggtctcagcatgggttgacgaaagctaggagggggctgcaccagagcagaaagaatatggggcctgcatcagaaaagctgagtcctgcatcctcaggaaagtgattaactctttggtctgcatcttmttctggaaaatggggaaaataaaaacatgcaaaatggtgccgaccactgctcagtctaagtaaatgagagtgctgcacaaatgcagacgatggctaggaaagctattataagaggcaggcggttcccatcagtattctccagtggaaggagagggtttattctcatcctttgctcccattaacacacttgtgggtttttttgtggccaaaaagctgttccctgtgcaccagtgttgcttgttgttcactaatttactttgaggtcccttctcaaagcccagttgggatataagtgacccaaactcccatctatctccacatctcttgtattagccctccataaccctgctagggtccccacggggctcaggccagcatgttcctgaggctggggccatctgcggggctgcctactgaggggatattcccctggcctcaggctgctgctgcttttgccatagggctgacctcatgatccactgttgcttatccgttctgactccatgggttgaattgtgacatatgtcttgcatttattgtgatgcccttggtggtaacatgggacgcttcacagtcatcagaggccaca

SEQ ID NO: 726180 - DNA, 609 bp, Homo sapiens
gaacctggaggacaggccatcctggacaccagcatggagtcagctatccatggaattgagatacaaagcatcacacacccaacacttcatctctaattcttgcatgcttttcatttgtggaaccagagtgcagatggatttgaaaagccctggactctggtaaaatgccatttgaaattgttatatggttttccattaggagaagtccaaggaattggtaagacttatggtggacattgtacagrtcattgcataataatttttctttgcaattaattaatcttcatctctgatattcacttcaaatatgtgatgataaaacgggaagggacccttgcttgggcaaaaacaacaacatagcttatcttgaagactgcttatagcaatggtgccagcacaaggtttaatgtgaactgacctggtccttgggccaggattctgggtccttggtgtattcctcagtcctcccgaagggcttctgactacccaggagaactggtaggccctttgcaatctacccagacattctcctggccctctgtatcttgtctctttgtctgcccaccagcgtgagcatcccagcacccatgagcccttccctgaccaccc

SEQ ID NO: 726181 - DNA, 784 bp, Homo sapiens
gaagtttcagattttggagtattttcagatgaggaatgctcaacctgtatgaattaaggactgagatgcacagacccaggaattaactgaaaaagggtagtaatagaatagaataacagttaattatttaatcgacaaatattctgtgaatacctttcctatgggaaccacaaagctaacttcagaaggaaataaaacaaagtttctgctctccaatagctttcagactggccaaaaggaagggtattcatgtatgtccaggtccgaacatacagtgtgaaaagcacctttggggaacaggaacacacacaggcagggttgggaaagatagcacagtaagaaagggacatgctggaaatgaaaatattacagaatgagatgaaaaacccaaatatcatgatttcaacaaagcaatggaactaaaaaccagagtgcaggtggcaattattttaccaacagcagacctggtaaatgggactgtggagctcaggaggtccctacaaatctgaacacaacacagacaagtctttaactctctcagagtatttaatgtttcaaaaatgtaaacctggattrttgcaaaccaagccgaggtcaatgaaggtaggggaatggggaggggctgtgggtaaatgatgaaagaggccaaagaaaccaagaatattttgacacattctatttcagaagcatttgctcactgtatccaaattaattgggtattttgatggaaaaaataaaccactccatgaaaatgaaccataaagtaaaaagtagttttaaggca

SEQ ID NO: 726182 - DNA, 610 bp, Homo sapiens
tactaacacatatattgcactcaaaaatgttatataatataaactattatgtacacacttgtatgtttacaaaccttcacatttaccatcaggatgagaattaggcttttgatttctaggccggtatctattgaaagtgtttattttcctgatattatttagttttaaatgtatacttctgatccttttgttcttatatcttgatagagctatgaacatcttatccttgcatttcattttgtgaagcttgttcatatgtgtttgcattcactagatgagttatggctccactatatgtttaataaacagatctctatatgggtcaaatggatggaaggttcatgtatgcggtgaggaatgcaagataattttcacctttcatgacagctctgattgttagtgcttgaatkgggtgtcatattcaaaatgatcttcaagccatatctaagtccagcaaaaaaattgccagcttagttcgccatgtctgccacatgtagaaagagggattcattgcatgaatttctcaaacgttggactaggaaacttcccccttttatcttcttgttagcatcgttcgttagatttatagtgagaagtaacctcttattct

SEQ ID NO: 726183 - DNA, 1307 bp, Homo sapiens
tgaaaagtgccctattcaagaccgacagtaggtaaattatataatacacaacctgatgattatacatactgacaaaatggaattgattcgtttaccttagcactgatgatgtctcatgacaaaatgattgatatcaataaagcccaccatatgcatgcacctcaccacaatctatagcagatgctgaacaaactgcctcacttatgtttctctactctggaagaatcttccatcttatatttacagactgtgaggcgacccactggcagggaacatgaggctgctctgcagggcccagtggagaagccaggtgagcagttctccacacctggaggagtcctgccagatctctcccctgtcttctgccaaaaggcactgtcagctcgccacatgctctcttcaaacttctggcactcagattccccacattgaactcactttctttctgaacttatatccaagtttttttttttttcccttatgttatcaagcctcagaggaacaaagcaaaaacaggaaagtggagaaaaaccatggtagaatgtgccagaaggataaagagaagtaggagaagtttatcaaatggctgccatttgctggtgatttttaaaaaatcatctttttattaaaagacattacaattgcctaatacaaatacagacaatggaaatagagcaagatcaaagtactctttctcctttcttaaaggaaaagactacccactggtagcactcagccttttcattttttctagttacttctcaactcccccaacccaataaaaatagtcaaatatagctgacattaccttgcttttgattcttaaaatttaaaagttcatttctcacaagatttattgacttatactatgttctatattttccaagtatactcagaatattcttagggctagagccagcctatttgctatcaatttgatatttccagctttgcagaactctcgtctgtatctgtatgttttgaaatcacctggagatcctaaagctctctctctacctttcttgcatggtgaggtcacttaactcacttatatcaagataaaattaagcttttaatacttaaaaatgtgcttctcagactgtggcttatgctgacgtataatggctatgggtaaacatattcttggactatcattctagctcaaagattttgaggtaaagtacgcttataataaaacacaggcctctatgttataaagtacaaaatacatatggattttttaaagaaagcacaaaacaytaaagaaatttccacctgcccctggctgctttgggctatcctcacaa

SEQ ID NO: 726184 - DNA, 889 bp, Homo sapiens
tgacagaaaaggggaagctgtgtttctgttttctgcatttctccacttccatccacagtgaatgaccacagacactaccaggtgtgagagtgagcggaggctttggacagytgtggccattgcagaggcagtgtgctggggacctcagggcttgggcaccaggacgctgctctgctcctaacagccgtgtgaccttggacaagccagagagtccttctgcatcttgacttgctcatctgtgaaatggagataatagggctacctgtgagtgtatttggtagcatgctatctaccatacacggcacgtacccagcctccatctgacctctctaaatccacttttaccctgcaatcatctgttctctctagagcagccagagtgggcctttgcacatggaaatcagatgattttgccctcatgtttatatcccctcagtggtcagaagacaattcaagccccttcctccagcctgtcctgcatgatccggccccagccttctcccagccccttcctgctcctctgtgcacctcgcttgctgcactccggatgctcagggctctctcctgcttctcaagcagaccaacttgtgccaggcctcagggcttttgctcatgctgatccggcttcctgggatgcctcccctgggccctgggaatggctgctttcttctcatccctcaggtgtcagctcaaacgtcatctcctctctgagaccgccttgaccagcacattacaccaggttcttacgctatgtgcatatcttcagaacgcttcacattttggaatgacttcttgatctgtgggtgggggggcggggggatggtttgcttatgtatttgtctatcttcccgttgttattattattattattatcatcatcattatttga

SEQ ID NO: 726185 - DNA, 889 bp, Homo sapiens
tgacagaaaaggggaagctgtgtttctgttttctgcatttctccacttccatccacagtgaatgaccacagacactaccaggtgtgagagtgagcggaggctttggacagttgtggccattgcagaggcagtgtgctggggacctcagggcttgggcaccaggacgctgctctgctcctaacagccgtgtgaccttggacaagccagagagtccttctgcatcttgacttgctcatctgtgaaatggagataatagggctacctgtgagtgtatttggtagcatgctatctaccatacacggcacgtacccagcctccatctgacctctctaaatccacttttaccctgcaatcatctgttctctctagagcagccagagtgggcctttgcacatggaaatcagatgattttgccctcatgtttatatcccctcagtggtcagaagacaattcaagccccttcctccagcctgtcctgcatgatccggccccagccttctcccagccccttcctgctcctctgtgcacctcgcttgctgcactccggatgctcagggctctctcctgcttctcaagcagaccaacttgtgccaggcctcagggcttttgctcatgctgatccggcttcctrggatgcctcccctgggccctgggaatggctgctttcttctcatccctcaggtgtcagctcaaacgtcatctcctctctgagaccgccttgaccagcacattacaccaggttcttacgctatgtgcatatcttcagaacgcttcacattttggaatgacttcttgatctgtgggtgggggggcggggggatggtttgcttatgtatttgtctatcttcccgttgttattattattattattatcatcatcattatttga

SEQ ID NO: 726186 - DNA, 642 bp, Homo sapiens
ctattgtgaattaggaggcaacttgctttttcaattaatgaatttgatttttttcatatttgtatcttcagaattcagcacaagtctgacacatattggaactcaaaaatatttttcaatgagttaatcagtgaaaaaacatataaacaatgcggcatattaaatgtgttaattttatatctaaaaatatgacccatataaatcaatgtttcatgaargtaaagtatccctttaagaactgaaacttttgaaggggttccataactcactttttctttttatgagacaaggtctcactctgtcacccaggctggagtgcagtgatgcaatctcagctcactgccacctctgcttccccgatttaggcgcccctccaacctcagcctcccaagtagctgggactacaggcacatgacaccacgtccagctaactttttgtatttttttctagagacagggttttgccatgttgcccaggctagtctcaaactcctgggctcaagtgattcacccgcctcggcctcccaaagtactgggactaaaggggtgagccaccacaccctgccaatttaataactcttaatgaattttttctggaaaaagaccgttagataaaatatgtatgctagtggacaaggttta

SEQ ID NO: 726187 - DNA, 642 bp, Homo sapiens
ctattgtgaattaggaggcaacttgctttttcaattaatgaatttgatttttttcatatttgtatcttcagaattcagcacaagtctgacacatattggaactcaaaaatatttttcaatgagttaatcagtgaaaaaacatataaacaatgcggcatattaaatgtgttaattttatatctaaaaatatgacccatataaatcaatgtttcatgaaggtaaagtatccctttaagaactgaaacttttgaaggggttccataactcactttttctttttatgagacaaggtctcactctgtcacccaggctggagtgcagtgatgcaatctcagctcactgccacctctgcttccccsatttaggcgcccctccaacctcagcctcccaagtagctgggactacaggcacatgacaccacgtccagctaactttttgtatttttttctagagacagggttttgccatgttgcccaggctagtctcaaactcctgggctcaagtgattcacccgcctcggcctcccaaagtactgggactaaaggggtgagccaccacaccctgccaatttaataactcttaatgaattttttctggaaaaagaccgttagataaaatatgtatgctagtggacaaggttta

SEQ ID NO: 726188 - DNA, 429 bp, Homo sapiens
  misc_feature 329, 330, 331, 332, 333, 334, 335, 336, 337, 338, 339, 340,341, 342, 343, 344, 345, 346, 347, 348, 349, 350, 351, 352,353, 354, 355, 356, 357, 358, 359, 360, 361, 362, 363, 364,365, 366, 367, 368, 369, 370, 371, 372, 373, 374, 375: n = A,T,C or G
  misc_feature 376, 377, 378, 379, 380, 381, 382, 383, 384, 385, 386, 387,388, 389, 390, 391, 392, 393, 394, 395, 396, 397, 398, 399,400, 401, 402, 403, 404, 405, 406, 407, 408, 409, 410, 411,412, 413, 414, 415, 416, 417, 418, 419, 420, 421, 422: n = A,T,C or G
  misc_feature 423, 424, 425, 426, 427, 428: n = A,T,C or G
agagaaatatttagcagaagggaaaagggagtcatgtggaatgttaagagggtgtgacgttacctggaaatccatagactgaaacagactcacaagaaagagtatttgggggaagaaaaaagagagagaaacaggaattcgacctgtggggatatgcttcttataaaaaatcctacagcgaacattattwagagaggcacaaatctcaagactgaacaacagaccacaaaagaacccaagtttctttaaataagcagacttctagacccatacttgcagatctgttggaggaaaaacagatgttggcaaaattatgaaaaataaaaaannnnnnnnnnnnnnnnnnnnnnnnnnnnnnnnnnnnnnnnnnnnnnnnnnnnnnnnnnnnnnnnnnnnnnnnnnnnnnnnnnnnnnnnnnnnnnnnnnnnt

SEQ ID NO: 726189 - DNA, 596 bp, Homo sapiens
tgagtagaagtcctccatatttctttgaagaaaaagagattcatacacttagaaccctttagatttggatgaaaagccagactcgatcaacatttccattcctctgtattctcattctgacacacattcttgcccgttcatgcaattgaacagagtcagaaacttctgctctctgagccaggcaaaacagtcttcaactcaaaatatttgcaaatgcttccttccaattaatgatagatcagcctttttgacttcgatattcctataatgtatgcaaatgacatgtttctattatcttcaggaatcctcctgtgatcttaaagtgtgcctccaaaatactgactactgatacatagggctaccattacagaccatatcgaaaagccaattttttttggatcaagatttgtgaagaatctgagattttatcctatttgcaaggtaacaagttacattgccwctgtttcatgggtgctgacaaaggacatagggatcctggttcagagataaaggctttattactcagagaaagagcattagccagagtgtcagcacattgtcagttctgtgagctccagttcccacaggcagatgca

SEQ ID NO: 726190 - DNA, 1828 bp, Homo sapiens
tttttttttgtttttttgttttttttttgagacggagtcttgctctgtcacccaggctggagtgcaacggcgccatcttggctccctgcaagctccacctgacgggttcacgggttcacgccattctcctgcctcagcctcccgagtagctgggactacatgagcctgccactatgcctggctaattttttttgtatttttagtagaaacggggtttcaccgtgttagccaggatggtctcgatttcctgacctcgtgatccgcccgcctcggcctcccaaagtgctgggattacaggcgtgagccaccgggcctggccattactgcttttgtaaaacaaaattaactctaaaactgcttagtggtatgaccttaaccaaattccttgggatatctaaactcagttttcttatctgtgaaagggaaataatacttgggacaatgttggtcccagacttgatgctaaagaaataaatattagttatattttaaaaattgacatttgggggaaatttttggtatgtatacatatatgtaccttatggttgtattgcacttgaaaattttcaaagcattctcataaatgctacactggattttgaaaagatatttaaaatacatttcagaaatcaatactactcatatgttataagcgcaagacactgataagattatttatattatgagggttataaaataaccatagcacaagacagtggtgaaatgccttacatttgtattgaatattcactttcttttttttttttttttttttcagtcagagtctcgctctgttgcccggacttgagggcagtggcttgatctctgctcactgcaagctccgcttcctgggttcacaccattctcatgcctaagcctcccgagtagctgggactacaggcacccaccaccacacctggctaattttttgtatttttagtacagacggggtttcaccgtgttagccaggatggtctcgatctcctgacctcgtgatccacctgcctcccaaagtgctgggattacaggcgtgagccaccgtgcctggctgaatgcactttcattttctctgaatttccaccctcattccagcccatgcagaacaaatacacattctcatcctcagatgctttcattgtccttaatatgcatttccattattgttataatctcataaacaatgtttacttttcatgctagaccatgtgatccttgaaatcatccattscattttttccttctcttatccctggagatcatcttgacattgggcacataacaggtgatggagtgaattaattgtatgtctccttaagcccacccatgttgacatgaacatcattaactatattatgtaatatcagtgttagcaaacttgttattgatgagaaaatgcgtgttcaaatgaatgaccaagagacagcaggcacaaggagcaggagaaggtgctgggtcttgtggctcatcgtactgactctatgagcatcatttaccatgctggaaagaaccatcatgggaactgaggtgagtcagaaaagccctcctatattctgaaggaggaaggtctgagcttggtgtgggtggtacttcactgccttggtgatattgaatttctactagggatggaaggtgttgagggccacaatggctcaaagtccttcatttttgcatggagtagtggtggttagttttacagcatttagattagcaaattctggaatttcagcaaagtgagaattcctttgggagtgaaattctctgccttcttacaagattgctatgttacaagggatcatgtatgcaaacatagttttaaaattatttagag

SEQ ID NO: 726191 - DNA, 1409 bp, Homo sapiens
ttcaactttttttttttttttgagatgaagtctgtcattctgttgccaaggctggagtgcagtggtgcgatcttggcttactgcaacctttatctcccaggttcaagcaattcktgtgcctcagcttcctgaatagctggaattacaggcacatagcaccatgcctagctaacttttgtacttttagtagagacaaggtttcactatgtgggccaggccggtctcaaactcctaacctcaagtgatccacttgcctcagcttccgaaagtgctgggattacaggagtgagccacgttacctggcctatatgcctcaatttcttacctctaaactggtggtaataatgttacgaatcttctgtgcctgctcataggacaagttatttacacacacgcacacacacacacataaattttcacctggcatgggtagggtgcataagcactaaagatgagtcactcataggattctaagaatttgctcaatatagctaacatttatcaataggaaggatcgcagtattctaggctgtcacagaagacaagcagggtttgaatccaggcttccaatgggatactattatcaaaaatgaaacatgttgtaagtaaattgacaggtaagtgagagatcaactatacaataaatgtaatgaatttagaacaaaatgcaatgagattacatatatgaaaaggaagaagtcatcaaaatatttttagcaatcaagaatgagaaagtagaaatggtaattttttattagacaatattttttagcacacactctaaggaacttctgttttgacaaagaatatctgaaagttgttgatgctgaatgaagtttgaaaaatagtatctgtgaaaattttaccataatgttatctccttcctgtactaaactatggcattgaaatagaagagcattgagtgtttcttacgtgtctaaaacagcactaaaaaaacaagtggggtaaaagaagcagaaacatagtctatattctccaagttctaatattattattaaatagtctcttttggaggtgcaggtgtcagatttagtgaagaaaaatataccataatttgtattttagataaactaagaattgatttggtataagtatattctaaatattgtataagatatacttacacttaaaaaatgccaattactcattgcttgttgcttatttaacattcacatttaacaagccattctgtatttatttattttgtcccagcaatgctatttaagggattttgttttatttaatgtaactttagctgctgtaacagacaaaccctataatatcaatagcccaacacaataaagctttcttttgcatgcataaatcatacgaatgttcatgtttgggtaggtctccactcaggagaagaaacaaagacctcttctaca

SEQ ID NO: 726192 - DNA, 1409 bp, Homo sapiens
ttcaactttttttttttttttgagatgaagtctgtcattctgttgccaaggctggagtgcagtggtgcgatcttggcttactgcaacctttatctcccaggttcaagcaattcgtgtgcctcagcttcctgaatagctggaattacaggcacatascaccatgcctagctaacttttgtacttttagtagagacaaggtttcactatgtgggccaggccggtctcaaactcctaacctcaagtgatccacttgcctcagcttccgaaagtgctgggattacaggagtgagccacgttacctggcctatatgcctcaatttcttacctctaaactggtggtaataatgttacgaatcttctgtgcctgctcataggacaagttatttacacacacgcacacacacacacataaattttcacctggcatgggtagggtgcataagcactaaagatgagtcactcataggattctaagaatttgctcaatatagctaacatttatcaataggaaggatcgcagtattctaggctgtcacagaagacaagcagggtttgaatccaggcttccaatgggatactattatcaaaaatgaaacatgttgtaagtaaattgacaggtaagtgagagatcaactatacaataaatgtaatgaatttagaacaaaatgcaatgagattacatatatgaaaaggaagaagtcatcaaaatatttttagcaatcaagaatgagaaagtagaaatggtaattttttattagacaatattttttagcacacactctaaggaacttctgttttgacaaagaatatctgaaagttgttgatgctgaatgaagtttgaaaaatagtatctgtgaaaattttaccataatgttatctccttcctgtactaaactatggcattgaaatagaagagcattgagtgtttcttacgtgtctaaaacagcactaaaaaaacaagtggggtaaaagaagcagaaacatagtctatattctccaagttctaatattattattaaatagtctcttttggaggtgcaggtgtcagatttagtgaagaaaaatataccataatttgtattttagataaactaagaattgatttggtataagtatattctaaatattgtataagatatacttacacttaaaaaatgccaattactcattgcttgttgcttatttaacattcacatttaacaagccattctgtatttatttattttgtcccagcaatgctatttaagggattttgttttatttaatgtaactttagctgctgtaacagacaaaccctataatatcaatagcccaacacaataaagctttcttttgcatgcataaatcatacgaatgttcatgtttgggtaggtctccactcaggagaagaaacaaagacctcttctaca

SEQ ID NO: 726193 - DNA, 1409 bp, Homo sapiens
ttcaactttttttttttttttgagatgaagtctgtcattctgttgccaaggctggagtgcagtggtgcgatcttggcttactgcaacctttatctcccaggttcaagcaattcgtgtgcctcagcttcctgaatagctggaattacaggcacatagcaccatgcctagctaacttttgtacttttagtagagacaaggtttcactatgtgggccaggccggtctcaaactcctaacctcaagtgatccrcttgcctcagcttccgaaagtgctgggattacaggagtgagccacgttacctggcctatatgcctcaatttcttacctctaaactggtggtaataatgttacgaatcttctgtgcctgctcataggacaagttatttacacacacgcacacacacacacataaattttcacctggcatgggtagggtgcataagcactaaagatgagtcactcataggattctaagaatttgctcaatatagctaacatttatcaataggaaggatcgcagtattctaggctgtcacagaagacaagcagggtttgaatccaggcttccaatgggatactattatcaaaaatgaaacatgttgtaagtaaattgacaggtaagtgagagatcaactatacaataaatgtaatgaatttagaacaaaatgcaatgagattacatatatgaaaaggaagaagtcatcaaaatatttttagcaatcaagaatgagaaagtagaaatggtaattttttattagacaatattttttagcacacactctaaggaacttctgttttgacaaagaatatctgaaagttgttgatgctgaatgaagtttgaaaaatagtatctgtgaaaattttaccataatgttatctccttcctgtactaaactatggcattgaaatagaagagcattgagtgtttcttacgtgtctaaaacagcactaaaaaaacaagtggggtaaaagaagcagaaacatagtctatattctccaagttctaatattattattaaatagtctcttttggaggtgcaggtgtcagatttagtgaagaaaaatataccataatttgtattttagataaactaagaattgatttggtataagtatattctaaatattgtataagatatacttacacttaaaaaatgccaattactcattgcttgttgcttatttaacattcacatttaacaagccattctgtatttatttattttgtcccagcaatgctatttaagggattttgttttatttaatgtaactttagctgctgtaacagacaaaccctataatatcaatagcccaacacaataaagctttcttttgcatgcataaatcatacgaatgttcatgtttgggtaggtctccactcaggagaagaaacaaagacctcttctaca

SEQ ID NO: 726194 - DNA, 1409 bp, Homo sapiens
ttcaactttttttttttttttgagatgaagtctgtcattctgttgccaaggctggagtgcagtggtgcgatcttggcttactgcaacctttatctcccaggttcaagcaattcgtgtgcctcagcttcctgaatagctggaattacaggcacatagcaccatgcctagctaacttttgtacttttagtagagacaaggtttcactatgtgggccaggccggtctcaaactcctaacctcaagtgatccacttgcctcagcttccgaaagtgctgggattacaggagtgagccacgttacctggcctatatgcctcaatttcttacctctaaactggtggtaataatgttacgaatcttctgtgcctgctcataggacaagttatttacacacacgcacacacacacacataaattttcacctggcatgggtagggtgcataagcactaaagatgagtcactcataggattctaagaatttgctcaatatagctaacatttatcaataggaaggatcgcagtattctaggctgtcacagaagacaagcagggtttgaatccaggcttccaatgggatactattatcaaaaatgaaacatgwtgtaagtaaattgacaggtaagtgagagatcaactatacaataaatgtaatgaatttagaacaaaatgcaatgagattacatatatgaaaaggaagaagtcatcaaaatatttttagcaatcaagaatgagaaagtagaaatggtaattttttattagacaatattttttagcacacactctaaggaacttctgttttgacaaagaatatctgaaagttgttgatgctgaatgaagtttgaaaaatagtatctgtgaaaattttaccataatgttatctccttcctgtactaaactatggcattgaaatagaagagcattgagtgtttcttacgtgtctaaaacagcactaaaaaaacaagtggggtaaaagaagcagaaacatagtctatattctccaagttctaatattattattaaatagtctcttttggaggtgcaggtgtcagatttagtgaagaaaaatataccataatttgtattttagataaactaagaattgatttggtataagtatattctaaatattgtataagatatacttacacttaaaaaatgccaattactcattgcttgttgcttatttaacattcacatttaacaagccattctgtatttatttattttgtcccagcaatgctatttaagggattttgttttatttaatgtaactttagctgctgtaacagacaaaccctataatatcaatagcccaacacaataaagctttcttttgcatgcataaatcatacgaatgttcatgtttgggtaggtctccactcaggagaagaaacaaagacctcttctaca

SEQ ID NO: 726195 - DNA, 1409 bp, Homo sapiens
ttcaactttttttttttttttgagatgaagtctgtcattctgttgccaaggctggagtgcagtggtgcgatcttggcttactgcaacctttatctcccaggttcaagcaattcgtgtgcctcagcttcctgaatagctggaattacaggcacatagcaccatgcctagctaacttttgtacttttagtagagacaaggtttcactatgtgggccaggccggtctcaaactcctaacctcaagtgatccacttgcctcagcttccgaaagtgctgggattacaggagtgagccacgttacctggcctatatgcctcaatttcttacctctaaactggtggtaataatgttacgaatcttctgtgcctgctcataggacaagttatttacacacacgcacacacacacacataaattttcacctggcatgggtagggtgcataagcactaaagatgagtcactcataggattctaagaatttgctcaatatagctaacatttatcaataggaaggatcgcagtattctaggctgtcacagaagacaagcagggtttgaatccaggcttccaatgggatactattatcaaaaatgaaacatgttgtaagtaaattgacaggtaagtgagagatcaactatacaataaatgtaatgaatttagaacaaaatgcaatgagattacatatatgaaaaggaagaagtcatcaaaatatttttagcaatcaagaatgagaaagtagaaatggtaattttttattagacaatattttttagcacacactctaaggaacttctgttttgacaaagaatatctgaaagttgttgatgctgaatgaagtttgaaaaatagtatctgtgaaaattttaccataatgttatctccttcctgtactaaactatggcattgaaatagaagagcattgagtgtttcttacgtgtctaaaacagcactaaaaaaacaagtggggtaaaagaagcagaaacatagtctatattctccaagttctaatattattattaaatagtctcttttggaggtgcaggtgtcagatttagtgaagaaaaatataccataatttgtattttagataaactaagaattgatttggtataagtatattctaaatattgtataagatatacttacacttaaaaaatgccaattactcattgcttgttgcttatttaamattcacatttaacaagccattctgtatttatttattttgtcccagcaatgctatttaagggattttgttttatttaatgtaactttagctgctgtaacagacaaaccctataatatcaatagcccaacacaataaagctttcttttgcatgcataaatcatacgaatgttcatgtttgggtaggtctccactcaggagaagaaacaaagacctcttctaca

SEQ ID NO: 726196 - DNA, 1409 bp, Homo sapiens
ttcaactttttttttttttttgagatgaagtctgtcattctgttgccaaggctggagtgcagtggtgcgatcttggcttactgcaacctttatctcccaggttcaagcaattcgtgtgcctcagcttcctgaatagctggaattacaggcacatagcaccatgcctagctaacttttgtacttttagtagagacaaggtttcactatgtgggccaggccggtctcaaactcctaacctcaagtgatccacttgcctcagcttccgaaagtgctgggattacaggagtgagccacgttacctggcctatatgcctcaatttcttacctctaaactggtggtaataatgttacgaatcttctgtgcctgctcataggacaagttatttacacacacgcacacacacacacataaattttcacctggcatgggtagggtgcataagcactaaagatgagtcactcataggattctaagaatttgctcaatatagctaacatttatcaataggaaggatcgcagtattctaggctgtcacagaagacaagcagggtttgaatccaggcttccaatgggatactattatcaaaaatgaaacatgttgtaagtaaattgacaggtaagtgagagatcaactatacaataaatgtaatgaatttagaacaaaatgcaatgagattacatatatgaaaaggaagaagtcatcaaaatatttttagcaatcaagaatgagaaagtagaaatggtaattttttattagacaatattttttagcacacactctaaggaacttctgttttgacaaagaatatctgaaagttgttgatgctgaatgaagtttgaaaaatagtatctgtgaaaattttaccataatgttatctccttcctgtactaaactatggcattgaaatagaagagcattgagtgtttcttacgtgtctaaaacagcactaaaaaaacaagtggggtaaaagaagcagaaacatagtctatattctccaagttctaatattattattaaatagtctcttttggaggtgcaggtgtcagatttagtgaagaaaaatataccataatttgtattttagataaactaagaattgatttggtataagtatattctaaatattgtataagatatacttacacttaaaaaatgccaattactcattgcttgttgcttatttaacattcacatttaacaagccattctgtatttatttattttgtcccagcaatgctatttaagggattttgttttatttaatgtaactttagctgctgtaacagacaaaccctataatatcaatagcccaacacaataaagctttcttttgyatgcataaatcatacgaatgttcatgtttgggtaggtctccactcaggagaagaaacaaagacctcttctaca

SEQ ID NO: 726197 - DNA, 533 bp, Homo sapiens
tgaataaattctcactgacttgaatagagcacaytccactctcaaatttcaatcttcagttccttgagaacactgctgaggttaaagtgcaataaaatccattcactttccctggcctagacaactatttctcactttttcctctgccctcaaacccccaacgaatccttcccattcctcactatcagctgaagatcttgctttcaactacactaagaaaactgccagcctgggcaacatggtgaaaccccatctgtataaaacaatacaaaaattcactgggggccaggcatggtggctcatgcctgtaatcccagcactctgggaggccaaggcaggtggatcacttgaggtcaggagtttgagaccagcctggccaacatggtgaaaccccatctctactaaaaatacagaaagtagctgggcatggtggcacgtgcctgtaatcccagctactcgggaggctgaagcaggagaactgctttaacccaggaggcagaggttgcagtgagccaagagcacaccattgcact

SEQ ID NO: 726198 - DNA, 554 bp, Homo sapiens
agtgggttactgtgagaaatcaataagagttaatataatccttcccattgccccaaaaaatccaatttacattgctcattgcacttcatattcaagactgcacgttaccactatcttgtagaaggaaaatgttaaagttcaggtgtcaaatggcattccagtgagtctctacaatagataccaacttcctgatacgttactctctttttctggaacatcactaagttgactatttctattcttcaatcacagaactttatatatatgtaatcaacactattttttatatttcttcaaaaaataaatttaaaataagaacactatacattaataactggaacatcagggatttataggcttcttgaagataaacccatgaagcagaggaaaaagtttacaatctccctataacacccatattgcttccaattattttttgttcaaagattgagttcaaagttttaagaaattatcatattaatcctgccagttrtaaaatacattatttctcacctcctatagtctaatataaagggatataagagaagagataa

SEQ ID NO: 726199 - DNA, 900 bp, Homo sapiens
tccccctttttcctagtctacctttcaaagctagctctaggtcactgaaagttcagcatgtaaccatagctytgaaatacactgtttatgatttcacattaaaaccataaatgtatattttattatatgggaggaaacatctgagtgaatggtgaatgaaacacatgcaagcaacctccttaatctgacttaggtaatgctcacaggcaggcaacaaactctattgtattttatttatttagtaccacgcagtggaccaaggaacctgagagtctttggtgaaacaaccaatagcctctcggtagcctgggatcatgctgatgggccagttcagcagtacaggatcatctattctcccactgttggtgatccaattgatgaatatgtaagtctgatactcatttattggcacattttatcatcttagctgaatggacagtgaagttaaacttctttagaggtatgctgtgagtacggttgagtccttgatagtcacactttaggattttctctgacatgacgttgggaccacccaaatgtgcttacttagtctttctggcctcccataccacagagaagcaatgtctttgggctcatttttattctaaagacagatagaaaaactatcttatcacatgattaactgagcatttctaaccacctaatgacaccacaggaaccaagtttagtgaaatgtgatacctatcattctggaatgtctaagttaatattcaaataatgtatttatccaaatcttaccctttcctcaaatctaattcctctacaaggtctcccttaaatattccagtgttaattgatctctcttttctttaaacttaacattttgcggtacactttagttttggaatataaatactctcctattagcttcaaactttt

SEQ ID NO: 726200 - DNA, 1491 bp, Homo sapiens
aataattagcattataaagtgctaattatctttggacacagaggacctgcacaccagagacagaggtccgcattaagtaaagtgaatttcactttcttcagttgtgagatttctcttttttcttctttgtaatgatgcaaagatatatcttccaccaagcctcatttaaaagctttttccagttaaggaaactatctcttggccatccacagccagactgcatattgagattatggatattcaaagaaattgtctttcctttgtatattgtcataactttttgtgaaatgtttgttttatagttccaggccagcacctagaacctggctagaataaaaaactgcagaaatcatgagtttcttgtttggatgaaagagcacacctattaacaaatgatagacggctatcctactgtgagtcctgaaaactggtgrtgtgattgttgaatgggttaggggtatagcagagaaactcagtgtgggctacatacaatttcagcttgaatcacacttaacagatcctctgttccaaccatttaaatttacaaagaagaaactaaggcacagaactacttgagaagagaagcagaattgaaaactagagctcctgattgttctcaaaataatttttatcatactgcatcgggttctaagtgagagggcttcttatttagtaatgccaaggtcatgtgttaacatgtaaaaaaattagacgaggaatggggcattggtgtaagattatacagagtgtaaagttgggctttctcttatcatctgttgtcaacaacaggatgattgttactgttacccactccttaccatcattcacacagagacattggatattgaggagagactttaaaacagaatattagtaatgcagagctataaagagccacgatcatattaatacaatcctccatacacatagtgacctgtctgcagctccagcctagagaaacccagttattcatttgtagtgggcagccccattatcagaaagcgctattcaattggaagtgctcatctgtgttaggtcaaaaacgacttcctctaaatatccattctgtgtattgaagtataaatgagtcccacttaagaaaaacaaaacaaaccaacttccaatgatttaaaaatactaacgtgaccctcttacgtttacctaaagctagtgtttctcaaacatcagctgtatcagaatccctgaaggacttgttaaaacaaattgctggtctctactctgagcttctgattcattaaatgtgggatggtacctgagaatctgcatttctaacacgttcccaggtgaccctgatgctgttgctctgagaaccactttgagatccacatctctaagctcatcagtctgtccgttacaccttacaagacatactttcctaatctgacacccttctatttgtctttttttggaatgctttagaaatttagcagttatcttttttatgtattttacatttgttacagctttcct

SEQ ID NO: 726201 - DNA, 658 bp, Homo sapiens
tagggaaactggaccggctcctcataaaacttcccgccttctatctccgggaggatcgcagggcatttccgccaagacaggtgagactgcggttctgacctgcgggcctccgtgcatatgcgctagggcacctgggggccggcagagccgttcccctacgcaaagtaagcgtgttatgtctacaacccaacggggacactgagagccccaaaggccctgctttcttcccagagaacagcgcccatctgtgtagtttctacctggctctatgaggtgagaacacactccccgctagcacagaaatcctacaaactcctgtgggggctgcgcttggaagcagaggctgtgtaagaggtgacttggggggtagggaaaaacacgaagattttcacacagggtgagaacccaagagactggagaccacggaccaatccctgcaaaaagcagccagggtagaaagggaagagctgagcggacttcaccatagctaatttgkgttacaaagccgacacggctgatgctcgctttttctcctatggcgtgcaggccacatgttacttcctattccccaaccgtctactgtaggattaacacctaagacgccaaccaagacacaaaccaatacaagaaaagatatgacccttggcgtacagtctgt

SEQ ID NO: 726202 - DNA, 959 bp, Homo sapiens
tttttccatggaagggggtggtggatgttttccagatgaaactgttccacctcaggtcatcaggcatcagttacagtctcataaggagtgcgcaatctggaccackcacatgagctgtatcaccacgcagctctcactccagcctcagatatcagcaagacctcaccaaagattactgtttaattgtctctgtgtgtgtttttgtttgtttcaggtaacaactaatgttggaactatgaaaagctcttctctacttttaacaaagcttagtcacaaacagttccccagttgataagaaaaactaaaacaacagaacaattgaaagtccgaatctgcaagttcatctctgagaaccgaattttacagccactccagatttgtactccaaatggatagtttgattgtagaaatcacatcccttcagtctgccaatgtgataactgcccaagagaaagtgatgcctacattcatagataatcccctttcccccatcctatatataactggagtcaacagcagctggaggaaaatggcaagaacttggaatcaagattaggttagaataacactgctgtagacagtttatcagctcttcagcatatgtccattttccttgaaggatgagcctttagaaacctctgacaataaagtttattttgcatccattcccttgcctatgattttttcatacaaatcacaattataaaactttcttgctccagctaaaagcaggaaactcaatcatgaatgtgttcactaaatatataccacagaatgatagcaaccagtctgaatgcatcacttgattccaaaattaaatgttagccctcaggggtgcaactacatgtatctccaactctggaagccacaggcaacatattcctgtttccttgcagggaaagagatctataagcagggcggcagtctcacacgtgtacattcctgggaaacccaaggaa

SEQ ID NO: 726203 - DNA, 959 bp, Homo sapiens
tttttccatggaagggggtggtggatgttttccagatgaaactgttccacctcaggtcatcaggcatcagttacagtctcataaggagtgcgcaatctggaccactcacatgagctgtatcaccackcagctctcactccagcctcagatatcagcaagacctcaccaaagattactgtttaattgtctctgtgtgtgtttttgtttgtttcaggtaacaactaatgttggaactatgaaaagctcttctctacttttaacaaagcttagtcacaaacagttccccagttgataagaaaaactaaaacaacagaacaattgaaagtccgaatctgcaagttcatctctgagaaccgaattttacagccactccagatttgtactccaaatggatagtttgattgtagaaatcacatcccttcagtctgccaatgtgataactgcccaagagaaagtgatgcctacattcatagataatcccctttcccccatcctatatataactggagtcaacagcagctggaggaaaatggcaagaacttggaatcaagattaggttagaataacactgctgtagacagtttatcagctcttcagcatatgtccattttccttgaaggatgagcctttagaaacctctgacaataaagtttattttgcatccattcccttgcctatgattttttcatacaaatcacaattataaaactttcttgctccagctaaaagcaggaaactcaatcatgaatgtgttcactaaatatataccacagaatgatagcaaccagtctgaatgcatcacttgattccaaaattaaatgttagccctcaggggtgcaactacatgtatctccaactctggaagccacaggcaacatattcctgtttccttgcagggaaagagatctataagcagggcggcagtctcacacgtgtacattcctgggaaacccaaggaa

SEQ ID NO: 726204 - DNA, 959 bp, Homo sapiens
tttttccatggaagggggtggtggatgttttccagatgaaactgttccacctcaggtcatcaggcatcagttacagtctcataaggagtgcgcaatctggaccactcacatgagctgtatcaccacgcagctctcactccagcctcagrtatcagcaagacctcaccaaagattactgtttaattgtctctgtgtgtgtttttgtttgtttcaggtaacaactaatgttggaactatgaaaagctcttctctacttttaacaaagcttagtcacaaacagttccccagttgataagaaaaactaaaacaacagaacaattgaaagtccgaatctgcaagttcatctctgagaaccgaattttacagccactccagatttgtactccaaatggatagtttgattgtagaaatcacatcccttcagtctgccaatgtgataactgcccaagagaaagtgatgcctacattcatagataatcccctttcccccatcctatatataactggagtcaacagcagctggaggaaaatggcaagaacttggaatcaagattaggttagaataacactgctgtagacagtttatcagctcttcagcatatgtccattttccttgaaggatgagcctttagaaacctctgacaataaagtttattttgcatccattcccttgcctatgattttttcatacaaatcacaattataaaactttcttgctccagctaaaagcaggaaactcaatcatgaatgtgttcactaaatatataccacagaatgatagcaaccagtctgaatgcatcacttgattccaaaattaaatgttagccctcaggggtgcaactacatgtatctccaactctggaagccacaggcaacatattcctgtttccttgcagggaaagagatctataagcagggcggcagtctcacacgtgtacattcctgggaaacccaaggaa

SEQ ID NO: 726205 - DNA, 959 bp, Homo sapiens
tttttccatggaagggggtggtggatgttttccagatgaaactgttccacctcaggtcatcaggcatcagttacagtctcataaggagtgcgcaatctggaccactcacatgagctgtatcaccacgcagctctcactccagcctcagatatcagcaagacctcaccaaagattactgtttaattgtctctgtgtgtgtttttgtttgtttcaggtaacaactaatgttggaaytatgaaaagctcttctctacttttaacaaagcttagtcacaaacagttccccagttgataagaaaaactaaaacaacagaacaattgaaagtccgaatctgcaagttcatctctgagaaccgaattttacagccactccagatttgtactccaaatggatagtttgattgtagaaatcacatcccttcagtctgccaatgtgataactgcccaagagaaagtgatgcctacattcatagataatcccctttcccccatcctatatataactggagtcaacagcagctggaggaaaatggcaagaacttggaatcaagattaggttagaataacactgctgtagacagtttatcagctcttcagcatatgtccattttccttgaaggatgagcctttagaaacctctgacaataaagtttattttgcatccattcccttgcctatgattttttcatacaaatcacaattataaaactttcttgctccagctaaaagcaggaaactcaatcatgaatgtgttcactaaatatataccacagaatgatagcaaccagtctgaatgcatcacttgattccaaaattaaatgttagccctcaggggtgcaactacatgtatctccaactctggaagccacaggcaacatattcctgtttccttgcagggaaagagatctataagcagggcggcagtctcacacgtgtacattcctgggaaacccaaggaa

SEQ ID NO: 726206 - DNA, 655 bp, Homo sapiens
gtttcttctctgccagctgggggcgcaatttctcattcatttctagaatgttcatctctgccttctcgctggacaaagggccggctgataccaccatgctgacatttgtggcagaagaggtggggccagggactggggagaagaaaggcaaacacatgatgggttaaaaactggtgaaatcaaataggcttaatcaggactgagggatgtcactggcagccttgtctacttatttgaagatgatgtttccctggtttcactcttgtcatctccagtcttgatctcctttaagtcaacttgtcttagctatgcagtcaccttgaaaccaagacataaacacttctacacttttcttgcttataagtttctataaagcaaggcttggccctgagatttttaccccatgagtggccaatgtttctgtgtagcacaaaaggtttcattttgcttttttaatttttttcttttttggttttttgttttttgtttgagacggagtctcactctgtcacgcaggctgcagtgcagaggcacaatctcagctcactgccacctctgcctcccrggttcaagcgattctcatccctcagcctgccaaacatctgggattacaagcgccaagtaacatgccagctaatttttgtatttttagtag

SEQ ID NO: 726207 - DNA, 2289 bp, Homo sapiens
tttagaacctttttaaaaaatattttgtttttgttgtcttgcaaatcagccagatctgcaacttaccagagtaaagcgaagccaagcgggacccttaggaaatgcactaagatgtcatccactttcagtgtcagcctgtgaaaatacaggcgatagaagagaatgaagagaacctgagggaatttttggaaccaaagctaatattaagcaggcctcttgctggcagaccagtggaaactgtagcctggtcaacgatctctctagattgaggaggtctaaagtgtagccacaggttcaactacttttctgtttgtttcccaacctcgattaaactcactaaatttagggacaaaaaaacaaaacaaaacacgatgttcccacgcagtctcgaaccagagacctttcatatgtgaagcgaccataataaccactacaccacagaaactgcatatgcaccaaaaaaggcaaaatatcatcatgaaaatcttaggtcagccatttctattatcgtttccaaagtaagaaattcaactgcatttcgaaattcgactgaaaaaagcccaataagcaccagccatcaagaagactatggctcccaataggcccaggcttagcgttccgcgcccacccccacacgaaaaccatggggacccacacacgggcttcggggacacatactcgggcttcgggctcccgcatcctcccctgggtatgcagttccagaactaagcgccgtgtgcgggatcctcccggctgacactcttcggctcccagaagctgcaggagccggcgggctttgagcgtccgagccctgggcgccccgtgcctctcaggagggtggacgccgcccttccagggatgcggaccccgcctcggggccttttccccggcgccggccgtcggggctcttggctcttctcgtcctcccaggaaccgtagaaccctccttgccctccctcccgtaggccgaggggcgtgagctgcacctgtttcctcacggaccctttggcctcagcgcctcgacgtcttgcaattcttagctcacggctcttcctcctataacaaggccgttccatctcatgtcccctactccctcttagcaccagagagatgtctcccctgccccacaggtcacattccatgagtggtgaagtttctagagttgtaaccatggcatctccagccctgtgtgttcctctccatgctccccattgagcagtcttgatcctgtattagccccaggaaatgaaatagaaacaggaccctacgttaaaaagttgcagtggagatgtggtggccaccaggggctggaactgtggggtgactgagagtatccaaagccctgtggccaacttactggtgctgagtgtgctggtgagcctctctgtcagctggcttccctgggccagttgctcccggaagctctgtcccaggtagtagtcaatgtcattgctccttaggagatcctcaaaagattttactgtatcttttgcatgctgggtgagaagataacaaacacctctcccttctcgtattttttgccgtaggtaagacagttcccggggctgatcctgaatcagggaatcatatttcctaatgcaggacagaagaggaaagggtggatgataagttatggggcttctgtagagatttctatgagaacatctctaaggaactcccccaaactgaattctggcacrtaagccataggaggtatttaagagtaaattctaccctgataaagtattgcactgaaaaatttagtatgggccgggcgtggtggctcacgcctgtaatcccagcactttgggaggctgaggcaggcagatcacaaggtcaggagtttgagaccagcctggccaatatggtgaaaccccctcctctactaaaaacacacaaaaaaactagctgggcatggtggcacatgcctgtaatcccagctacttgggaggctgaggcaggagaattgcttgaacctgggagggagaggttgcagtgagccgagatggcaccactgcactccagcctgggtgacagagtgagactctgtatcaaaacaaaacaaaacaaaaaatttaccatgccactgttcttcaactgttctatatatgttaattatatgtccctagataaatcgtaaggtctgtgagaatgaagatagttctgcgtttcacatcccttacagcaccagcatcacagagattcacagcagatactcaatgaataattagactcatctcatcctaagtctagataggacctttcatgtcttctgttttaaccaccacc

SEQ ID NO: 726208 - DNA, 569 bp, Homo sapiens
taaatgcaagctggttacattggttataatcacrtcaccacccccacccctgccttttccaatattagtacaacaaagacttcttgctcaattacttaagtgtaaaacttatgtttaggttaatttattcatttattcatttagcacatatttattgagcactgaatatgtaccagattctgtgcaaaacactagggatacggtaatgaacatgatagacaatgaagtaagaggaggcctggaagaagcaggtgacaaataatatgaaccagaaaatttcacatagtgattaataccaggagaaataaaacaaagtgatgtgcgagcaaatgattttgaggttactttagattgtctggaaaggtggcatttgtgtcgggaaacaagtgatgaagagtaatttgcatgccaagaactggaacataacacttcaggccttaaggtagaaatgaggtggtagcttggcacattcacatacaaaaggaagaggtgtaatgtgtaaggaagagacagttagggagaagccaggcctttttggtcataaaaaggaatatagagtttaagtgcaa

SEQ ID NO: 726209 - DNA, 569 bp, Homo sapiens
taaatgcaagctggttacattggttataatcacgtyaccacccccacccctgccttttccaatattagtacaacaaagacttcttgctcaattacttaagtgtaaaacttatgtttaggttaatttattcatttattcatttagcacatatttattgagcactgaatatgtaccagattctgtgcaaaacactagggatacggtaatgaacatgatagacaatgaagtaagaggaggcctggaagaagcaggtgacaaataatatgaaccagaaaatttcacatagtgattaataccaggagaaataaaacaaagtgatgtgcgagcaaatgattttgaggttactttagattgtctggaaaggtggcatttgtgtcgggaaacaagtgatgaagagtaatttgcatgccaagaactggaacataacacttcaggccttaaggtagaaatgaggtggtagcttggcacattcacatacaaaaggaagaggtgtaatgtgtaaggaagagacagttagggagaagccaggcctttttggtcataaaaaggaatatagagtttaagtgcaa

SEQ ID NO: 726210 - DNA, 966 bp, Homo sapiens
gcagcgttttgtagttttctttgtagagaccttttacttccttggttagaggtgaaaccaaggggtgtgtgtgtgtgtgtgtgtactgtaaattaggctatgttcttcatttggctctcagcttgaatattattggtgtaaagatatggtactgatttttgtacattgattttgtatcctgacactttactgaagtcatttttcagttccaaaagtctttggcagtctttagggattcctaggagagatagtttgacttcttcttttcctatttggatgccttttctttctttctcttgcctgattgctctggcttgcacttccggtactgtgttcaacaggagtgggaagagtgggcatccttgtcttgttccagttctcaagggggatgcttcctaaaatgtcaatttgaaagcctgatttttgtctttgactttgaacactgaaagacaatccagagaactagcaaatttacatttaaaaacctgccttttaagtttttaaaaactatgaatttaaaattgcttcttttaaaattgggttttaaatttttgattctacaagaaaattttcattcaacaagcacttaggacctgttctgagtttcttcagagcctttcttaaaagataaagcacatattgaaggtagagttattaagaatgagaaggtggagaaaaaataaaaataaataaataaacaatgcagctctcatccaaaatcctaatggcccaaaaaagctacaaaaaaagatgcctgagaggccacccctcctttcatattaaaaagctatagtgatttgtagagtcagagcttaacaaatcaccctattcttcatcctttccttcactaagttgtcagacagatgcagaatagaaatcagcaatgtgaaaytgtggtttctcaactgaatgaggaatttttcaccatgactttaatgttcctctgtcatgggccctaatgggaaa

SEQ ID NO: 726211 - DNA, 1557 bp, Homo sapiens
ccctcttgttgtaagcctcacatggccggagagagagtgctgtaatcttttcatcctcttgtaagaatcccatcatgaggactctaccctcatgaccttatgtaaacctaacgcctccacaaggccctacctcctaatcccatcacattggaaatcagggcttcaacatataaatttggtgaggggacacaaacatctagacatagcacccccctcatctttcttcagtctatctatactatattgcccctatcatattgtmcctaccaacaacctaatgcttgtctgtccatatttttctccatgcccatttaattacatgttaatacaacacatgtctccatctacatgtatgcatatacatagatgcagcctttagagttgctttaccgaatggaagcatgcttttctccattttattttttctgactccacaataccttgtagaaatcccgtcaaattgaatgatttatctctaattcaaattctaaaagttacattccattccatggtataagtatatctacgctatttaaccatccccttcttgacatttactttgcttgcagtttccactatggacactgctgcaatcaacattcttgttcatgtattcttgtagacgttgcttttatctctgttggatagattctcagtgttgtgtggcaataatgaaacaaacagtgatggattttgatttttacctcacttcttctttcggtgtttgactggaggtgctgcctgggaaagactagttggccaatcatcaggaagtctcatggtgtggcattttccagagtcaagaatctcaacctcctcaacctcagtgttatgggcacagaaaatggactttttccatatatcccaggatgatgtgcctttttgtgacagattctcagtaacggaattcacgtggcatcttgatccatggctaatggtgcccgcttatgatgccagttcttttttttttttttttgagacggaatcttgctcttgtcacccaggctggagtacagtggtgcaatcttggcttactgcaacctccgcctcccaggttcaagtcgttctcctgcctcagcctcctaagtagctcagattacaggcgcctgccacgatgcctggctaattttcatatttttagtagagacaggggtttcaccgtgatggccaggctgttctcgaactcctgacctcaggtgatctgcctgcctcggcctccccaagtactggaattgcaggtatgagccaccgtgcttggcctttttgtttttgttttttctttttagatataataatattcctgggttaaactataatcagtataagggaatttaaggcattgttttctccaatttattcacttagttaacaaatatttattgatatatcaggcattgttctagacactagggttaaatccatgagtaaaaaatatagaaattaacatcttcgtgagggacatggcagtgactaatattaggttggtacaaaagtaattgtggttttttgccattgaaagtaatggtgaaaaccacaattactgttgcaacaacctaa

SEQ ID NO: 726212 - DNA, 1557 bp, Homo sapiens
ccctcttgttgtaagcctcacatggccggagagagagtgctgtaatcttttcatcctcttgtaagaatcccatcatgaggactctaccctcatgaccttatgtaaacctaacgcctccacaaggccctacctcctaatcccatcacattggaaatcagggcttcaacatataaatttggtgaggggacacaaacatctagacatagcacccccctcatctttcttcagtctatctatactatattgcccctatcatattgtacctaccaacaacctaatgcttgtctgtccatatttttctccatgcccatttaattacatgttaatacaacacatgtctccatctacatgtatgcatatacatagatgcagcctttagagttgctttaccsaatggaagcatgcttttctccattttattttttctgactccacaataccttgtagaaatcccgtcaaattgaatgatttatctctaattcaaattctaaaagttacattccattccatggtataagtatatctacgctatttaaccatccccttcttgacatttactttgcttgcagtttccactatggacactgctgcaatcaacattcttgttcatgtattcttgtagacgttgcttttatctctgttggatagattctcagtgttgtgtggcaataatgaaacaaacagtgatggattttgatttttacctcacttcttctttcggtgtttgactggaggtgctgcctgggaaagactagttggccaatcatcaggaagtctcatggtgtggcattttccagagtcaagaatctcaacctcctcaacctcagtgttatgggcacagaaaatggactttttccatatatcccaggatgatgtgcctttttgtgacagattctcagtaacggaattcacgtggcatcttgatccatggctaatggtgcccgcttatgatgccagttcttttttttttttttttgagacggaatcttgctcttgtcacccaggctggagtacagtggtgcaatcttggcttactgcaacctccgcctcccaggttcaagtcgttctcctgcctcagcctcctaagtagctcagattacaggcgcctgccacgatgcctggctaattttcatatttttagtagagacaggggtttcaccgtgatggccaggctgttctcgaactcctgacctcaggtgatctgcctgcctcggcctccccaagtactggaattgcaggtatgagccaccgtgcttggcctttttgtttttgttttttctttttagatataataatattcctgggttaaactataatcagtataagggaatttaaggcattgttttctccaatttattcacttagttaacaaatatttattgatatatcaggcattgttctagacactagggttaaatccatgagtaaaaaatatagaaattaacatcttcgtgagggacatggcagtgactaatattaggttggtacaaaagtaattgtggttttttgccattgaaagtaatggtgaaaaccacaattactgttgcaacaacctaa

SEQ ID NO: 726213 - DNA, 1557 bp, Homo sapiens
ccctcttgttgtaagcctcacatggccggagagagagtgctgtaatcttttcatcctcttgtaagaatcccatcatgaggactctaccctcatgaccttatgtaaacctaacgcctccacaaggccctacctcctaatcccatcacattggaaatcagggcttcaacatataaatttggtgaggggacacaaacatctagacatagcacccccctcatctttcttcagtctatctatactatattgcccctatcatattgtacctaccaacaacctaatgcttgtctgtccatatttttctccatgcccatttaattacatgttaatacaacacatgtctccatctacatgtatgcatatacatagatgcagcctttagagttgctttaccgaatggaagcatgcttytctccattttattttttctgactccacaataccttgtagaaatcccgtcaaattgaatgatttatctctaattcaaattctaaaagttacattccattccatggtataagtatatctacgctatttaaccatccccttcttgacatttactttgcttgcagtttccactatggacactgctgcaatcaacattcttgttcatgtattcttgtagacgttgcttttatctctgttggatagattctcagtgttgtgtggcaataatgaaacaaacagtgatggattttgatttttacctcacttcttctttcggtgtttgactggaggtgctgcctgggaaagactagttggccaatcatcaggaagtctcatggtgtggcattttccagagtcaagaatctcaacctcctcaacctcagtgttatgggcacagaaaatggactttttccatatatcccaggatgatgtgcctttttgtgacagattctcagtaacggaattcacgtggcatcttgatccatggctaatggtgcccgcttatgatgccagttcttttttttttttttttgagacggaatcttgctcttgtcacccaggctggagtacagtggtgcaatcttggcttactgcaacctccgcctcccaggttcaagtcgttctcctgcctcagcctcctaagtagctcagattacaggcgcctgccacgatgcctggctaattttcatatttttagtagagacaggggtttcaccgtgatggccaggctgttctcgaactcctgacctcaggtgatctgcctgcctcggcctccccaagtactggaattgcaggtatgagccaccgtgcttggcctttttgtttttgttttttctttttagatataataatattcctgggttaaactataatcagtataagggaatttaaggcattgttttctccaatttattcacttagttaacaaatatttattgatatatcaggcattgttctagacactagggttaaatccatgagtaaaaaatatagaaattaacatcttcgtgagggacatggcagtgactaatattaggttggtacaaaagtaattgtggttttttgccattgaaagtaatggtgaaaaccacaattactgttgcaacaacctaa

SEQ ID NO: 726214 - DNA, 644 bp, Homo sapiens
cttacgacttctagtctcctatgtgcctgctattccctgaaaaagtcattttcgtaggcttgccctacaacaaaggagcaggagcaaaggacacagtccctttcrcagaaatccaatcctacacagatagcatgtactacaagtacctgtccgggtaaatttacaagccaagagtcaacaatagaagaaaaaggcacaggccctccagtcttcccattatctgctggaaagggctgttacttgcgcatgcctctccactgttcgtgaagtacagatgtgcttcctagaagggaaggtcctgcttcccttttggtgagttgagtaagaactcaatcccatcagttgtgaggaaggaatttatcaatttgggtgccaggaagtctcaattttgatgccatctattgacaacagttgtctgggaatgtacctgggcacgttgggacccatggaaagtcaggctgggcacaacccctcctgatgaacaaagcagaggatctccaagttccagctagctgactatccaggcaacccagttgatttctagaaccatttggggatgattctctttgtcactctatagctttgaatctccagagtgtcacacagaatatgccacacagcagacactcagtaatgttggctgg

SEQ ID NO: 726215 - DNA, 599 bp, Homo sapiens
aaaacgcattctaaaatataatctcaacttcaggaataaaggtcaattaccttgataataattcaatggcaacttctgtcttctatggccaaacagtttctyagataattacaattgtgattcagaattctttccattttatatgaatttttaagaaaattacttataaatacctgaatatctactaatgaaaaactctttgttcttgcattggcctgagctcagtgatcacatttggcacaaaaataaaacaatgttactttttttcaatctcgatattctttgtaccttaaagaattttattcacatgtcacaaacaagattcatttataaaagatataattttaaatgtttgctcaatctttagaagttcattatagaaatattcttgaaatcaccaaatctgatcagcattctagctttctgtaactctgctgtaagtcaataaataaagcaaatgtgtctatattatttcataggacaaagaagtctaagcttattaatagacttataaatgatattgtattatgtactatgctaccagcataggaagtgggattacttggtataattaaaatttggaaaatcaataactattg

SEQ ID NO: 726216 - DNA, 1065 bp, Homo sapiens
catatacaccatggaatactatgcagccacaaaaaatgatgagttcatgtcctttgtagggacatgtatgaagctggaaaccatcattctcagcaaggtgtcccaaggacaaaaaaaacaaacaccgcatgttctcactcataggtgggaattgaacaatgagaacataaggacacaggaaggggaacatcacacactggggcctgttgtggggtggggggaggggggagggatagcattaggagatatacttaatgttaaatgacgagttaatgggtgcagcacaccaacatggcacatgtatacatatgtaactaacctgtacgttgtgcacatgtaccctaaaacttaaagtataattaaaaaaaatgcctttacatcatcatggcttttggaaatgtacctttaaattaagataattatttcagtgtaagcaaaattatgtttgcaattgttgggagatagtactatttatgttaatttatgtctatagatagagatatgaagggaaactcagagctttatgcttatctttaaaagaacatttttttaaatgtgataaatgtaaatgattatcagttaaggtactttatttagatttccaaacagctttctatttttaagccaaatctttcacatagaaggctattaataaaacagttaacaatgaaaaaattaaatcttgtctgagattaaagatgtgtgacaaagtggaaaataaagcgtaagaataaaaagataattctcaaagcaacaggaagttaatgatgttccctggagtcccgaaccagagacttgtatcttcaatatgcatgttaatctcaatagatgatagtgaataacaagcaactgaaatatgctctcagtacataattacaatatttaattttccaaataraaattgagcaatcgtggagaattgtaaaaagatatagtaaatgagtgattgaagaacacaaaggcagatgaaatgtaatgtaaagtacaatgtattacaaacctaaagaaataatttaaattacttgtacatcctgagggattctgtaacctctcaagatattattt

SEQ ID NO: 726217 - DNA, 625 bp, Homo sapiens
tcattcactatcacaagaacagcatgggaaagacctgcccccatgattcaattacctcccaccgagtccctcccacaacatgtgggaattcaagatgagatttgggcrggacacagccaaaccatatcagatatgatcgtgttcttttttatggctggatagtattccacggtgtatatgtaccagattttctttatccagtctatcatatttcttgttttgaatttgtttgtgtgttaaatttaaatcttgtaaatcttataagaaacttcaacaaatttaacaagaaaaagaaaaaaaaaaccacaaaacgtagacaaaggacctgaagagacacctgccaaaagaaaacatacatgcagccaataatcttatgaaaaagtcctcaaaatcacttgttattagaaaattacaaatcaaaaccacaatgagatactatctcataccagtcagaatggctacaattaaaaagtcaaaaaataacagatgtataaactgaggaaactggtacaaatttaagttaaaaagatatataagtacatgtaataatatagatgcagacatagcaggatataaaatgattgaaatatctgccagtcactgatatgaaacatgctggaatgtt

SEQ ID NO: 726218 - DNA, 1067 bp, Homo sapiens
ggggaagcctcaggaaacttaaaatcatggtagaaggcaaaggggaagcaaggcacatcttccatggcagcaggacagagagtgagggaggaactaccaaacacttttaaaccatcaggtcttgtgagaactcactcactataatgagaagagcatgagggaaaatgcccccatgatcaaatcacctcccaccacgccctttcctggacacatggggattaaaactcaaaawgagatttgggaggggacacaaagccaaactttatcaggtacattcaaacaactgagaagttcgatttggaaacccacaggcctccctttttctgttctatacggccttgttttttgtgatgtgttccaagaatcatcagtatcacctgggagcttgttagaactgcagaagcttagtccccattccagacatatttaatcaattattttaccaagaccaccaacaaagtgactcatatgctccttaaaatataataaacacttctataatatgttagctttctactgtcttatattcacttaagactgttggccccttatccacccagggagggcaggttccatgccagcttacttatttgtcttaaatgcttagggtagtctaactcacagtatgcagtttgtaatttaaatgaattaattgatgaattattgaagtagagagtgagtgagttccaggtttttataaagttgatacactaatattcaatttgttctgttaagaaatgtataaattacccacctaaatgtcaaaatgccaccatagcatcataactagactaagaggctagatttgactactccaagacccactgaatagttttctgtacaggatttggtgaaatgaggccatcttcagtttttccctacactactcataataaaatatgcctatgaacacctgccagtaaacataactactttatgctttaagaacttcagtaggatactgatatataagcaaaattcccctggacatgatgatagtgtctaagcacttttccctataatatctccagttttatatagttctcttgtactaaattggcaatgta

SEQ ID NO: 726219 - DNA, 688 bp, Homo sapiens
ggctggagtgcagtggccgtctcagctcactgcagcttctgcctcccatgctcaaggaatcttccaacctcagcttcctgagtagctaggaccacagctaggacacacgccacacaccctgctaatttttttctttgttttttttttgtagagatggagtttcgccatgtagcccaggctggtctcaaactcctgagctcaagggatctggccgcgttggcctcccaaagggctgggattataggcgtgagccactgcgcccagcagcaacttgctttttttcttttgttaaagataatgttctcttataagcattttatgttgctgcatggtcttcatagttgtaggtaattcgaccacacctggtataatcacattcacagatgtcatttttaacaccagcattatataygtatatgtataaatatacagatatagataggtaggtaggtagatagatacggataaataatagccactcactatttgtaaactaaagattcagcaatctcatctatgacaaaagagatgagtcaaaaaccaagaaacaaactctaaaggtctttgagtagtcaacttatatgacacaaagctcatttatcttaagcacagtgcttctcaatacttactgagaatctatgaatgttaattgacatataaatccaacacatttggttattagtattga

SEQ ID NO: 726220 - DNA, 688 bp, Homo sapiens
ggctggagtgcagtggccgtctcagctcactgcagcttctgcctcccatgctcaaggaatcttccaacctcagcttcctgagtagctaggaccacagctaggacacacgccacacaccctgctaatttttttctttgttttttttttgtagagatggagtttcgccatgtagcccaggctggtctcaaactcctgagctcaagggatctggccgcgttggcctcccaaagggctgggattataggcgtgagccactgcgcccagcagcaacttgctttttttcttttgttaaagataatgttctcttataagcattttatgttgctgcatggtcttcatagttgtaggtaattcgaccacacctggtataatcacattcacagatgtcatttttaacaccagcattatatatgtatatgtataaatatacagatatagataggtaggtaggtagatagatacggataaataatagccactcactatttgtaaactaaagattcagcaatctcwtctatgacaaaagagatgagtcaaaaaccaagaaacaaactctaaaggtctttgagtagtcaacttatatgacacaaagctcatttatcttaagcacagtgcttctcaatacttactgagaatctatgaatgttaattgacatataaatccaacacatttggttattagtattga

SEQ ID NO: 726221 - DNA, 788 bp, Homo sapiens
gagacataaaaatcagttttacctccatattatatattgcttaagtttttattgaaacaacccaatagtaattaacaactatttattgagcacagattccctgagcacatacctgttaaaaaaacagaaaamcagagttcccttaagtgtacagcagtgaaaaggggaaagtcaaaattaaattagaaaggagaggaaaaaaaattcatcacattaaactaaacataattatttaataattctattcaactggaaatgcttacctcatcttttattatacttcacatgggcctcttaattaagcaatgatgttattttgctacttggccaaggttccccagaaaataaaacattagatatagctctaagtgctaatgtgcaattaaggactgcagaacccgagaatagaagcaggagacaaagggagtaaaggaaagatgggtgcagtggaagctaacatgaaaatgtgtcatcaggtggcttaaaataaatgcaattgattgcttgatttcctaggaccttcctccgagaaaccacataatctgcatcttaggaccactctttgagtacacagagaaaggggaaagaaaaataatttgcagctagctcctgcccattaaaatgtttggtacacagagcattaattcttgttgactttcctaatcttccagtgttccatcgctcttggtgaacaggaaagccctgaagcagagatgagatagatgacatgaggtgagacattgttagatcacatctgtgtgaagttagtcggagcccacagtgcagct

SEQ ID NO: 726222 - DNA, 2912 bp, Homo sapiens
ggcagtgaaatgtatttcctttagagaaagttgaatttataattggaaaacttttgtgaaccacagagagatcctatttacattatattttgccagtctagatcctcacaaaggatttcaaggtggggacagggtagtatcaaagataaatagtgtctggcattatataacaaataactattaaagacattgctcagatagccttatgcctgtatttttcttcagggaccctacaaaaaatattaactaaagaatatagatcaaatttcagtttcaagtatttaccatcagtgaaatagaactgcaggttatggcctactaaagcgttaacaactctgaagaaacttttgacaaaaaataaataaaatgaaaggaaaggaaaagagaagaaaataagtggagattttaaaaaagtatactttatataagtaggtagtagcagttagtggttaaagagtacagtgaatattaagatcaagggagggagtcccttcctggatttctcagttacacagtttctacttataaatatttatcttgcaagtgtgattcagatgatatactcaaacatcaattagcctcccaataaaagacaagatgtaaagacgtggggatttgtgtaaggctgttgagctgtatgctgccaattcatttctagttcaagttgtttatcattattgtacctcattttcaaagtgttgaaggagtttttaaatagatacatttggaatttacatataacaagtaccctagaaggaaggtactccacttatactggagttctggaataagcactaatcaaatcattgagaattttatatagctgaggcaatataaagatatcatctcatatggtcctatttgattagcagtggaaaccatcaccttcaaattattttccccccttttagcctacctttacttcgatcatgctaaattagagaaataaactcaacatcaccagtaaccataaagacatgctccatgtagctatcaagctttcctgggtcaggatttaaatcttcagttggtaaacctcccaggcatgtctctgagttccaaaatattagaatacaaaagtatccactcatactcacatatgcatggactatcctaccattaccctgatatgtgctggtatattataacaaaaatgtctgaggttaatgtaggaaataagaaactagtactaaacactgatatatagtttttattagaaaataaatatatttggagtcagaattgtttccctccttagccaagaggagagagagagagaagatacttttcaggggatgagatctaagaatgtccaggtccatgagaaagtttggaacaagacatgagttgacttattcagaccctgtttcatttttatagtccaaagataaaggatcctttaaggttgtccatatatctattaaatcaaagatgagaatatcttagtctcagccctctcctagaatcaaaccaccttttgcctctcattctgtttacagctctcaatgctgtctctgctatccaaaggtagtcagtcaaccctgaaactctttctttggaagtaaagtcagcagggaaaatgatttcctcgtgctattgagacccatctcttgccaagaacttttgctgcaaatcaaggaggcaacttcccatgtggtcatttcatgcttcagttctactgaatttttggtgctctttgaaccctaatttgaaattgaaattctatttgcttgtattaggagtggtggaggagaatatctggaaatgcatttgtgtttaaacacgagtcctccaagttgctcaatgctttggtcttggttttatgaagaaaagtaaaatcaactggaatggcctggctgccacagctcaagtcagaatcactttgattcctggccttccagccttgacttgctctaatgtaatcttgtctgctgaagcaaggtgtgtgaccactgtgttattatctgcatttcagctctaaacccctaacrgcagggctttctctctccagcatatctctcaatcttattacaccaggctgtgcaagtgaaccctggcctctctacttgccccttctgcagctgttcagcctgtatcttgaatgttctagcaacctcttcgaatgccactgttatgcacattctcttgcattgcaagggtaaataaaagttacatgcctatcaggaaatcaagagtttcagagtaaatataagttctctcatcatctctaattgtcacttgctatggatgtcaaactgacagagtagcagaatctaatttccttgtttgattcaccatgaaattaaactgaactgacaatttttattttcacctggcaaattcatctgacactatttaaatccagctaatcaagtacagttatctgctccgcacactcatctctcccaccacacctctgattctcagtatcctacttcctgaactccctccgacagccgtgtgttggattacatttacagttttagaaggtgtaaaggaatgcatgaacatagttagccaaggtgccagcaaatgtatcatgtcacaaaattactactgaaagatgaaaaaacaaaaagagtaaaaaacaaaactcctggactgcagcatggttcaaaagcccaaccagtcagatggtttagtgaggcctgtgctcagtagagtagaaaatataattctgaagttaactgacttttaggggaaaaaaatcatgtttaacctctgtacaaaaaaataaatatcactgttcagatacagtgaggatgatagtaggaagtgctggatacatctgtcttaggaaatggggccatctggtagtgtgggagtgaccattgatagaatgaactataatttgagttttcaaagacaaggaaggtttcacattttggaatcattagacactgtctcaaaga

SEQ ID NO: 726223 - DNA, 2912 bp, Homo sapiens
ggcagtgaaatgtatttcctttagagaaagttgaatttataattggaaaacttttgtgaaccacagagagatcctatttacattatattttgccagtctagatcctcacaaaggatttcaaggtggggacagggtagtatcaaagataaatagtgtctggcattatataacaaataactattaaagacattgctcagatagccttatgcctgtatttttcttcagggaccctacaaaaaatattaactaaagaatatagatcaaatttcagtttcaagtatttaccatcagtgaaatagaactgcaggttatggcctactaaagcgttaacaactctgaagaaacttttgacaaaaaataaataaaatgaaaggaaaggaaaagagaagaaaataagtggagattttaaaaaagtatactttatataagtaggtagtagcagttagtggttaaagagtacagtgaatattaagatcaagggagggagtcccttcctggatttctcagttacacagtttctacttataaatatttatcttgcaagtgtgattcagatgatatactcaaacatcaattagcctcccaataaaagacaagatgtaaagacgtggggatttgtgtaaggctgttgagctgtatgctgccaattcatttctagttcaagttgtttatcattattgtacctcattttcaaagtgttgaaggagtttttaaatagatacatttggaatttacatataacaagtaccctagaaggaaggtactccacttatactggagttctggaataagcactaatcaaatcattgagaattttatatagctgaggcaatataaagatatcatctcatatggtcctatttgattagcagtggaaaccatcaccttcaaattattttccccccttttagcctacctttacttcgatcatgctaaattagagaaataaactcaacatcaccagtaaccataaagacatgctccatgtagctatcaagctttcctgggtcaggatttaaatcttcagttggtaaacctcccaggcatgtctctgagttccaaaatattagaatacaaaagtatccactcatactcacatatgcatggactatcctaccattaccctgatatgtgctggtatattataacaaaaatgtctgaggttaatgtaggaaataagaaactagtactaaacactgatatatagtttttattagaaaataaatatatttggagtcagaattgtttccctccttagccaagaggagagagagagagaagatacttttcaggggatgagatctaagaatgtccaggtccatgagaaagtttggaacaagacatgagttgacttattcagaccctgtttcatttttatagtccaaagataaaggatcctttaaggttgtccatatatctattaaatcaaagatgagaatatcttagtctcagccctctcctagaatcaaaccaccttttgcctctcattctgtttacagctctcaatgctgtctctgctatccaaaggtagtcagtcaaccctgaaactctttctttggaagtaaagtcagcagggaaaatgatttcctcgtgctattgagacccatctcttgccaagaacttttgctgcaaatcaaggaggcaacttcccatgtggtcatttcatgcttcagttctactgaatttttggtgctctttgaaccctaatttgaaattgaaattctatttgcttgtattaggagtggtggaggagaatatctggaaatgcatttgtgtttaaacacgagtcctccaagttgctcaatgctttggtcttggttttatgaagaaaagtaaaatcaactggaatggcctggctgccacagctcaagtcagaatcactttgattcctggccttccagccttgacttgctctaatgtaatcttgtctgctgaagcaaggtgtgtgaccactgtgttattatctgcatttcagctctaaacccctaacggcagggctttctctctccagcatayctctcaatcttattacaccaggctgtgcaagtgaaccctggcctctctacttgccccttctgcagctgttcagcctgtatcttgaatgttctagcaacctcttcgaatgccactgttatgcacattctcttgcattgcaagggtaaataaaagttacatgcctatcaggaaatcaagagtttcagagtaaatataagttctctcatcatctctaattgtcacttgctatggatgtcaaactgacagagtagcagaatctaatttccttgtttgattcaccatgaaattaaactgaactgacaatttttattttcacctggcaaattcatctgacactatttaaatccagctaatcaagtacagttatctgctccgcacactcatctctcccaccacacctctgattctcagtatcctacttcctgaactccctccgacagccgtgtgttggattacatttacagttttagaaggtgtaaaggaatgcatgaacatagttagccaaggtgccagcaaatgtatcatgtcacaaaattactactgaaagatgaaaaaacaaaaagagtaaaaaacaaaactcctggactgcagcatggttcaaaagcccaaccagtcagatggtttagtgaggcctgtgctcagtagagtagaaaatataattctgaagttaactgacttttaggggaaaaaaatcatgtttaacctctgtacaaaaaaataaatatcactgttcagatacagtgaggatgatagtaggaagtgctggatacatctgtcttaggaaatggggccatctggtagtgtgggagtgaccattgatagaatgaactataatttgagttttcaaagacaaggaaggtttcacattttggaatcattagacactgtctcaaaga

SEQ ID NO: 726224 - DNA, 2912 bp, Homo sapiens
ggcagtgaaatgtatttcctttagagaaagttgaatttataattggaaaacttttgtgaaccacagagagatcctatttacattatattttgccagtctagatcctcacaaaggatttcaaggtggggacagggtagtatcaaagataaatagtgtctggcattatataacaaataactattaaagacattgctcagatagccttatgcctgtatttttcttcagggaccctacaaaaaatattaactaaagaatatagatcaaatttcagtttcaagtatttaccatcagtgaaatagaactgcaggttatggcctactaaagcgttaacaactctgaagaaacttttgacaaaaaataaataaaatgaaaggaaaggaaaagagaagaaaataagtggagattttaaaaaagtatactttatataagtaggtagtagcagttagtggttaaagagtacagtgaatattaagatcaagggagggagtcccttcctggatttctcagttacacagtttctacttataaatatttatcttgcaagtgtgattcagatgatatactcaaacatcaattagcctcccaataaaagacaagatgtaaagacgtggggatttgtgtaaggctgttgagctgtatgctgccaattcatttctagttcaagttgtttatcattattgtacctcattttcaaagtgttgaaggagtttttaaatagatacatttggaatttacatataacaagtaccctagaaggaaggtactccacttatactggagttctggaataagcactaatcaaatcattgagaattttatatagctgaggcaatataaagatatcatctcatatggtcctatttgattagcagtggaaaccatcaccttcaaattattttccccccttttagcctacctttacttcgatcatgctaaattagagaaataaactcaacatcaccagtaaccataaagacatgctccatgtagctatcaagctttcctgggtcaggatttaaatcttcagttggtaaacctcccaggcatgtctctgagttccaaaatattagaatacaaaagtatccactcatactcacatatgcatggactatcctaccattaccctgatatgtgctggtatattataacaaaaatgtctgaggttaatgtaggaaataagaaactagtactaaacactgatatatagtttttattagaaaataaatatatttggagtcagaattgtttccctccttagccaagaggagagagagagagaagatacttttcaggggatgagatctaagaatgtccaggtccatgagaaagtttggaacaagacatgagttgacttattcagaccctgtttcatttttatagtccaaagataaaggatcctttaaggttgtccatatatctattaaatcaaagatgagaatatcttagtctcagccctctcctagaatcaaaccaccttttgcctctcattctgtttacagctctcaatgctgtctctgctatccaaaggtagtcagtcaaccctgaaactctttctttggaagtaaagtcagcagggaaaatgatttcctcgtgctattgagacccatctcttgccaagaacttttgctgcaaatcaaggaggcaacttcccatgtggtcatttcatgcttcagttctactgaatttttggtgctctttgaaccctaatttgaaattgaaattctatttgcttgtattaggagtggtggaggagaatatctggaaatgcatttgtgtttaaacacgagtcctccaagttgctcaatgctttggtcttggttttatgaagaaaagtaaaatcaactggaatggcctggctgccacagctcaagtcagaatcactttgattcctggccttccagccttgacttgctctaatgtaatcttgtctgctgaagcaaggtgtgtgaccactgtgttattatctgcatttcagctctaaacccctaacggcagggctttctctctccagcatatctctcaatcttattacaccaggctgtgcaagtgaaccctggccyctctacttgccccttctgcagctgttcagcctgtatcttgaatgttctagcaacctcttcgaatgccactgttatgcacattctcttgcattgcaagggtaaataaaagttacatgcctatcaggaaatcaagagtttcagagtaaatataagttctctcatcatctctaattgtcacttgctatggatgtcaaactgacagagtagcagaatctaatttccttgtttgattcaccatgaaattaaactgaactgacaatttttattttcacctggcaaattcatctgacactatttaaatccagctaatcaagtacagttatctgctccgcacactcatctctcccaccacacctctgattctcagtatcctacttcctgaactccctccgacagccgtgtgttggattacatttacagttttagaaggtgtaaaggaatgcatgaacatagttagccaaggtgccagcaaatgtatcatgtcacaaaattactactgaaagatgaaaaaacaaaaagagtaaaaaacaaaactcctggactgcagcatggttcaaaagcccaaccagtcagatggtttagtgaggcctgtgctcagtagagtagaaaatataattctgaagttaactgacttttaggggaaaaaaatcatgtttaacctctgtacaaaaaaataaatatcactgttcagatacagtgaggatgatagtaggaagtgctggatacatctgtcttaggaaatggggccatctggtagtgtgggagtgaccattgatagaatgaactataatttgagttttcaaagacaaggaaggtttcacattttggaatcattagacactgtctcaaaga

SEQ ID NO: 726225 - DNA, 2912 bp, Homo sapiens
ggcagtgaaatgtatttcctttagagaaagttgaatttataattggaaaacttttgtgaaccacagagagatcctatttacattatattttgccagtctagatcctcacaaaggatttcaaggtggggacagggtagtatcaaagataaatagtgtctggcattatataacaaataactattaaagacattgctcagatagccttatgcctgtatttttcttcagggaccctacaaaaaatattaactaaagaatatagatcaaatttcagtttcaagtatttaccatcagtgaaatagaactgcaggttatggcctactaaagcgttaacaactctgaagaaacttttgacaaaaaataaataaaatgaaaggaaaggaaaagagaagaaaataagtggagattttaaaaaagtatactttatataagtaggtagtagcagttagtggttaaagagtacagtgaatattaagatcaagggagggagtcccttcctggatttctcagttacacagtttctacttataaatatttatcttgcaagtgtgattcagatgatatactcaaacatcaattagcctcccaataaaagacaagatgtaaagacgtggggatttgtgtaaggctgttgagctgtatgctgccaattcatttctagttcaagttgtttatcattattgtacctcattttcaaagtgttgaaggagtttttaaatagatacatttggaatttacatataacaagtaccctagaaggaaggtactccacttatactggagttctggaataagcactaatcaaatcattgagaattttatatagctgaggcaatataaagatatcatctcatatggtcctatttgattagcagtggaaaccatcaccttcaaattattttccccccttttagcctacctttacttcgatcatgctaaattagagaaataaactcaacatcaccagtaaccataaagacatgctccatgtagctatcaagctttcctgggtcaggatttaaatcttcagttggtaaacctcccaggcatgtctctgagttccaaaatattagaatacaaaagtatccactcatactcacatatgcatggactatcctaccattaccctgatatgtgctggtatattataacaaaaatgtctgaggttaatgtaggaaataagaaactagtactaaacactgatatatagtttttattagaaaataaatatatttggagtcagaattgtttccctccttagccaagaggagagagagagagaagatacttttcaggggatgagatctaagaatgtccaggtccatgagaaagtttggaacaagacatgagttgacttattcagaccctgtttcatttttatagtccaaagataaaggatcctttaaggttgtccatatatctattaaatcaaagatgagaatatcttagtctcagccctctcctagaatcaaaccaccttttgcctctcattctgtttacagctctcaatgctgtctctgctatccaaaggtagtcagtcaaccctgaaactctttctttggaagtaaagtcagcagggaaaatgatttcctcgtgctattgagacccatctcttgccaagaacttttgctgcaaatcaaggaggcaacttcccatgtggtcatttcatgcttcagttctactgaatttttggtgctctttgaaccctaatttgaaattgaaattctatttgcttgtattaggagtggtggaggagaatatctggaaatgcatttgtgtttaaacacgagtcctccaagttgctcaatgctttggtcttggttttatgaagaaaagtaaaatcaactggaatggcctggctgccacagctcaagtcagaatcactttgattcctggccttccagccttgacttgctctaatgtaatcttgtctgctgaagcaaggtgtgtgaccactgtgttattatctgcatttcagctctaaacccctaacggcagggctttctctctccagcatatctctcaatcttattacaccaggctgtgcaagtgaaccctggcctctctacttgccccttctgcagctgttcagcctgtatcttgaatgttctagcaacctcttcgaatgccactgttatgcacattctcttgcattgcaagggtaaataaaagttacatgcctatcaggaaatcaagagtttcagagtaaatataagttctctcatcatctctaattgtcacttgctatggatgtcaaactgacagagtagcagaatctaatttccttgtttgattcaccatgaaattaaactgaactgacaatttttattttcacctggcaaattcatctgacactatttaaatccagctaatcaagtacagttatctgctccgcacactcatctctcccaccacacctctgattckcagtatcctacttcctgaactccctccgacagccgtgtgttggattacatttacagttttagaaggtgtaaaggaatgcatgaacatagttagccaaggtgccagcaaatgtatcatgtcacaaaattactactgaaagatgaaaaaacaaaaagagtaaaaaacaaaactcctggactgcagcatggttcaaaagcccaaccagtcagatggtttagtgaggcctgtgctcagtagagtagaaaatataattctgaagttaactgacttttaggggaaaaaaatcatgtttaacctctgtacaaaaaaataaatatcactgttcagatacagtgaggatgatagtaggaagtgctggatacatctgtcttaggaaatggggccatctggtagtgtgggagtgaccattgatagaatgaactataatttgagttttcaaagacaaggaaggtttcacattttggaatcattagacactgtctcaaaga

SEQ ID NO: 726226 - DNA, 657 bp, Homo sapiens
tcaggccagccactgatatctcacaaggtttggcatttaacaacacagatacacacacacacasacacacacacacacacacatgcactcatgcacacacacagaaaacagactggaggaaacccccatggaggcagttctaacatcagtagacaaccctctcttccatgcagtcatagggtcccatttattgcatccatcaagagaaccatgttgagattgacaatccttcctgccatgggtcctatttcacctcccatttgacacaaagaattttgcagggcaccaacttgggattctgatatctgctttactcggattcagaggaaaaccaattttcaaaaatatgtttgtaatggctaccaacttgccaatgcatttgctgagctagaagttttcagctctttgaaattttatctcccatgtgctccaaggacttcccaagcaccacaacacctcttttagtgtggcacagcagacaggctagtgcacaatacaggcagcataaggctcctctcacctgcctcacaatggaaggggttttaaggcaaagtcagaaggaaaatcatttcttatgctaaataggccttccctttattctccttagtagcaatgagaaattctgagcggatgtgtagggggaaagaacacttaagc

SEQ ID NO: 726227 - DNA, 657 bp, Homo sapiens
tcaggccagccactgatatctcacaaggtttggcatttaacaacacagatacacacacacacacayacacacacacacacacatgcactcatgcacacacacagaaaacagactggaggaaacccccatggaggcagttctaacatcagtagacaaccctctcttccatgcagtcatagggtcccatttattgcatccatcaagagaaccatgttgagattgacaatccttcctgccatgggtcctatttcacctcccatttgacacaaagaattttgcagggcaccaacttgggattctgatatctgctttactcggattcagaggaaaaccaattttcaaaaatatgtttgtaatggctaccaacttgccaatgcatttgctgagctagaagttttcagctctttgaaattttatctcccatgtgctccaaggacttcccaagcaccacaacacctcttttagtgtggcacagcagacaggctagtgcacaatacaggcagcataaggctcctctcacctgcctcacaatggaaggggttttaaggcaaagtcagaaggaaaatcatttcttatgctaaataggccttccctttattctccttagtagcaatgagaaattctgagcggatgtgtagggggaaagaacacttaagc

SEQ ID NO: 726228 - DNA, 639 bp, Homo sapiens
gaacatttcatataaatggagtcatacaatgtgtgatattttgtgtctgttctaaatctatatrtatatacacacacacacatatacatatacatatatatttttaaaatgggaaacaacttgagtgatatgaaagagactgtagtttcggtgtgatgccacagtcactggaaggacccacatgccctaggtaagattttgtattcgtcacagctgtagactcacagttaatggcctatcgaggggcaggaatgctactcttctcttttggtcatataaatacacaaaaatcaaaactgtctgagactgcttctgctccctgttaatgccttcacatcatacacacacatacacacacacacacacacacacacacacacacctcgcagtgtgcctgggttagaggggtcctaacatgagacacaagaacctctaaggctagatgccttagaaagcagaggaaccccctcctgccctttgcccatgctcatttcattttttaaaacagctttattgaagtataactgacatacaacaaactgaacttaattaaaatgtacaatttgatattttgacatgtgcacacctatgaagctgtttccccagataaggtaaaatacaaatttatcatccccaaaa

SEQ ID NO: 726229 - DNA, 639 bp, Homo sapiens
gaacatttcatataaatggagtcatacaatgtgtgatattttgtgtctgttctaaatctatatgtatatacacacacacacatatacatatacatatatatttttaaaatgggaaacaacttgagtgatatgaaagagactgtagtttcggtgtgatgccacagtcactggaaggacccacatgccctaggtaagattttgtattcgtcacagctgtagactcacagttaatggcctatcgaggggcaggaatgctactcttctcttttggtcatataaatacacaaaaatcaaaactgtctgagactgcttctgctccctgttaatgccttcacatcatacacacacayacacacacacacacacacacacacacacacacctcgcagtgtgcctgggttagaggggtcctaacatgagacacaagaacctctaaggctagatgccttagaaagcagaggaaccccctcctgccctttgcccatgctcatttcattttttaaaacagctttattgaagtataactgacatacaacaaactgaacttaattaaaatgtacaatttgatattttgacatgtgcacacctatgaagctgtttccccagataaggtaaaatacaaatttatcatccccaaaa

SEQ ID NO: 726230 - DNA, 1548 bp, Homo sapiens
cacagaaaaaaaagttttctaagtttcacattttgttccaaawatacggcttgttttcttatttggaaaatcacaacataggtggaatgcaaagccaatatacctagactgcacctgtcaaacctactatgaacggtggcttattcattaaaaacgtactttctttaaatccaaggtatttttaattaaataagaatatctggatttctccacattctgttgccttttacacacttgagaatttctaatgcatttagactgcactttatcagaccaactttaaaacattatcttcagtaagaaaaatatggtataatccaatgagctataataacttttcatgtacagtaaggcttaattgaaagtatggaatatattcatcctatattggatgtgaataaatagccttgactttgtcccaaatagttaaataactaatatgtttgtataagttatttctattttatagttcagttctcaaatactataacatgtataatgataactaatgtacttccatctcagaagcagattctatttaattcagactttaaatatttctttttccatgttgtagtgtcaacctgatgttgaaagccaaatatttaaagcagtaggtaaattagtaattaggttcactgacacaaatttaaccaattttgcaaagttaggaattgaattccgatttaaaatcttgtatttatgtaaatgtattcctccaattgcatacatacattgaaactccactaattcagatatttcttttcaatacttttactccaatatctaactataaaaggccaattttaagtttccacagcaacctgaattaagtctaaccaaatgctccatcctttgtaataacttacaggctcctgaagtaactcaagtcacaacatctttagagttctcagtaatttactaataaagagaagtaaaaaacaaaattgagatatttcttccagcctggtacctaacaacatttcaagtacttgaaaaatattctaacaacatcgcaggtacttggaaaattactgcacacagatggaaacagtaatatatgtattattgctttcttaaatagccatagttattttctaatggggtgtgtgtcttttgggccctacacaaattcccaaaccttgaaatcagactgaacatcaccttctttcctattctacattttccccagtaaatgtcacttttgtgacagcaactactaaaaccagcttagcaaagatatgacttcgtagaaagaaatgttatacaatctaatgtttgcattttagggctatgtcatgaaacacaatgtaaagaaatttaattcactgggaatgataatccactatttcgctgcagcatatttattttggcacaggacaatcaatgtcatgtaaggcccaatatcaaagctaaccattccaattattaattaagggactctgggctgagttatcaaagtatatcgccacttaacatcttcaaatttgcatactcaattttggtcttacaaaattgtgcagtctaacacaaaagtcagaaaactga

SEQ ID NO: 726231 - DNA, 1548 bp, Homo sapiens
cacagaaaaaaaagttttctaagtttcacattttgttccaaaaatacggcttgttttcttatttggaaaatcacaacataggtggaatgcaaagccaatatacctagactgcacctgtcaaacctactatgaacggtggcttattcattaaaaacgtactttctttaaatccaaggtatttttaattaaakaagaatatctggatttctccacattctgttgccttttacacacttgagaatttctaatgcatttagactgcactttatcagaccaactttaaaacattatcttcagtaagaaaaatatggtataatccaatgagctataataacttttcatgtacagtaaggcttaattgaaagtatggaatatattcatcctatattggatgtgaataaatagccttgactttgtcccaaatagttaaataactaatatgtttgtataagttatttctattttatagttcagttctcaaatactataacatgtataatgataactaatgtacttccatctcagaagcagattctatttaattcagactttaaatatttctttttccatgttgtagtgtcaacctgatgttgaaagccaaatatttaaagcagtaggtaaattagtaattaggttcactgacacaaatttaaccaattttgcaaagttaggaattgaattccgatttaaaatcttgtatttatgtaaatgtattcctccaattgcatacatacattgaaactccactaattcagatatttcttttcaatacttttactccaatatctaactataaaaggccaattttaagtttccacagcaacctgaattaagtctaaccaaatgctccatcctttgtaataacttacaggctcctgaagtaactcaagtcacaacatctttagagttctcagtaatttactaataaagagaagtaaaaaacaaaattgagatatttcttccagcctggtacctaacaacatttcaagtacttgaaaaatattctaacaacatcgcaggtacttggaaaattactgcacacagatggaaacagtaatatatgtattattgctttcttaaatagccatagttattttctaatggggtgtgtgtcttttgggccctacacaaattcccaaaccttgaaatcagactgaacatcaccttctttcctattctacattttccccagtaaatgtcacttttgtgacagcaactactaaaaccagcttagcaaagatatgacttcgtagaaagaaatgttatacaatctaatgtttgcattttagggctatgtcatgaaacacaatgtaaagaaatttaattcactgggaatgataatccactatttcgctgcagcatatttattttggcacaggacaatcaatgtcatgtaaggcccaatatcaaagctaaccattccaattattaattaagggactctgggctgagttatcaaagtatatcgccacttaacatcttcaaatttgcatactcaattttggtcttacaaaattgtgcagtctaacacaaaagtcagaaaactga

SEQ ID NO: 726232 - DNA, 2557 bp, Homo sapiens
ttcttgctgcataggctggtttttttttttttttttctattcaggccttcagttgattggaggaggccacattatgaagggcaatccactttactcaaagttcatcaatttaaatgttgatctcatccaaaacatctccaatttgacacataaaattagcatcacaaatatcttagatatttttttatccctaataaaagctagatttctaagataaattctgagtcagtaggacttttttgtaagagtaaataagattacaagcttactcctactttgagtctattaactgtaaagccattaaagattgcataatctgaaatcacagggcagaaagcaacacttgtgaagattatgctgatactcactcattccatcaccacttaccattttacactttggctcctgtacttcaaaatgatgggaaggaaattggtggtcagccatttcattgttgtgactggccattgtcacaacaggataacttttagcattgccagttgtatatctttgcatattgcaatcattaatctgaatgccacccacctaccctcctccaattagggaatttaatggcacccttagggtagagtgagtaaaatctgtgagtctcttaaaatatgagtcatgagttgctttgttgtagcagtgtcagctctgggtctatttagtaattcagagtttgcaatagaagagactagccctctttccataaaacctactgagctctgtccccacatacacataagaaatgcacactgaaattcacacaaattgttaaagcagactttaagatgagtgggtttcttggtctggggatggctactagatttacctggcgtgtgatcagagtctggaattaatgctttggcaggaattctgctgccaatggcccagtccaagtcatcctcagagtcttgagtaagactgcaggctgtggtccagtttcctgaacttgtttcaaaattgcagcttcctgttgtgcttgtataatgtgctggggaagcaaaaacattaatggaatttctggaaatgtctatcacatttgctactaccctatatttgggatcatttaaaattagtatctgcatattctaattctttataaatacacttacagcatcaagacatttgtactcattgttaatattttaattgaaggatctagaagcagtgtatgaatgttgtcacttattcattaaggagttatatgcattgacgaataatatttatagatgatagttaaaactgtgtctacacatgaacaataaacataacattatgctaatacaagattattcaggtcaaataaataaacagcttcagttgtctggatgtttaattcacttccgtcccttattctgatgtttgaatagcatagcctattagcgacgcaaagtcatttactmaagaaaaggcactttgggagaagtagtaaactgtataggacacaaattatcttggacaccataccaatcactgcagcatcaaatatcagagctagtcactaaattaaagaaagaaattctcttctaaaagtgttgattgataactcattaaaaattaaattattcacagtgagaaaaattaatagataataactgtatctatttctagtcacctgtgaaaagtgccatcatgataccctgatctaggctttcatttttcttttttttgtacatcagttattacttttgaagcactcactgtaaaaccagactgcgttgtacagacagaatgaatgactgggtgatttaattggtatgaatcaattgagattgtcattgacttttcctttctttttagaaagaaagtttgtgttatttttaaacttccttctcgttcacaacttttccttaacatacaaccaatgttagcatatagaaatgtaatcagaaaaaagccttgctgtaagaatagatactaaatatatagcaagcaaagctttaatatttccacacaaaactttctggatccctgagattatttaaataaaatattagcattttacttctcaagcattattgtatcttatccctacaaattacaaccacttgtattcatgtacattcctttcgttcattctatatgactatatataatctattgcttcttgtatgcttatttatgggctctgtgtgccttttttgtgtttgtcatgccagtgttatataatatagaataggtttttattatgtgatatggataaaaaatgagacattccgttctgctggtgtttagccaacacatctgtaaaaattcagaatcttgcaatggacataaaagacagtcatcatgtgttctttagaatgatgtcacctgcacattctttactagttttctatgtaagtgactccctgatatacagccctacaatatttattccgcatccttttctattctctgtgatcatccttgtacctcctgtcccgctttgcttaatatatgactttatttttgatgctaaagatatttatccaatcaggataaattctcttacatttcattcactcaatctcaaaatatgccacttttctctttcttaaggctaatctct

SEQ ID NO: 726233 - DNA, 558 bp, Homo sapiens
aaaataagacatagtgaatatgatttgtatacccagctcccctattctggtgacactccttcatcaataaggtcaccaaggtggagttccagtaggcatgtttgtctaatgtatcctgccgtctstctacaataactagtctgagggtgaccatttgacccaagataggtcagagaatttagaaataaaactaaaggatgcctgcaacaatgtgtccaggctcgtgtattccccggagtcatgttttctttatgtacggtaaagtagagatggacgttccacagaaagggaaattaaatagatgagctgaaacacacagtttctgtcacccaggttggggtgcagtggtgagatcatgactcactgcagcctcaacctcccaggctcaagtgatcttcttgcctcggctttctaagtagctgggaccacaggtgtacaccaccacaccagccaatttttaaaattttttgtagagatggggtctcactatgttgcccaagctgaacttctgagctcaagtgatcttcctgcctcagcctccccccacagtgtaggatt

SEQ ID NO: 726234 - DNA, 602 bp, Homo sapiens
atgaaattgataccaaaatatgacactaagaggctgtcatgttagaagggctcagaggccctctgcccaacttcatttcctgtcatgcttctcctcactcctgctccagtcacagattccctttcaaagagtcttccaattacccaagatccctcccatctcaggacatttacaggaaatactctttgtctttccccatttcaacctccttgatttctacacatttcagcggaatcacgtcctcatgggagccttcactgaccccctcaacaaaggcatgcctccctgccatacactctgcgagcaggatatacttctccttcttagcacttactayacttatatacagttttcccctggtatgataacctgataaatatctgtctctttgatgagataaaaataatataatgataggcaaaatctgataaggagtacctaacacagtgccctgcacatagtaagtgttcaataaataactgcaagtggaatagctgtatctatatatacatatatgtgtgcagacgcattacaagtgtattacgtaagagataatgagtgtgcatggaatgtaaagaatgtaattttaaaatgtgtttatt

SEQ ID NO: 726235 - DNA, 602 bp, Homo sapiens
atgaaattgataccaaaatatgacactaagaggctgtcatgttagaagggctcagaggccctctgcccaacttcatttcctgtcatgcttctcctcactcctgctccagtcacagattccctttcaaagagtcttccaattacccaagatccctcccatctcaggacatttacaggaaatactctttgtctttccccatttcaacctccttgatttctacacatttcagcggaatcacgtcctcatgggagccttcactgaccccctcaacaaaggcatgcctccctgccatacactctgcgagcaggatatacttctccttcttagcacttactacacttatatacagttttcccctggtatgataacctgataaatatctgtctctttgatkagataaaaataatataatgataggcaaaatctgataaggagtacctaacacagtgccctgcacatagtaagtgttcaataaataactgcaagtggaatagctgtatctatatatacatatatgtgtgcagacgcattacaagtgtattacgtaagagataatgagtgtgcatggaatgtaaagaatgtaattttaaaatgtgtttatt

SEQ ID NO: 726236 - DNA, 984 bp, Homo sapiens
tggcctcggctcaccgcaacctccacctcccgggttcacgtgatcctccagcttcagccttctgagtagctgggatcacaggtgtgcaccaccacgcctggctcatttttgtatttttagtagagatggggtttcaccaccaggctggtcttaaactcctgacctcaggcaatccacctgtctcagcctcctgaagtgctgggattacaggtgtgagccaccacgcccggcctaagtgactctatttgactcccagtcacattacacattacacattacattagtatgtgactttggacaagtcactcaatttattctggctttgttttcctcagttgtaacgtgaagataacagtaatacatatttacagtcccttaatgcaagcctttgtcgtcaagtgtgtttttaaatttagaattgcttaaactttagaaagttcttatagtacacataccatatactaggtgtaatagcccagtaagtttgtaatagcagttccataataacatacaggaatacttccaaagtaaaatatatggctatttatgttcaatggaataaattcagactacagataggctcatgtcagtttttgtcaaatttgatggcaagtgagttacaatttttttaaaragcttcagagctttttagactttgaatttatggttatttctctggaatagattttatgcaaatctaaaagagtctacagctaatttcatcttattctgaaaatacaaaatgggattaacttatacgtaaactttaaacatttcagtatgcttgcggtttaaataatgtaacttttctattacctgatttttttttcaaatttttgacatttcaaatgattgaaagagtttctggataggggtgtgtgaactttagcacctaaaccataaggttgtgatcattaaaagagataatatatgtgaaggattttggagagcatctggacctggaagcactcagtagttcctgtg

SEQ ID NO: 726237 - DNA, 604 bp, Homo sapiens
ataagaccctatctcttaaaaaagaaaaaaaaaagataggctgggtgcagtggcttactcccataatcccagcactttgggaggctgaggtgggcagatcacgaggtcaggagatggagaccatcctggctaacacggtgaaacgctgtctctactaaaaatacaaaaaaaaaaragaaaaaactagctgggcgtggcgacaggcacctgtggtcccagctacttgggaggctgaggcaggagaatggcgtgaacccgggaggcggagcttgcactgcactacagcctgggtgacagagcgagactctgtctcaaaaaaacaaacaaacaaacaaaaatggtgtataacaggtctgaaacaagttagctgctatgaaataaatgtggaacggaagtcacgccccaaggcagccccctcactaggtaccctccaactgaggtaggggagggtggacccataaaaactctcctggcagccaatgactaaaggcagtggagttgtattagtccattttgtgttgcacataccagaatacctgtaactgggtaacttataaagaaaaggaatttggccaggcgcggtggctcacgcctgtaatcccag

SEQ ID NO: 726238 - DNA, 907 bp, Homo sapiens
aatgttgataatgattatagttgagtaatggatacacagagttcattaaattctctcttctacgtaggtttggaattttcatagtacaaatttamtttgaattaggaaaaaactagctaaaacataaactatttaactactgcaaaaggatacagacatgactcttgacatcattacgaagtcctttacgaacaaactcataagcttcttctttttttcctaaacagttcagtgttaatcctttcatagccaaagtctctgaaaaataatttttaaactctatttacaaatgacacaaaattattctcttattctcttaatagtactttaatagttgagatctgaaggattactatggctccaattcatctttttaatctcacagtttgaacttctctccaagtagaaaaagtaaaactacatttaaatatttacttaaagcttagcagcccaagtccttttctgaaattccttagtttcagagttgctaaaatggtttctgcccttcacaagactctgtaaaagtggttgatattattctgctgaaaaaattaacaaagcaggccaggtgcaatggctcacgcctgtaatcccagcactcagggaggctgaggcgggtggatcatctgaggtcaagagttcgagaccagcctggccaacacagcaaaaccccgtctctactaaacaaaaattagctaggcatggtggcatgtgcctgtaatcccagctacttggaaggctgaggcaggagcactgcttgaacccaggaggcagaggttgcagtgagccaagattgtgccactgtactccagcctgggcaacaagagcgagactctgtcttaaaaaaaaaaaaaaaaattacaaagcagacatgagtcttaatggaattaaatctaccatagcagtt

SEQ ID NO: 726239 - DNA, 1539 bp, Homo sapiens
catttacattggaaaactgtagttttgtgcatactttatgtcctcttttcttcttcttcttcagaggccctcgttctcccatgctttatgttctcatcttaggctctgtactcaacattcaggccttagattaaggacatttaggatcctgatctgtttcaaaggataattcattactatttctggattgttgttcccctaggtggactacatcatgcagccgcccgaatttccggtgacggtgtctataagcatttgaagtatgagggtgggattcaccgagttcagcgcatccccgaggtgggcctgtcctcaaggatgcagcgcattcacacaggaacgatgtcggttattgtccttcctcagccagatgaggtaacctcaggaggaggcaagggaaactcactccatgtcaacgggtattgtgctggaagccttagcttctaggaaaatctgtccttttttttttttttgagacagagtctcgctctgtcgcccaggttggagtacagtggcgcgatctctgctcactgcaacctccacctccctggttcaaacaattctcctgcctcagcctgctgagtagctgcaattacaggtacacgccaccatgcctggctaatttttttgtatttttagtagagacaggttttcaccatgttggccagactggtctcgaactcctgacctcgggcagtccgcctgtctcgcccttccaaagtggtgggattacaggtgtgagccaccgcacccagccgaaatctgttcttttcatggctacagattggactttatagtctctaatgggaaatgtttaactctcccctaggcaaagttgcccctcttatcattgaccaagatgttttgtttgcttttaaatagaagtcacttattttcaaaaaaaagttcatttaatgttgctgcctaaattttatcttaagaaagaaaatgaattccagagataatatttcaaggtcagttgtataatatcagtatggggaccatgtatctatctttttagttgaatacagccatctgctctatatttttcttttccctaaccttttttttttaaacatacagaaaatttaaaggataccacaatgaaaattttataaccttcacctgaggtcagttgtttacattttctcacatttgcttgattcctatatatatgtgtatacatttatttaaatgaactataaaggatacagcagacaccatgagaccttaccttccaaatctttcacatagatctcttagggcattctccgatrtaagcacactaccattacctatgaaaactaaacataattgtataatatctaatatctagtacatttaacagtttccctaatcagcccccaattttttaatagctatttatttatctacttttggaggcaaggtctcgctgtgttgctcaggctgaacttgaactcctgggctcaaggtgatcctcctgccttaacctcctgagtagctaggactacaggcatgccactatacctgggtatagtgattttttttttttatcca

SEQ ID NO: 726240 - DNA, 689 bp, Homo sapiens
agagaaacacggccttgtgtttttactttttgaatcctgaactactagatgacatgtaaaacccatatattcatgcaattaaatattaaaagcatattatattttttgaccagcatctcccttaaacagcatttctccagttaytgtagttgctgttttttaagatctatgagctgagccccaataagagaaacagttaaagagagtgaaggagactaaaagagtaacatccgtactcggatggaagagtctatggataaattaggaagctcccctttgagggctacttatttcaccaaaaacaaacccatgcttgcttaattttctgtagataattttgagagaaagacaagagggaaaaatctaactcataaaaatagatgtagtcatagggcaagaacaattctgaaaggttaaactttacttacaaatctttagtatttagccctccagtaaaaacctaaagttatagttaaaatgttcaaataaatttattggagactcaaggaggactacctatatcattttggggagaaacttcccttattcaaatggagatttaaataaaaatattttgattaataagcagaaaataaacaaaaaccaggtgaataatacattttggaaggagaatattccaggaaacaacaataaaaaaattcaatatccctaaaaaattaaaatggcaa

SEQ ID NO: 726241 - DNA, 1153 bp, Homo sapiens
tgcgggtactaagtactgcagtcagaacattatctgaattggctgggcaatgccatatcctgaaaccacttactaagtaaacagataatgggcccagaaactgcagatgctgcttactgcatgggttgaatgatggctgagaaacttctcactcgtgggaaatattcaaatggatgatatttagctgttagtagtgactttatatttgaaaatatgaattatgaatggataggtgcctctgtgggtgatctcagtgtagagatgtctgtagattatattcatgaatttgtctggagcagctcagctaattaaagcaatgcacttaggaagccaygtcttcaggttcatttcttgtgagggctttatacatctgcagactatacaacacgtactaggaccttaataaatattgttcattagatgaataaatgcagaaataatccacagggcaaagaggggtgtgtgtctataaaggcattaccactgtctaggcctttaagcataatcatcatgtttagaaatccctgcttgagccagtgaggaaaattttgtgagaaagcaagagagatgagctaaaattatcactgctctcaacaagtaatgaaaggacacattcttgtaagacagtatgagtaattgtatctagtgtcgtgaaagaggaaatggttattttaaaaaatgttctatgctcttatacaaaagtacatgtttttatgtaaatataatataatttaatacaaattaaaagtaaccaaaagccttattcatttcaaatatttgatagaaaggatatgagacaaaattgaataattatatttaacttaataaaataattaagatagctattttgctagtcattttttcttggtattttgaacttcctgtactcttcaatcattcttataatttcaaacctctaaatcacaattttatatcagtgtcttatccttttttgatgtagtaagtgactgtatccaatccacgttatccttgacccaaatttaatgtttcttcatatatttccatagggtgtggatttcacgtaagctacataaagtaaaattgaagcacttttgtatcccactgctttaccttacaatgtaaatggatcattaacactatttgaatggttatataataatctacgtattca

SEQ ID NO: 726242 - DNA, 1714 bp, Homo sapiens
caactctaatccagtatcacatgtatcattttagccttatccccttgtttatctgtacactcccatcccaacagtgataatcctggctcctgccatctgtcaattccagtatacaggtattggaatatcagaatttttaacttgtactctagttattttaaccaagaaataactttgttaactagagtacaatgcttatgtactgtcaaacgagattccactcgtttccaaagttatttaggttcctctcctgatttttaactcttatttcactgcattttaatccggatttatttattgttcctggttgtcagtcctgaaactaaagtggtaataaaggaaacaggtggtatacgtgagaggctttcaaattccttgaggtcataaaatatatatgtatgtgcatatatttaaaataaagccttgaacaggcagaaaaactgatattgcattgtagataacaaatggcataaaacacttatgtagaattagtcccatcaaaatatgtaaagaagtaaggttcgataaaagttgtgggcattataataaaatatttctctccctttatattcactccttacctgttctcagtaaaataagttcaactctgtacaattaattttctgccatgtctactgcttgtacttgggaacaaatgctatattataatataaagatatgtgtggaacttggtttcaaaagtcaggtaatgcaaatatcaaaaaacaggtgatctctcaaacaccttatgataagtcagtcagataaagtgctctgcagaactccagccaacaaacaggttgattatcagtgaagtatctcatattttcaggtagtcctcacactaagaaagctaatgaaaaagagtttgagctcacataatcatgagaaagtacatttcaaaccaccttcccaaatttcctgctgcagtttcttctctttttactcattatttttctttttacctcrgtttactttctggttttcttggctgagtgcctttttaactgctttgaagtaagatgctatcttctttatcaggtttgcaaactatttattgaatttagcaattaaaattgtcgctgtggttgaactggaaaatgtccttttggtacttgaatttactgaatataatgactgaaaaagcatttcaaacaaacaaatcaacaaacaaaaaatctcaattagtttgttgcatagacacaatagtaactcacagcactggcatattatttttgattcacaaaacacatatagagcctggcatctattagacatggaagccacttattaagtatttatttaatcaatgaatgcatcaaaggattagtaatatcaacttcaacacaatcctgtagtatatgtaatattcttcctcttccctacctttaacaatgaggaatttgagctcagaaggattaagtgaattacttgaagttatattattaattaaactactgaagccagaacacgaatctagaacttaatcatcagaagggcaactactacctccacctacgttactcatgatagtattaacatggtagcacagtggtacatagtagttgctcattgaatattatttagtaaaagaaatgaaaagagtggtgctagatacttggaagaataagaattctaagaaggagaataaaggtgtatatacatattcatttgataagtattcaaataatagttaaagagatgcataggatac

SEQ ID NO: 726243 - DNA, 670 bp, Homo sapiens
aaaagtttttaagcatagtacctgatagttttttaatcttcacccacacccaccccttccccataacttttttgattgattatgaaatatttcaagcaaacacagaaaataatatgacagtattcttctaaaatctacattcatcagattacaactttttgccatatttgcttcaaatcmctccttttcaccctaaaaagaaaatattactgagagagagaaagtctcctctcttcatactttctttcacttcactgttcgcatccttaatttttatttatttattttttaatttttttttagagacagggtctctttttgttgtccaggctagagtgcagtggcacaatcatagctcactgcagcctcaaactccttggctcaagcaatcctcatgtctcagcctcctgagtagctgggactacaggtacatgccaccatgccccactccaattcttatttatttttaaagtggcatcactttgttagtaaagccttcccattatcactcagatttacttaactctatcacctattcccacaatattttatacacaaattatattacaggaatgatcatattgtattttaattgtagtcactttttctctataagaaaaaaatgacttggtcatttttaatcatctagtgcctatgcaatatctaactc

SEQ ID NO: 726244 - DNA, 670 bp, Homo sapiens
aaaagtttttaagcatagtacctgatagttttttaatcttcacccacacccaccccttccccataacttttttgattgattatgaaatatttcaagcaaacacagaaaataatatgacagtattcttctaaaatctacattcatcagattacaactttttgccatatttgcttcaaatcactccttttcaccctaaaaagaaaatattactgagagagagaaagtctcctctcttcatactttctttcacttcactgttcgcatccttaatttttatttatttatttttwaatttttttttagagacagggtctctttttgttgtccaggctagagtgcagtggcacaatcatagctcactgcagcctcaaactccttggctcaagcaatcctcatgtctcagcctcctgagtagctgggactacaggtacatgccaccatgccccactccaattcttatttatttttaaagtggcatcactttgttagtaaagccttcccattatcactcagatttacttaactctatcacctattcccacaatattttatacacaaattatattacaggaatgatcatattgtattttaattgtagtcactttttctctataagaaaaaaatgacttggtcatttttaatcatctagtgcctatgcaatatctaactc

SEQ ID NO: 726245 - DNA, 670 bp, Homo sapiens
aaaagtttttaagcatagtacctgatagttttttaatcttcacccacacccaccccttccccataacttttttgattgattatgaaatatttcaagcaaacacagaaaataatatgacagtattcttctaaaatctacattcatcagattacaactttttgccatatttgcttcaaatcactccttttcaccctaaaaagaaaatattactgagagagagaaagtctcctctcttcatactttctttcacttcactgttcgcatccttaatttttatttatttattttttawtttttttttagagacagggtctctttttgttgtccaggctagagtgcagtggcacaatcatagctcactgcagcctcaaactccttggctcaagcaatcctcatgtctcagcctcctgagtagctgggactacaggtacatgccaccatgccccactccaattcttatttatttttaaagtggcatcactttgttagtaaagccttcccattatcactcagatttacttaactctatcacctattcccacaatattttatacacaaattatattacaggaatgatcatattgtattttaattgtagtcactttttctctataagaaaaaaatgacttggtcatttttaatcatctagtgcctatgcaatatctaactc

SEQ ID NO: 726246 - DNA, 618 bp, Homo sapiens
gtggttacccagcattagcatagttgaaacctcactaatacacctagatggttgataataaaggcagaactagaatacacgttatctgattagcaatatagtgtctttttactaaattattctgttattcatctgcacattcaacaagtatttaatcatatatttactgtagaaaacagcacatcattaaacagacagactgtggtctctgcccccaaggagaatatgtttctagtgagggaaagagatacaaattcataaatctaaactatagaaaatggcaaactctatagcacaaatgtcttttgagagagaataatgggtgaggggaaggaaaggagatgaatacctttaaggtggcakgggtagagctctttgagagactgcaaagcagagaagatgcttcaagaaaaagaagtacacatttctctccctggaatggtctcagtggtctcagataatggtttcagttttccatattcctttatttatgtagtgtcaggccaacagtgtactttagctccaggctaaccagttgtccttggtttgcatcccgtgtattcagaaagctattggattgttttgtaagttcttaaagaaggactgaaaaaggcttca

SEQ ID NO: 726247 - DNA, 618 bp, Homo sapiens
gtggttacccagcattagcatagttgaaacctcactaatacacctagatggttgataataaaggcagaactagaatacacgttatctgattagcaatatagtgtctttttactaaattattctgttattcatctgcacattcaacaagtatttaatcatatatttactgtagaaaacagcacatcattaaacagacagactgtggtctctgcccccaaggagaatatgtttctagtgagggaaagagatacaaattcataaatctaaactatagaaaatggcaaactctatagcacaaatgtcttttgagagagaataatgggtgaggggaaggaaaggagatgaatacctttaaggtggcaggggtagagctctttgagagactgcaaagcagagaagatgcttcaagaaaaagaagtacacatttctctccctggaatggtctcagtggtctcagataatggtttcagttttccatattcctttatttatgtagtgtcaggccaacagtgtactttagctccaggctaaccagttgtccttggtttgcatcccgtgtattcagaaagctattggattgttttgtaagttcttaaagaargactgaaaaaggcttca

SEQ ID NO: 726248 - DNA, 645 bp, Homo sapiens
tgatataattaaaataagaatgaccataattgttgaaaaatagtactgtgccaaatgtgtacagttgctttgtatttggcagcactgacrttgcaatttggtggtgaaaaagatgggctacattatatcatacacacatacacagaattacgtataaaacaatcacgcaccaaatgatccctgccacgtgttgacattttgaaagtaaaactttaaaagttttagcacagaatataggataataggcttatcatattcaagttgcttaaaatttcttcaaataactgaaaatagacaaacataaaataaactattatacatgcaactacactgaattgaaatatttctctatctcaaaagtcacagtacaatacaaataggaaaaatattttaatatggaaaacttctaaaggcaagaaactaatatatataaattttcctgcagggtgaaaagtaaaataagcagggcgtggtggctcacacctgtaatcccagcactttgggaggtcaagatgggcagattatgaggtcaggagttcaagactagcctgaccaatatggtgaaactccatctctactaaaaataaaaaaattagctgggtgtggtggcatgtccctgtaatcccaactactcaggaggctgag

SEQ ID NO: 726249 - DNA, 940 bp, Homo sapiens
aaaacaaaaagtgctcagttaatttatataccacataaatcaggtgagacaagtctcaaattgaaactttaagagatgtttttaatagtacagacttcaaaatgattcatactgaactctaaatcagtactttcttttatagctcagctaaattctcaattactatggaccattaactttaagcccataataaatgaaattatagtgagtagttcagtggtttgtacacagatcttcgattaatattggttaagtgaaaccatgccaagaaataacttctgtccacagaaagctagagtaaaatgttttttgaaaactagtgtctagaaatgyattcttcctattcaattcctcagctggagagcatggaaaacgcacctccatgcagaaatgaagagtaaaatatttacttctaaccatctcctcgattagtatttttcttcactacctgccattagcatttatcctacataaagatcctcttaatcataaacaatatgtataaacctgtatttcaaaaaattttatgtcatttctataaaggaccttacattatagggtaatttcttttttaaaaaaatacgtaaagtagtagaagaaactactagataaatcacttgaagtaaaactctaatcctgaaagaaaaatctctatcttaaaatcttggttcttttaataaaatttaaaacatactgacatcctaaatatactgtctgttcaagtattaaggattccctactatagcaatatgtaaattttattgtattataaactactatatatccttgtttttgcagaataattattttagatcagtaagcatcaagtaagcaatgaccactgttacgtgtggtttaagggaacataaaagacagagataacaatttgaaaatttctcttggttctacctgctgtcaagctactgcaggcttgataacc

SEQ ID NO: 726250 - DNA, 1016 bp, Homo sapiens
ttacctgacagttataaggttaatccacaaattgtgtgtaccattagttcatccattgtcattgctgtattctgttgtataaacataccacaatttattttgatatttggcacagtttctggccactacatataatgctaaaatgagcacattgtatatgtcattaaaatgaggttgaactaatcattaagggctcattaaaatcaaaactaattttcaaccaaaatttcactgtatttagcagctgggtagtacctctgattattctttttatagtttgtaactaggtgaaataggttgaattattaattctaaaacctattcctaaaatggtaaagtactaaaacagtaattgtaacagcaattttgaaaatgacaaaaatgttagagaaaaaaaatggtatacattaatgatcgtcaaacttgcttaagccctaaaataactttttaaaattacatatctcatccctgcacatttttaacttcacatttgttattttttaaccataaatgtaagtattataaaagatataacttctggcatattgtatagttcatgtgctttaagtgtattttccatcataaccttgaagccacataattagctcaatcagtttgtggaggatgtctgcctgtccattttgaggtacaaagccagttcttattgtcaaactaatgagccaaatmaaacttatacagtcacagatcatttaatgatggggatacattctgagaaatgcattgttaggtgattttatcattgtacaaacatgacagagtatacttacataaacctagatagtatatatatttttatttatatgtatttttcatatggaaaaccaaacgtcccagcaccattactgaattatcagtcatgtcccctacttgatctgcagtgccaataccaagtgccatatatcagacttctatgtatgctccctatgaccttggggaccactgttgtatatgtggttcattcatcttacaccaaaatgtcattatgtggcacgtaa

SEQ ID NO: 726251 - DNA, 1590 bp, Homo sapiens
gtggaggctgtagtgagtcatcatggtgccactgcattccagcctgcatgacagagagagactctgtcttagggaagaaaaaaaaagattaaggtggtccagaatgcacccaagcataaaatgcaaagatgatcttgccccatgtatattttagcatactacttaggtactatttattttttaattatctcctttttacattttgacaattttaccccagtggtcaagccttgtattagaaaagacagaaagaaggaaaagaaagaaggcaggaaggaaggcaaggggaaagaaggggaaggaaaggaagtggaagggaaggggaagggaaggggaagagaaggggaagagaaggggaggagaaggggaggggaaggggaggggaggggaaacatgttgctttggacagaataaatgggtaagggtttctattttaattagattaagattaattagattaaacctctgaggaagtcttacttgagctgagaaactaaatatgagagggaggagtaccactgcattggttatagatggggtagaagtctacaaaagagttcattgaggaatagaatagtaaatatgtgacttaattatgatttttttgtcggtctcagtggctcaagcgtgtaatcccagcatttgggaggccgaggcgggcggatcacgaggtcaggggatcaagaccatcctggctaacacggtgaaaccccgtctctactaaacaaaatacaaaaaattagccgggcatggtggcgggagcctgcagtcccagctagtcgggaggctgaggcaggagaatggcgtgaacccgggaggcggaggttgagtgagccaagatcgcgccactacactccagcctgggcgatagagcgagactctgtctccaaaaaaaaaaaaaaaaaaaaaataataataataataatgagtttgtattgttcttattttgcaaaagaatgcaagatctgggtagagaaaaggcaagagggaggacttcccagattgaatcaataatattaacagtatcaatctgccactaataattatttaagaaaagtatttttctgctttcagttttatttattaaatagtttctrctagcctaatgttaaagtctgccaactagttccttcaagttaatcacattcacttttgattccctcttaacacattaagatattttataactctgtgagtttaaaatctgatgcaaattcattgtggtcaggcaagatgcaagaccagtcaggcaaatacacttcccttattttttatgggtctgaaatatcttttgtcttgggagatgtattattatacaaaagatctatttggcaatttatagtttgctttttatctattcaattgttccctggtattcttagaacagaaaagcgaaccttttaagaataataacatgccaattacctttaattactctctagctctttcagttaaacaaaaaaaccctctcattttaggtttagtttgtaactgaatagaacattttatatctaaacccttaatggaaaggctttcctatttcccacaattttcttttctatttaatgtattctctaaatttaacacatt

SEQ ID NO: 726252 - DNA, 1590 bp, Homo sapiens
gtggaggctgtagtgagtcatcatggtgccactgcattccagcctgcatgacagagagagactctgtcttagggaagaaaaaaaaagattaaggtggtccagaatgcacccaagcataaaatgcaaagatgatcttgccccatgtatattttagcatactacttaggtactatttattttttaattatctcctttttacattttgacaattttaccccagtggtcaagccttgtattagaaaagacagaaagaaggaaaagaaagaaggcaggaaggaaggcaaggggaaagaaggggaaggaaaggaagtggaagggaaggggaagggaaggggaagagaaggggaagagaaggggaggagaaggggaggggaaggggaggggaggggaaacatgttgctttggacagaataaatgggtaagggtttctattttaattagattaagattaattagattaaacctctgaggaagtcttacttgagctgagaaactaaatatgagagggaggagtaccactgcattggttatagatggggtagaagtctacaaaagagttcattgaggaatagaatagtaaatatgtgacttaattatgatttttttgtcggtctcagtggctcaagcgtgtaatcccagcatttgggaggccgaggcgggcggatcacgaggtcaggggatcaagaccatcctggctaacacggtgaaaccccgtctctactaaacaaaatacaaaaaattagccgggcatggtggcgggagcctgcagtcccagctagtcgggaggctgaggcaggagaatggcgtgaacccgggaggcggaggttgagtgagccaagatcgcgccactacactccagcctgggcgatagagcgagactctgtctccaaaaaaaaaaaaaaaaaaaaaataataataataataatgagtttgtattgttcttattttgcaaaagaatgcaagatctgggtagagaaaaggcaagagggaggacttcccagattgaatcaataatattaacagtatcaatctgccactaataattatttaagaaaagtatttttctgctttcagttttatttattaaatagtttctgctagcctaatgttaaagtctgccaactagttccttcaagttaatcacattcacttttgattccctcttaacacattaagatattttataactctgtgagtttaaaatctgatgcaaattcattgtggtcaggcaagatgcaagaccagtcaggcaaatacacttcccttattttttatgggtctgaaatatcttttgtcttgggagatgtattattatacaaaagatctatttggcaatttatagtttgctttttatctattcaattgttccctggtattcttagaacagaaaagcgaaccttttaagaataataacatgcmaattacctttaattactctctagctctttcagttaaacaaaaaaaccctctcattttaggtttagtttgtaactgaatagaacattttatatctaaacccttaatggaaaggctttcctatttcccacaattttcttttctatttaatgtattctctaaatttaacacatt

SEQ ID NO: 726253 - DNA, 560 bp, Homo sapiens
agggacatctggacataagggccaactggagggcagggaaggtaattttccttgcattttaractcagaccacatatcacatcagaatcacctgagggagacgttttcaatgcatattcctgggtttcttctcttggaaatttttattaaatcttgagttgtgctgatttatccatatttatcataagaattttggataattcttactttgagaggcccaggcagtggatcacttgaggtcaggaattcaaaaccagcctggccaacatggtgaaacctcatctctactaaaaatacaaaaattagccaggcatggtggtacatgcctgtagtcccagctacttgggaggctgaggcaggagaatcacttgaatcagggaggcagagatgacagtgagctgagatcacaccactgcactccagcttgggcaacagtaagactccatctcaaaaaaaaaaaaaaaaaaaaaaaaagaattgtggataattctgatgcaattagaaaacaaagcagagcttgacaaccactgggttgggacgtatatcaggaagacatttga

SEQ ID NO: 726254 - DNA, 560 bp, Homo sapiens
agggacatctggacataagggccaactggagggcagggaaggtaattttccttgcattttaaactcagaccacatatcacatcagaatcacctgagggagacgttttcaatgcatattcctgggtttcttctcttggaaatttktattaaatcttgagttgtgctgatttatccatatttatcataagaattttggataattcttactttgagaggcccaggcagtggatcacttgaggtcaggaattcaaaaccagcctggccaacatggtgaaacctcatctctactaaaaatacaaaaattagccaggcatggtggtacatgcctgtagtcccagctacttgggaggctgaggcaggagaatcacttgaatcagggaggcagagatgacagtgagctgagatcacaccactgcactccagcttgggcaacagtaagactccatctcaaaaaaaaaaaaaaaaaaaaaaaaagaattgtggataattctgatgcaattagaaaacaaagcagagcttgacaaccactgggttgggacgtatatcaggaagacatttga

SEQ ID NO: 726255 - DNA, 560 bp, Homo sapiens
agggacatctggacataagggccaactggagggcagggaaggtaattttccttgcattttaaactcagaccacatatcacatcagaatcacctgagggagacgttttcaatgcatattcctgggtttcttctcttggaaatttttattaaatcttgagttgtgctgatttatccatatttatcataagaattttggataattcttactttgagaggcccaggcagtggatcacttgaggtcaggaattcaaaaccagcctggccaacatggtgaaacctcatctctactaaaaatacaaaaattagccaggcatggtggtacatgcctgtagtcccagctacttgggaggctgaggcaggagaatcacttgaatcagggaggcagagatgacagtgagctgagatcacaccactgcactccagcttgggcaacagtaagactccatctcaaaaaaaaaaaaaaaaaaaaaaaaagaattgtggataattctgatgcaattagaaaacaaagcagagcttgacaaccactgggttgggaygtatatcaggaagacatttga

SEQ ID NO: 726256 - DNA, 3802 bp, Homo sapiens
gcctcaaacgtagtaaaattacattttaacatttatacaagaggttgtctagaatatcacaaaagaaaaataacctaaaaataaaaactttcccaaaacaaagactcaaaagcagcccaaaactgttacaacaataaaaataatgccacaatatttgtttctattttaattgaaaaaaggaaaagcagatttagttattactctaaatagatactttattgttgatttttctagatttaatagattcaatagtttgaacttaaaaccgtatttctcaattttactctaattttctaacctcaaacttaaaacacatcatttccctctttattttcccaccaaccacacacactagccatgtcattctatttgtatttacctcattctttttcacatactctttgtgtgtgattctgctttaccatcttttagaatatcttttctcaatttttcacctatatcaaatattgttttaatatatagcatattaatagaaaagctaaggtatagtaaggtaaacagatcggaagacaattgccattgaaaagatactcagaatttccaagagaagggagcatgtcacgccaggggagactacagggaagaactcaggtccatcaggaaacagagagagggaggaattcacgagcaagaccctagactgtggtgtttgcaggaagaaaccaagcagggtaaacaagcttaggaccggctcgtttgaataatttcagtgggctctggggcataagagctgtccctggttctctggtttttggccctagcgtgattaggacagaagcacagtggcctggagtgtgacagccctatagagtatttgtttgggaattggttagtttgtatttgtaaagcccatcttcatgcggagttcaggggagacttcgtagccagaagctgaggcagggtgactccagcatactatccatcttcaagaacaagatgtgtctgaattgctgtatgttataaagtttcgatgtctaatagagcaaatctttcatcctgttggttctctttgatttaatttgcttttttttctctctaagtactgttctcggaataagccaatctgatatgtgtgtcactattccaaggaatgagtagatcacactttatttttctgcttcttgtgaacattaattagttcagttttctgaaattttcaatgctattgtgattttttaaaattaacaatgctactttgcttattgtgtacttgtcaccagaaatgcaagagctaagatgtctctggaaatggaattcctgggtcacagggttggcacatgatcaacattattagataatgttaaattgttgtacaatgtaatcacattaatttgtatgccaatagtagtatataaaagtttgaattgccctacatccaaactcacacaaaaataaatgcagtctaaaaatttataatgtgatgtatatgaaattatattttgggctgggcgcagtggttcgtgcctgtaatcccaacactttgggaggccaaggtgggcggatcaacagaggtgaggagttcaagaccagcctggacaacgtggggaaaccccgtctctactaaaaatacaaaaattagctgggcatggtggtgcgtgcctgtaatcccagctacttgagaggctgaggcaggagaatagcttgaatccaggaggtggatgttgcaatgagctgggatcatgccactgcactccagcctgagtgacagagtgagactccctctcaaaaaaaaaaaaaaaaattgtattttgttgttttatagttttaatttgaattaataataagctttggtaccatttcatatattttaacttttttattatttaaaaagtctgcttatgtattttcctattttaatttttatgtctttttctaaatccttaacagaaattaattgtatcatgaattttaatagattgttatgtacttgcaaatgttgccatgctgtttatgatgatttttcattttaccaatggtgatttagaaggaacagatactcttgatataagtgggaccaaacttacaaatcatcttgctccagtcagtttttgtgctggtttgaaaatttttttcatactctgagattcaggctaaattgcttttaaaattttaaagctttgtgtttcaaatttatattcttgatgagatgtatagagtgagaatgagatacattgtctttttattataaacaatcttgctttagtagctactgaagtttacttttgaaattgtatttcttaaatatttctgttaattatagaaaattgattttgtattctattttatatccattaactttgctcatttagtaattctaataatcctaggcattctccacaatgcattgtaagataatgtatacatttcataggatgacaatttttaggtacacttaatggtatgggactatagattattggaattttctttggtttaaaattggcaaactatttttaaggggaagttgttaacaatcactttctacaatatgtgactctctcttcaaagagtaaatcagagacaaatcttttttttcaaatttctttttttgaaaatcaataataatgaccctattttttagtttgaatggattctcattaatttaaaatgcaaatattttggactaaatgtttgtgtccctcccaccccaaatttaaattttgaagccctaatccccagtattatggttttggagatgtgggcctttggaggtcaaaaggttgagatgaaaccatgaggatggagtcctcatgatggaattagtgaatttattataaaagacacagaagagcactttcttgtatacttcctttgtctctgtctctctgtgtgtttctctatctctcttccctttgggaacacaacaaaaggtatctgtgtgacaagcatgaagaataccctcagcagaaactgactatgtgtatgctgatcgtgtacttcttagcctccaaactatgcggaaaaaattttgttgtacaagacaccaagtttattgcattttgttacggcagcctgagcagtctaacaagaaagcaataaaaagtataagtaattaagatgaaactaaatttatcatccaaattctcaccataaagaaataaccattttcaaaatatgtagaacaagattttacatattttcctaaagtttatagacagagataattgataaagattttatacaaactgactattaagaaatgattgtatttaattataacagaagataaaaataattttgtatagagaaactgattaacgtttatgcatatttgttcttaaagtacattcaaagttaagagaacagattataaaatcataagttagagttcttatagtataggtttcttacaagaagggaagaaagcaaaataaatttaacacaactaaagcagatcttgcagaatgtgattcatatatggacatgagtcagcttcctaaacctgaatctcagtgttatatagatgaacccactcagacagaaacaacattgaactagaacagaactcctttgacaggcaatgcacatgtttttaggagagcagactgtaagctttctctgagcctcagagaggcagaaggtaagaatgattctgggttatgcatcctcaagtttttgtttaaactctctgaataagtacctcattccattttgccggggcaaagtgagtggatggggaaagyaggccaagggcattatgtgaatgggtcacttcaaagggaaaaacatatctgaaacatggtagaagcaccccataactactttttcatgcctttggcct

SEQ ID NO: 726257 - DNA, 1725 bp, Homo sapiens
tagtctaaatgctaacatatctttttgataagattgtaaaatgtcactgaaggttctgattgtttttcctacatctaatttatctgtatatattttgattcatgttttaactccattagttcagtgcttattcacagaatgtgcttattcactttgcttattcactttttacctatccctaatgcttacattttaaaatcaacgtgtaaacacaattttaaaaatcaatgtgtaagctgaactttaaaatgtttaaaattcagttgggaatgaattagggataggtacaaataagaaaaaaatcaagttattaatcaaaggaaaaataaaaattatacaaagcaatgtaaccatattgtattacatggcttagctacaacttatttatatgattcaacaatgtaaaacttgaacatagatttaaaccaaaaattattgcatgaatgtagaaagagaaggtgagaggagaggagaacaggctggtaagagctaaatccttatcttttatagtaagacatcaatagatattmcaatatgtgcaacttaaaacatagcatatgcatatcacaaacatgaaggcaaatatcctaaatatctaaaagaattaaaaatggttgcctctggagagaagagtagtgcagaagcctgttgctttttgcttatgaaccttgtagaactatttgactttttaaaaccatgtactcatattaactgatcaaattaaaaaattaaccttaatttgtgtttaactgctttcaagtctatacagatctcaaaattgggcataaaataggttctaaacaatgccatggaaaattactatcctaacaatttagtactgttgatagcataacttgaaaaaatattatttttcccaaaacagttactgatacaattgtgaacagaactttcacttcccactcccagtccaccactgcaggttggaaagcagttactgctgttgttacctgacattttctgagtttgatatctgtgataattttgccacttggcaaccggcaacatatgactgacttggtgaactaacaggtagaataggtcatctggagaaaaaaatcttagtaataagcagcatgtaatgttcaaaaggaaaaatatgaaattaatcatcaagtaattagagaaaagatttacaaaaaataagggctgatgaatacacatttctgtgcagattccagtctatacaaagtaacgaggtagtaatttatcattcaaaaactattagagatttttgtcttattttagccactccattccaatcaaaaggctacagacattcctaaaaggacctacgaccagagttaagaatgtcaacaccatttgacagggcacaaatgtttccaaacatacagttcatattaatactaggaagtgtgagggtagaatataaggtagaattgcagaatgtttacacattgattcaaaggtttgtttttttaacggaaaccacttaaaacaactccatcaaattttgctgaaaaactgtgacctaaactggtattgctccatactattgcatttaactttggagatactcagatcataaggataaatgctctgaagaaattccttttggcagctggtaatcaaatctaacctttcagaaaacatactttatgtataaaaagaaggctgttttatgaaagcttacaaaagaagaaactgcctgaaccacactcccatcatattcggccatgtgttctc

SEQ ID NO: 726258 - DNA, 607 bp, Homo sapiens
ttataaaatataaaaacattagatttaaaaaattaaaatgttttttaactaaaaaaacctaaagcctttcttgttttgtaaaattctaaaatagtttcrttcagtattcaggcattaatatgcaaatcaactcgttgtttaaaatatgcctttcagatacctattttcatcttgctgcaatctgaattagacatgtgccagaggtaccacatattcttaagaatggaattcctaacatggaatagactattaagcctacattctgttaaaccttgtcttctaaatatgatacagcaagaatttgaacataagaataattctttgcactagcactgagcattgctctagaggctgtgatgaacaataaataaacacgaaattagcagcttttccataatgactatttgtcattgtatggggatatttttcagatgtaattttttatttgaatggagcaatttgtacatgaaacaaaaaagtcttctgaataaatacataggttgttgttttgatcaaagttatctcctcttaatgcatgtgttttttagacaggaaaagaatgtatgaagaaagtaaaattccgcaattttataattttatggttgca

SEQ ID NO: 726259 - DNA, 607 bp, Homo sapiens
ttataaaatataaaaacattagatttaaaaaattaaaatgttttttaactaaaaaaacctaaagcctttcttgttttgtaaaattctaaaatagtttcgttcagtattcaggcattaatatgcaaatcaactcgttgtttaaaatatgcctttcagatacctrttttcatcttgctgcaatctgaattagacatgtgccagaggtaccacatattcttaagaatggaattcctaacatggaatagactattaagcctacattctgttaaaccttgtcttctaaatatgatacagcaagaatttgaacataagaataattctttgcactagcactgagcattgctctagaggctgtgatgaacaataaataaacacgaaattagcagcttttccataatgactatttgtcattgtatggggatatttttcagatgtaattttttatttgaatggagcaatttgtacatgaaacaaaaaagtcttctgaataaatacataggttgttgttttgatcaaagttatctcctcttaatgcatgtgttttttagacaggaaaagaatgtatgaagaaagtaaaattccgcaattttataattttatggttgca

SEQ ID NO: 726260 - DNA, 607 bp, Homo sapiens
ttataaaatataaaaacattagatttaaaaaattaaaatgttttttaactaaaaaaacctaaagcctttcttgttttgtaaaattctaaaatagtttcgttcagtattcaggcattaatatgcaaatcaactcgttgtttaaaatatgcctttcagatacctattttcatcttgctgcaatctgaattagacatgtgccagaggtaccacatattcttaagaatggaattcctaacatggaatagactattaagcctacattctgttaaaccttgtcttctaaatatgatacagcaagaawttgaacataagaataattctttgcactagcactgagcattgctctagaggctgtgatgaacaataaataaacacgaaattagcagcttttccataatgactatttgtcattgtatggggatatttttcagatgtaattttttatttgaatggagcaatttgtacatgaaacaaaaaagtcttctgaataaatacataggttgttgttttgatcaaagttatctcctcttaatgcatgtgttttttagacaggaaaagaatgtatgaagaaagtaaaattccgcaattttataattttatggttgca

SEQ ID NO: 726261 - DNA, 607 bp, Homo sapiens
ttataaaatataaaaacattagatttaaaaaattaaaatgttttttaactaaaaaaacctaaagcctttcttgttttgtaaaattctaaaatagtttcgttcagtattcaggcattaatatgcaaatcaactcgttgtttaaaatatgcctttcagatacctattttcatcttgctgcaatctgaattagacatgtgccagaggtaccacatattcttaagaatggaattcctaacatggaatagactattaagcctacattctgttaaaccttgtcttctaaatatgatacagcaagaatttgaacataagaataattctttgcactagcactgagcattgctctagaggctgtgatgaacaataaatwaacacgaaattagcagcttttccataatgactatttgtcattgtatggggatatttttcagatgtaattttttatttgaatggagcaatttgtacatgaaacaaaaaagtcttctgaataaatacataggttgttgttttgatcaaagttatctcctcttaatgcatgtgttttttagacaggaaaagaatgtatgaagaaagtaaaattccgcaattttataattttatggttgca

SEQ ID NO: 726262 - DNA, 607 bp, Homo sapiens
ttataaaatataaaaacattagatttaaaaaattaaaatgttttttaactaaaaaaacctaaagcctttcttgttttgtaaaattctaaaatagtttcgttcagtattcaggcattaatatgcaaatcaactcgttgtttaaaatatgcctttcagatacctattttcatcttgctgcaatctgaattagacatgtgccagaggtaccacatattcttaagaatggaattcctaacatggaatagactattaagcctacattctgttaaaccttgtcttctaaatatgatacagcaagaatttgaacataagaataattctttgcactagcactgagcattgctctagaggctgtgatgaacaataaataaacacgaaattagcagcttttccataatgactmtttgtcattgtatggggatatttttcagatgtaattttttatttgaatggagcaatttgtacatgaaacaaaaaagtcttctgaataaatacataggttgttgttttgatcaaagttatctcctcttaatgcatgtgttttttagacaggaaaagaatgtatgaagaaagtaaaattccgcaattttataattttatggttgca

SEQ ID NO: 726263 - DNA, 599 bp, Homo sapiens
taatcaggaatatataccagaattacttttggagtttgttataagaaagacatatgtaaattcttatcatagatatgaatattctgattcagtaaatatagcatgcctgagacctaagcatttacataatgaaaatgtttcctagaattttgttttcgtaacttgattgacacaattcaaaaaactgtatgaagaaaaattaaatatgtattaattgtacatattatgggggggggtgtgtgtgtccctgtaaaattatcttttaaaaaagagaacaaagtaatagagtttactaccaaccatttttcactaaaataaatataaatcaaaataaatctttccaaattgaatgtctaaaatccaagaaaaaatgatgggcaaaaatactggtgaatatttgagtacatctaagtaaatacatacatacatacacacacacacacacacacacacacacacacacacasacacacagtcaaataactgtatcctttaaaatacatcactgagctagcaagacaaaaaagtccacagaggtcaaagaataaaaaagcaaaaattgtagaagttgttcagtaaatgccaaagtcagcattacc

SEQ ID NO: 726264 - DNA, 3097 bp, Homo sapiens
acttttagacatatacatcaaaagaaaaatgatttgtgtcattgccattcatatttcatctttttgtttcctatgtccagcttacattggatcctttccatgtctccctttccccacacagaaatacacaagcattccccattgggaagaaatccacacatgtgatccttattaaaaatataagaaaagcaaaaaccagagtagccagaacccgactatgaattccttgctaggaaaagaggggcatgtggcttttgctggtggagggaaaagaggctttgaaacaggaagttttagggattagaattagaaaaagacaccataaagcaaccatgatgctggttcattgaaactgtattttagttttgttatttatacacacttaccctaggagttgaataatgacaacattttactactgtatattaaaactattattgccacatgtcatgggcttcccaacatgctttcctgcatacacatgtaaacaagaaacacatgcagcagaactctgcgaccacggttgtgctacaaacagaagctgctgtgataaactgactgggtgatgttcagtgacctaaattgaggcttagaataagtgtgggcgcgtgcctgccttcatcaaatgaaaagtaggccaaatatacatgtttgcttttttttcccaccacagctgcaaaacctctttgtgtgtgtgtatgtgtgtgtgtgttggactagaaaaataaatatgccattaacctgaaaaagaagtgaaccacaaggtgggtttccatcaaaatagacataaaatagattacatattaaactccagattgggacatagtttgtgttcctattcaattcccaataatatattagagtttgcaataaataataaattccctgaggatacatagcattgtgtctttttttttttttacgataattaaggcaagggtgaaaacaaagacttttgtctcataaaattgtgccttctaagattaccacccaaatataaaataaatcctaagctagcaaactatgttattttcttctcaattgtaagcattttctgtgggtttgtgtggaaatagtgcctatgaagatcatcatcaatatccagaactgtctaaacaaaagcagccaaattactcttttactctaaaatatggttggatgtaatacaatgccacttactactaggcatcattgaaatcattaaacatgaagtggaaatagccttttgctaacgtttccgaaatgagagctaaattgttgtatgctgcgaagttgaaaggaggtatttgctgtctgacacctgaaaaaaggacctaaacaggcaacttccattaccaccagaggcaaatggcgagaatgcctgcctgttaactgagagcatttctcttaatgttttaaattaaccaaagaattcacaacacagagaatttcagcactatgcacacacaaaaaagatccctagggaataaatgtgtgtttttgaaaagattttctgtgtagggaaatgaaatactaaatgcatagtgaccctatgaccctgcaagcaagagggacctgtggaatcacttagaccaaccctgtcattttacaagtgaagaaactgaggccaggaaaaggtcagtgaaggatgccagggccacatagtgaatccatgtcttatgaccacattcacgggatctttctgctatgcctagatgtctgagccagcagagtagaaaaaagcgattatacagccaaattttatgtaaaactcaattttatcccaaatcatatatagcactttttttcttttcttttctttttttggccagaattacctagagtcagtttctgttttacaaacagacaaatgacccacttttatattttaataattatgccttatttcaaatgataataaattcgctttttgtaaatttggtatttgtggcaagtgacaagtgtaatatgataccacactgcatctcaaacacccatgcctactgaaattgttgcctaattttctatgtatgtagcttcctgtcacttgactttacattgccagcactgcagccactgtggttgccttcccagcatgcagcccatacaggtctgggcacagatagagactctcatcccccaaggccattataatctcagtctgttctcttctttagtaatctcyctttcacatttcctacagttactttcccagcctcaggccactctcctcaaggccctcatctcatcccagtcactacgcgaaggggtttagactctcactccaccaactccaactttcatcccaaatttgtcttcatacacacctctcttcgctctattaaatatatttttacttgtatttgtttttctcagagtaccttatggaattctctgttctcatgcgccatcccccaaaagagtagctctcttttggcacaaaatttcacatttttgataagacagtctaataaattatgggctctggtgaaccaatatgttagcaatttctggggcactttttgtactctctcaagaacttctgaacacagtgtcttaaaacagatgaataaatctcactaaggatatttcagaggaaagatcaatggagggatatagttttggcagtggaacttagcagtccacctcatattataccacaatgcatcagatactccatcttgatgtagggttgttattccatgcagctatttgtgatgaggacagtcattttgggcaaacaagttataaaatatcttgcagcttctttttttttttttttttttttttttgagacggagtctcgctctgtcgcccaggccggactgcggactgcagtggcgcaatctcggctcactgcaagctccgcttcccgggttcacgccattctcctgcctcagcctcccgagtagctgggactacaggtgcccgccaccgcgcccggctaattttttgtatttttagtagagacggggtttcaccttgttagccaggatggtctcgatctcctgacctcatgatccacccgcctcggcctcccaaagtgctgggattacaggcgtgagccaccgcgcccggcctgcagcttcttattttaaatcatgtttctacatttaac

SEQ ID NO: 726265 - DNA, 3097 bp, Homo sapiens
acttttagacatatacatcaaaagaaaaatgatttgtgtcattgccattcatatttcatctttttgtttcctatgtccagcttacattggatcctttccatgtctccctttccccacacagaaatacacaagcattccccattgggaagaaatccacacatgtgatccttattaaaaatataagaaaagcaaaaaccagagtagccagaacccgactatgaattccttgctaggaaaagaggggcatgtggcttttgctggtggagggaaaagaggctttgaaacaggaagttttagggattagaattagaaaaagacaccataaagcaaccatgatgctggttcattgaaactgtattttagttttgttatttatacacacttaccctaggagttgaataatgacaacattttactactgtatattaaaactattattgccacatgtcatgggcttcccaacatgctttcctgcatacacatgtaaacaagaaacacatgcagcagaactctgcgaccacggttgtgctacaaacagaagctgctgtgataaactgactgggtgatgttcagtgacctaaattgaggcttagaataagtgtgggcgcgtgcctgccttcatcaaatgaaaagtaggccaaatatacatgtttgcttttttttcccaccacagctgcaaaacctctttgtgtgtgtgtatgtgtgtgtgtgttggactagaaaaataaatatgccattaacctgaaaaagaagtgaaccacaaggtgggtttccatcaaaatagacataaaatagattacatattaaactccagattgggacatagtttgtgttcctattcaattcccaataatatattagagtttgcaataaataataaattccctgaggatacatagcattgtgtctttttttttttttacgataattaaggcaagggtgaaaacaaagacttttgtctcataaaattgtgccttctaagattaccacccaaatataaaataaatcctaagctagcaaactatgttattttcttctcaattgtaagcattttctgtgggtttgtgtggaaatagtgcctatgaagatcatcatcaatatccagaactgtctaaacaaaagcagccaaattactcttttactctaaaatatggttggatgtaatacaatgccacttactactaggcatcattgaaatcattaaacatgaagtggaaatagccttttgctaacgtttccgaaatgagagctaaattgttgtatgctgcgaagttgaaaggaggtatttgctgtctgacacctgaaaaaaggacctaaacaggcaacttccattaccaccagaggcaaatggcgagaatgcctgcctgttaactgagagcatttctcttaatgttttaaattaaccaaagaattcacaacacagagaatttcagcactatgcacacacaaaaaagatccctagggaataaatgtgtgtttttgaaaagattttctgtgtagggaaatgaaatactaaatgcatagtgaccctatgaccctgcaagcaagagggacctgtggaatcacttagaccaaccctgtcattttacaagtgaagaaactgaggccaggaaaaggtcagtgaaggatgccagggccacatagtgaatccatgtcttatgaccacattcacgggatctttctgctatgcctagatgtctgagccagcagagtagaaaaaagcgattatacagccaaattttatgtaaaactcaattttatcccaaatcatatatagcactttttttcttttcttttctttttttggccagaattacctagagtcagtttctgttttacaaacagacaaatgacccacttttatattttaataattatgccttatttcaaatgataataaattcgctttttgtaaatttggtatttgtggcaagtgacaagtgtaatatgataccacactgcatctcaaacacccatgcctactgaaattgttgcctaattttctatgtatgtagcttcctgtcacttgactttacattgccagcactgcagccactgtggttgccttcccagcatgcagcccatacaggtctgggcacagatagagactctcatcccccaaggccattataatctcagtctgttctcttctttagtaatctccctttcacatttcctacagttactttcccagcctcaggccactctcctcaaggccctcatctcatcccagtcactacgcgaaggggtttagactctcactccaccaactccaactttcatcccaaatttgtcttcatacacacctctcttcgctctattaaatatatttttacttgtatttgtttttctcagagtaccttatggaattctctgttctcatgcgccatcccccaaaagagtagctctcttttggcacaaaatttcacatttttgataagacagtctaataaattatgggctctggtgaaccaatatgttagcaatttctggggcactttttgtactctctcaagaacttctgaacacagtgtcttaaaacagatgaataaatctcactaaggatatttcagaggaaagatcaatggagggatatagttttggcagtggaacttagcagtccacctcatattataccacaatgcatcagatactccatcttgatgtagggttgttattccatgcagctatttgtgatgaggacagtcattttgggcaaacaagttataaaatatcttgcagcttctttttttttttttttttttttttttgagacggagtctcgctctgtcgcccaggccggactgcggactgcagtggcgcaatctcggctcactgcaagctccgcttcccgggttcacgccattctcctgcctcagcctcccgagtagctgggactacaggygcccgccaccgcgcccggctaattttttgtatttttagtagagacggggtttcaccttgttagccaggatggtctcgatctcctgacctcatgatccacccgcctcggcctcccaaagtgctgggattacaggcgtgagccaccgcgcccggcctgcagcttcttattttaaatcatgtttctacatttaac

SEQ ID NO: 726266 - DNA, 2169 bp, Homo sapiens
ctgtggttatgaactggggagtacatgacatattgctgcctcggacttcattgaatgaatacactgtgatgttgtacttggtgtcacactctagagccgaaagggtgcacgcaggagtagtgtcattgcactcaaccatgttgtacccatctacagccttggtttcatacagttcggcaccacggacaggagaccagacaatctcaactctgtcactggacaccaacacggggttaatgtcactaggacaacagggagctgaaagcaggagcagagggaaaatggcggtcccatcaagagcaatgcagctgggggtacactgtgtcctgacctcccatgcccagagcctctgccactgccctccctgatgactacagtgactccctatgggtctgtcaaggtccaatcttggcctaattgccactgcatagagggtaaatcctcagcatgacattgaaggtcattgcaagctataaggttctgctgtactccccccactccctkccacaccagactcctcaattcccccacgccacgtgcgcccttgttctctatgcagagaagattgctgacccctccactggaaagccattcccctcttctgcctggtaaaatcatatgcagtctaacttctcagatcctgtcagcctttccagacagtaaaccaaataaaactggggggtagggctcacagttatataagtagtttttttgttgttgttgttgttttgttttttcaaagagacagggtcttgctctgccacccaggctggagtgcagtggtgtgatctcagctcacagcaacctctgcttcctgggttcaagtgattttcaggtcttagcctctggagtagctggaattacaggcacatgccaccacgtccagctaatttttgcatttttagcagagacagagtttctccatgttgcccaggctggtctcaactcctgacctcaagtgatctgcctgcctcggcttcccaaagtgttgggattacaggcgtgaaccactgtgcccggccgtatataggtaggtcttaagagaccctaaagaaccccactggcaaatgtctgactcagcttggagtttccctgggatgctcttgccccacctacattcccattcatccttcaagatccagttcaaggccactctggagggccctctcgtgtcgggaccttatcgatagcctctttttccacattccaaaggcaccaatgatttagatccctcatcctgtcaaaatttactgtaattcagctagacttttacataattatgtttgagtattcttatttgtaatgtagttatttaatttcaaatcactccactcattcttcaaaacttgagcatctcccatatgctgatcacactattataagcactgaggatgaagagataaataagacataattcctgccttgtacaagatgcaagcctagtagaggagaataatagcaacagcaacggtgatgctaataataaaaatatgtgcatcatgctttgtcacacacaagacctttttacattcatgttttcatgatttgtcccattttgcagtggaggatactaaggaactagcaaggtgggcatcattatcctcactgaaggaatgaattagtggtcaagttagggtgtaaacccaggtgtcctactccaaagccctccacaccatgtagcgtcttggccattgtatgtctgtcttggtctcagggaaagagtgacctcctgaaacggaggcactgccttctctctggcagcagcacatgctagaacactcactgagtacatctttgtggcgagttcaatctttcagagcaaggttgaacaactacattctttctcctcttttcactcccaaaccttgcagtctagttatgcttaggtccacaaagccaaaattccctagtctggaaagaatgtgagataagagattactttctgttcttggctctagaatgactcccaggtggtaagtcaataagtggaataggtgatccattctgctgctgaggttagagatctcagaactcccttaacaaacatcaaatgggacttacctgtggtataactgaatatgtcacccaaaggactttgccctgccttgttataggcaaaaacactaataaaataagtgaagccacactcagataagaagttgcactgag

SEQ ID NO: 726267 - DNA, 2676 bp, Homo sapiens
ttgtggtatagtcatacaataaaatcctatgtagctataaaactaaacaaaccacagtcacacattacagataaaatattagaatttacagaaaaaatattaygattaaaaagtggatgaatcataacaatgttcaacaaaagcagccagatactgaataagctatactgaataaattaataaaaattccaaaaactaaactgtagtgttgaaggatacatatttagatagtaaaaccataagaaaagcaaagaaatgattaccatgtaagtcaagagagtggctctctgaggaagagggaggaataataattgtaaggaggcactaaaaattttgaggcgctggcagttagcaatttcttgacctggtggtggttacccagctgttctctctgtgataaatcactgattaatatgcattgttttgtatatactttagttttatgtttttaaattattatacaattagggccaggcatggtggctcatacctgtaatcaatctcagcactttgggaagctgaggtggtaggatcactgagcccaggagttcgagaccagcttgagcaacacagtgagaccctgtctccacaaaaaaatcagaaaattagccgggcacggtggcatgcacctgtggtcacagctactcatgaggctgaggcgggaggatcacttgagcctgggaggtcgaggctgcagtgagctgtgattgtgccagtgcacaccagcctgagcaacagaatgagatcctgtctcaaaacaaacaaaacaacaacaacaaacaacaacaaaatacaattagaagggttaaaaaagaaaacaaaaatcaaacaacgtaaaaatcaaaatctgatgtgtgctggatcagattatttctcggggcattagttattccctgataggaagctaaaggctttaaatgatattaactatttggggtgatgggagaagccacagccagggagtttaatatgtagaggcatactatgttatactgtagacatatccatgttaatataataggaaagctaagatagaaaatttgaaagatgtaagcaaagttaaaaagcaaatcactcacgaggtgtaagaggataatttaatacattttaaagtttaaattatgtatttaccatccaactcctaacaatattgcatttcctaataccttggcaaacaacaggaaggaaaagtatggaaaaataaccatgatatgatttataaattaatttcctgggtattatctttatatttctaaaaccaaagtcaggctaacaataaaaatgtttccatttaagcagatttaaaggaaaaactaataattctttcaggtgcctatgttcagaactcttcaaatgaacatcctttttttaagttcccatttatcatttaaaatgctactgtgtttagttaggtactatttcaagaaaatctacagagctagatgcattaagaaactacctgcagtctattcactttttgcgcttctttcaaagatacagcatgccctttgttttcctgtaccatcatctgcacttgattcttcagttccttcacctccagttccttctgattaaatactacttcatcagcagcaagcacacactagtggggaaagaaagcacaagtgacattcaccacagaaaataatcaagaaaccccatatgataacacaaaaatggtgatttgattatagcttgatgatgtctcataaattttttttcattttcaactttttctgatttctttctaagaaaggcagaaagagttgagagaacctaccattgctataacacaggaattcattaccatgaagacagaagattttcctgatttttacttcctgtatataaaaactagttgttttggttctagagtaccttcactaagatttttacaagtttgctagaactgctatgagattttaatgtggatcactcaaagagctcacattttccaaattgacatatagggttataagaatacattagggcatttgaatgaagcagatttgctgattttgtacactttcattatgaagagatatattttgaagatgtctaaaaatgattaaacagttttactttttggtttctagtaaatttgccgatttttaagtacatttgggatatgtaaataataaagtagtttttaaatgaaataaacagaaaattatttgtcgagagcctcattccacatattggcttggcattttaaaaatctcactaaataagatgttggtgtggatgcggtgatcagggaacacttctacactgctagtgggaatgtaaactagtacagccactatgaacaacagtgtggagattccttgaaggactaaaagtagaactaccatttgatccagcaatcccacactactgggtatctacccagaagaaaagaagtcattatacaaaaaagatacttgcacacgcatgtttacagcagcacaattcgcaattgcaaaattgtggaaccaaaccaaatgcctatcaatcaacgaatggataaagaaactgtgatatatatacacgtatatatatacgtgtatatatatgtatatatcacaactcctatataaaccaactccaacattcaagcttccaattaccagtacttcctgttccaccagtttcttatactaatgaggaaggtcctgctctacctagacagttatt

SEQ ID NO: 726268 - DNA, 1118 bp, Homo sapiens
cctgaatcttgccttatctggtaaaagaatcccaagctacaccttcctgactaaaagaggagaaatgtgtagggtgagaagatccctgggttttaatttttctgaccagaatgagggagcccagtggccctgaccagacttctactgtatcagtcactgtagatcccaccgagagtagcaggaggcagaactggccagaacaatagattatccacatatttactatagacatttgtgcataagaccaggcatacttgcctagtaatccattttctgtctcaaacacaaatttgactcgctctacttgtataggatcttcaataacctgggaaaggaagaaacaaaaattagtaaataaaagaaggaacttgtcatagccacgggtgctttctttataattctacccaagagattaatttagtgtttgacaacaacaacaacaacaacaacaacaacaacaacaacaacaccaccaccaccaatacaggacgggcatggtggctcatgcctgttatctcagcactttgcaaggccaaggcaggaggatcacttgaggccaggagttctgaactagcctgggcaacaaagcaagatcccatctctaaaaaataaaaaagaaattagttgggcacagtgacatgtgcctgtagtcccagctatacagggggctgagccaaaaggatcatttgtgcctaggastttgaggctacagtgagctacgactgtgctcagcctgggcaacagagggagactctgtcttgaaaaaaagaaatcaagccacaccaaaaaacccaatacaaacaaatattacacggctgccacatatctcaaatatatcttaaaactaagagaaaaaactattaagttatacttaaaggtctattcatttcctatctatgtgttgctatcaactagatctatagttctctgtgggttatgaggacatatactttatgatcctaaggataagaggtttatgctctaacttgcttagtaaaaatgtattgaagttttgctatcatagctgtatttctagttcttagtactgaactgtgcatggtataaaaactatatgggtttgttgttgatagatgaacaatacacagtcctatccctaa

SEQ ID NO: 726269 - DNA, 795 bp, Homo sapiens
tcaaatgaaatcctatggtgcttaccagagtacctcctctttaatggctcctgatctccaattcttgtcatctcagccctgtaagctctcttcagcttttgggcttctcagttgctgattaggaatcagcaaaaacattaaaggaaaagcaataccaaatgatgggttcacctctctgtacttcctttctctttgggattggtcctttgagttcacgttttcttagaaactttccagygccttcaaactggtatttcctgtattcttcccagcttttctagttgttctcagtaggagggatggtcttaagcaagctgatctgtattgctggctcacagtggccaggggagtagaaagagctcaaagagaagtgactggttgggtcccaggacttctagtctcagaaaatccctcagtctctagcagggcagggcagaggagccccagaaccacctttcctcaaagtactttagcctatgcaagcttagactgttgtcctttcactgttaaccagtattaaccagttaaccagttcttctgcagacaaaagcatcaggaagtacccaccatgtaccagtgggcccttcttgatgctcttgattgcagaggagccctgcaacctgaataaatcctcctggaaggtaagtgggggagccctaattaaaactgtaattcaatgtctcgatattttggcaaatgaaggttcaggtgagttttaattagtttcagaaaaagcaaagtaaaatgatatttaatgtactggattttgatggatacaaatctatatccattata

SEQ ID NO: 726270 - DNA, 795 bp, Homo sapiens
tcaaatgaaatcctatggtgcttaccagagtacctcctctttaatggctcctgatctccaattcttgtcatctcagccctgtaagctctcttcagcttttgggcttctcagttgctgattaggaatcagcaaaaacattaaaggaaaagcaataccaaatgatgggttcacctctctgtacttcctttctctttgggattggtcctttgagttcacgttttcttagaaactttccagtgccttcaaactggtatttcctgtattcttcccagcttttctagttgttctcagtaggagggatggtcttaagcaagctgatctgtattgctggctcacagtggccaggggagtagaaagagctcaaagagaagtgactggttgggtcccaggacttctagtctcagaaaatccctcagtctctagcagggcagggcagaggagccccagaaccacctttcctcaaagtactttagcctatgcaagcttagactgttgtcctttcactgttaaccagtattaaccagttaaccagttcttctgcagacaaaagcatcaggaagtacccaccatgtaccagtgggcccttcttgatgctcttgattgcagaggagccctgcaacctgaataaatcctcctggaaggtaagtgggggagccmtaattaaaactgtaattcaatgtctcgatattttggcaaatgaaggttcaggtgagttttaattagtttcagaaaaagcaaagtaaaatgatatttaatgtactggattttgatggatacaaatctatatccattata

SEQ ID NO: 726271 - DNA, 795 bp, Homo sapiens
tcaaatgaaatcctatggtgcttaccagagtacctcctctttaatggctcctgatctccaattcttgtcatctcagccctgtaagctctcttcagcttttgggcttctcagttgctgattaggaatcagcaaaaacattaaaggaaaagcaataccaaatgatgggttcacctctctgtacttcctttctctttgggattggtcctttgagttcacgttttcttagaaactttccagtgccttcaaactggtatttcctgtattcttcccagcttttctagttgttctcagtaggagggatggtcttaagcaagctgatctgtattgctggctcacagtggccaggggagtagaaagagctcaaagagaagtgactggttgggtcccaggacttctagtctcagaaaatccctcagtctctagcagggcagggcagaggagccccagaaccacctttcctcaaagtactttagcctatgcaagcttagactgttgtcctttcactgttaaccagtattaaccagttaaccagttcttctgcagacaaaagcatcaggaagtacccaccatgtaccagtgggcccttcttgatgctcttgattgcagaggagccctgcaacctgaataaatcctcctggaaggtaagtgggggagccctaattaaawctgtaattcaatgtctcgatattttggcaaatgaaggttcaggtgagttttaattagtttcagaaaaagcaaagtaaaatgatatttaatgtactggattttgatggatacaaatctatatccattata

SEQ ID NO: 726272 - DNA, 662 bp, Homo sapiens
tttgtaaccttgggttaatagtttatacctcacagacaatactgtaggctaaaaagagctaacagacatgaaagtgctttataagctctatccaggcctgggctggataggtacatagttgatattcatgaatatctattgataccaatattaaaatttaagatttgctttccaaatgaagtagaggggttcttatacttaagaaaaacctaacaaaatataatcccaaaaacagacacactgaaatagtacccacacacatgtcacctcacatattggctgrgctctactcaaaccacttgagactgggctgactcagaagcctgtttaggcagaggcattcaaatcatttcccactgaggttatgtccctcccagtaggggtcgctctgggttggtcttgatctagagggttttaggatacacttagaagaatttaacaccactggaatgaatggccaggaagcagttggaaggaatattaaataggacactggtttctgagcaggtaagaagagctgatgtatttttactctttatttgagtatttatctgttgatggtaccagttagcaacatttgataattgagccaggtgtcaggagaccttagttatgttgctgaatttctgtgtgtatttttgtgtatcacattatgactacaa

SEQ ID NO: 726273 - DNA, 618 bp, Homo sapiens
gaatggaagcaattcttaaaatgggtttctgagctattttatggctgcataaaagttgggagcattaacattttttccctgaggttaatttttacatgagataaatcaaggactttttatggtttccatgcagcttgctgttgccattgtctttggctgcctgtgctgtggcagatggaggagctgtgaaattttaaattgartacttcggtttgcttttattacattctttgggttcatgatcatcttcagagctaactggtggcatatttatgggcattttttggagaagttgttttataaatggagatatttaaactggtgcttaggaggtcagcttctttatctcgatgtctttatatccatgtctattgggtacttatatagacctttataagtgtagctttcttgctgtatctctgtgcatatgaatgtctgtctgtatatgcctatctatgcatctttgcccatggcacacctgttaaaacaacacttctttggtgcatgtgtggatgtccctgagcatgaactacaacgtgaattttttaactgtctattctgtgtgcttgtgtctatctatctatcatctatttatctatctatctgtctatgcttttt

SEQ ID NO: 726274 - DNA, 616 bp, Homo sapiens
cagcttttgaagtcaggccctgcttaggcttccagatccttcgtgagggctcacactggcttctccttgaggccggagcacgtctgggctgagcagtgcatgcgcgcgygcggacacacacacacacacacacacacacacacacacacacacacggggaaggacagatgccatgggggaaggaggcctccaagaggagaaaggcaaacacccgcagattagaatcaagagcctggagcctcaagctggtcagatcccctgcgagacttccctcccacaggactgggtcccagcccctgcccacaggtccctatccacccctcagtcccaccaggcctgccttttctgagcttctccagagagctgggcaagccactgcctcttttagcttcccctccctcctttgatcatgtaacaggaacaagggaaaagtaaaaataccccatgagtgaaaggagccactgagagcagaggcagggtgtggtggggtgggttggggtgggggccaggcggatgctcccttcccccgcagggcctgcttccttctgcagagggaagagctgggggcacatagaaggggtccttctttaaagtccttgcccagttttcagacact

SEQ ID NO: 726275 - DNA, 781 bp, Homo sapiens
ctctagggtatcttctgatttttgcacatgaaggcaagacacatttctttatggaaaagagatgtaaatctatcattcctctccagttaccwgcaactaattccttcattcacaacgtatgtcccacaaatgtgtctttgaaataggcctaatcataaatgtgattgcttatgtattaactgtttatgtacatttaaatatattaaaatatgaatacctataggtgtgtgttttacctactaagatgatctatctttgctctcgtccatctgtctgtctgtccatgcatttattcctttctctacctctgtctgtcgtctttgtttgcccacgtctcagtacatgtaataggaagactgtgagtcttaactgtgtccgctctgaaaccacgagtatattttggcccttgtcctttcatgcttttgctcttatacatttcttgcaaatgattttactgtggagatgtcgcatttactctcccatctggggtctcagtgtaacttgttttactctcagatattccagacacagaaagggagtacactacattttttcccctatcctttctcctcctcctcatccttcttcttctcacatattattggcaagagaggaaagatttactccaacattttttatattaaagcatatattatcagcatatcaaatggttaacttggccactccagtgtttgttgcacatatagaattcatatccaaggacaggatctagccatctaagggatcctgtagctcactgtctgtgtgagggcaatccaca

SEQ ID NO: 726276 - DNA, 871 bp, Homo sapiens
cactgagaaccgctaaggaaggccaaggagggccaaggatcatcaaagatggccaaagaggaccaaggatggccaaggatcgccaaggatggtagaggatcactgagaatcgccaaggaagtccaaggagggccaaggatggccagcaacaccagacctggagaggctggggacagagtctccctcagagcctcagaaggagccaaccctgacctcccctggatctcaggcttcgggtctgtagaactgtgagagcacacagtgtgtggtttgaagccacctagtttctggtactttgttacagcagctccaggaaataaacacagtccctgagagccgcccagggcacccctgctgggacacccatctggccrgtggtcagggcttcaggtgggaccatctagtgggacttgtgtgtgcctctactctgggggcatggccagccctcagcctctgccacaaggactcggtccattcccaggaagggcatcccctgcgttcatctcccagagagagctgatgctcaggcctgagctggctctctgcagctgtgcgtaccctggggccggctaacacctcctgggagcccggccacctaccccagctgagcagcttacccaagtcactcctccctggcaggctgctcattagaagaggggctgcagctcacaggcatgagagatttccttggggacactccctgtgtccctcagaaggacctgggggtttgggggtcacccctccaaaggacgcattttcagtaattaaagaggcagtggggcctggaagaggctgagccagctctgggctgggggagaggtggttggcggagttcagaggccacatgtaggggccagaaactgtgcgctac

SEQ ID NO: 726277 - DNA, 2337 bp, Homo sapiens
gatcacagggtccacacttcctgcaaatgccgcttccctgaaggacacgggagaagcatagagcaggaacagtcactgaaagaatccatctaaatggcgctgtttcaccaaattttccgaagagtccgcaccggccaatgaggcagccactcggggggcctcctagagcctccggggcctctgaccagcctgctgaaggccttggcctttttggcacaaagtccctgtcctgcaggcagcgaaccaggcaagagataccttcacttccgtccctgccacctcggggctgaggagccccctaagctccctggatccttgacctccacggctggtccacaccaccaccagaacaggcatccagacccacaggctgatcaggggagaagacgcggagtctccttccactccagaaggcaccgtgtccccagagctggtcgctgcttcatggatttctctatttcaagcttgcgagtggcccctggaggcccttctcactctcaagccaggcctcccgggcggcactttccgcctgcatcctgaacaccgtgcgttcctcggggtgcccggggtgcccggggtccccggccccttacatcacagtagtctggtttttcctgtaatatcttggggtcatacatgagatttcatttgaaaaaaaagaaaaggatcccatggctgtgaaaaatgtgtgtgaagaccacgtcacggaacattcccgcgtagcctgtgcaagccattgaaagtgattcaaggctctcgactttacagaaacaattttgcattaagaaatgcacagagcaaactccagggaggtcccgcaggccccggctggctgccaggggctctccctcatttgccgtccccttggctgtggagcagaatctccatcgagcagttgctccgctggacaagctcgttctggatggggacatgaatctacgctactaccaggacttccgtggccttcagttagagccaaaaatgtttaaaataactttttctgattgaaaaaaaaatacagagatgaagcaaaagaataatcataaacataagagcagaacttaaaaaaatttttttctttcttccagatgaaagtgaaattggagtgaaggaaaattgggcttgaggcgcatagaaggacggtctttccgtccccttctggggctcagatttgcagagtgtgtccttagtcgtccgttgggaagctgacgggcaggggcaccgcggggctgggccagggctgtgcttttgtgagatgcaaactatagtaatgaagggcccagattttttttatttaagaaataaatgtttattagaacttttgaactaaacttaagcggtaaagtgggtatctttatgtgtctagctttttaaaaaacaaacgtgtaatctcaaagagaagcctgtctttaaaaaaatcttcattgtattattaatatttcggggaagctttccttttagctacacatgaggtccaaaaggaatggactgctttgcagccaactgtgtttccatggtcaggaccagggggcagaaatcctttttgccaggatggaagaatgatcctgaatcctgatccrttccttccctttaccccaccgtcatcccacagtgccgacttcctccaaagctccgtcctagagtcagaaacatacttggcgctattacccaaaccacagataatgtcaaaactcctcagatacctcctgacctgctagatggctctctccaacaccgcctcaagggattcgttctctctgttttaggtccataggctgaattaaagccacaaacccagagggaactcgaaatgcacatttaagcaaatgcaacaccaaaatggcccaaagcagagagaaattcctccactcggggcacttccgaccccctcaacccccttgtgagaccttcccctccgacagggagaggagccctctgctcttgagagcacccctcataggtagcacagccggtgacgtcgggtgttacagggccaccgacgctcctgcccatgtccccgcaaaggtgcacctccgagctggataagccatgtggctggaatgcccgggaaagcaggagccggccagaggctggaggagactcgccgcccaggcacggggagtgaggtggctgagttggcagcttcttctcctgaaatctcaaccgtgaatttcagttatcaaacgaaaatgagcattgtgtggaatgtattttcctttgaataataataagatttaaacactacaaatatgaaaaactgctctcagaaacccatagactctcataggacatgacttttagcaatgccttttgaaagggatataatagatttcaatc

SEQ ID NO: 726278 - DNA, 2337 bp, Homo sapiens
gatcacagggtccacacttcctgcaaatgccgcttccctgaaggacacgggagaagcatagagcaggaacagtcactgaaagaatccatctaaatggcgctgtttcaccaaattttccgaagagtccgcaccggccaatgaggcagccactcggggggcctcctagagcctccggggcctctgaccagcctgctgaaggccttggcctttttggcacaaagtccctgtcctgcaggcagcgaaccaggcaagagataccttcacttccgtccctgccacctcggggctgaggagccccctaagctccctggatccttgacctccacggctggtccacaccaccaccagaacaggcatccagacccacaggctgatcaggggagaagacgcggagtctccttccactccagaaggcaccgtgtccccagagctggtcgctgcttcatggatttctctatttcaagcttgcgagtggcccctggaggcccttctcactctcaagccaggcctcccgggcggcactttccgcctgcatcctgaacaccgtgcgttcctcggggtgcccggggtgcccggggtccccggccccttacatcacagtagtctggtttttcctgtaatatcttggggtcatacatgagatttcatttgaaaaaaaagaaaaggatcccatggctgtgaaaaatgtgtgtgaagaccacgtcacggaacattcccgcgtagcctgtgcaagccattgaaagtgattcaaggctctcgactttacagaaacaattttgcattaagaaatgcacagagcaaactccagggaggtcccgcaggccccggctggctgccaggggctctccctcatttgccgtccccttggctgtggagcagaatctccatcgagcagttgctccgctggacaagctcgttctggatggggacatgaatctacgctactaccaggacttccgtggccttcagttagagccaaaaatgtttaaaataactttttctgattgaaaaaaaaatacagagatgaagcaaaagaataatcataaacataagagcagaacttaaaaaaatttttttctttcttccagatgaaagtgaaattggagtgaaggaaaattgggcttgaggcgcatagaaggacggtctttccgtccccttctggggctcagatttgcagagtgtgtccttagtcgtccgttgggaagctgacgggcaggggcaccgcggggctgggccagggctgtgcttttgtgagatgcaaactatagtaatgaagggcccagattttttttatttaagaaataaatgtttattagaacttttgaactaaacttaagcggtaaagtgggtatctttatgtgtctagctttttaaaaaacaaacgtgtaatctcaaagagaagcctgtctttaaaaaaatcttcattgtattattaatatttcggggaagctttccttttagctacacatgaggtccaaaaggaatggactgctttgcagccaactgtgtttccatggtcaggaccagggggcagaaatcctttttgccaggatggaagaatgatcctgaatcctgatccgttccttccctttaccccaccgtcatcccacagtgccgacttcctccaaagctccgtcctagagtcagaaacatacttggcgctattacccaaaccacagataatgtcaaaactcctcagatacctcctgacctgctagatggctctctccaacaccgcctcaagggattcgttctctctgttttaggtccataggctgaattaaagscacaaacccagagggaactcgaaatgcacatttaagcaaatgcaacaccaaaatggcccaaagcagagagaaattcctccactcggggcacttccgaccccctcaacccccttgtgagaccttcccctccgacagggagaggagccctctgctcttgagagcacccctcataggtagcacagccggtgacgtcgggtgttacagggccaccgacgctcctgcccatgtccccgcaaaggtgcacctccgagctggataagccatgtggctggaatgcccgggaaagcaggagccggccagaggctggaggagactcgccgcccaggcacggggagtgaggtggctgagttggcagcttcttctcctgaaatctcaaccgtgaatttcagttatcaaacgaaaatgagcattgtgtggaatgtattttcctttgaataataataagatttaaacactacaaatatgaaaaactgctctcagaaacccatagactctcataggacatgacttttagcaatgccttttgaaagggatataatagatttcaatc

SEQ ID NO: 726279 - DNA, 886 bp, Homo sapiens
tcaaacccacaaagtgtacaatacccagagcgagccctcagttgcactgtggactctatgtaacagtgatatgtccatgtaggttcatccattgtaacaaatgcaccctccaggggaggtgctgatggcgggagcatgtccatgtgtgggagctggggaatatatgagaacttcctgtacctttttctcaattttgctgggaattgaaaactgttctaaaagttaaacttttttaaagaaaaggtaatatacatagctatgattgcaccactgaactccagcwtgggcagcagagcaagacaccatacctaaacaaacagaaaaacaagtagaaaacataaagttcattattttatcccttttcagttcttactttcttcatctagtctttactggacaggagacctctaggcaggctggagcagagtttctccggaacaggcgctaacaacacctgcccctgagaaccagtgttctcactacccagggaggttgcctagagggtgaatccgattttagaactgcatggcacctgattagtaatggaacaaaaactggagaaatgccttgagctaccagatcgtacccttaaagcaccatgacttccaggctgtaaatcactggctgaactgctttaggcctctcctgggaaaaactgtcaggaacgctggcctctcctcaatttctccaaagcatgtttgcctgaggtgagatgcagacagaagctacatgtgggtgcaggtggttgggaatcgcacttgcgaatcctctttccattagctagaacgctaccatgacgtgctacaggaatgaccacctaggatacagtacgtgttggcatattccccaaacagcaggaggataaattttcccaacttcataactg

SEQ ID NO: 726280 - DNA, 886 bp, Homo sapiens
tcaaacccacaaagtgtacaatacccagagcgagccctcagttgcactgtggactctatgtaacagtgatatgtccatgtaggttcatccattgtaacaaatgcaccctccaggggaggtgctgatggcgggagcatgtccatgtgtgggagctggggaatatatgagaacttcctgtacctttttctcaattttgctgggaattgaaaactgttctaaaagttaaacttttttaaagaaaaggtaatatacatagctatgattgcaccactgaactccagcttgggcagcagagcaagacaccatacctaaacaaacagaaaaacaagtagaaaacataaagttcattattttatcccttttcagttcttactttcttcatctagtctttactggacaggagacctctaggcaggctggagcagagtttctccggaacaggcgctaacaacacctgcccctgagaaccagtgttctcactacccagggaggttgcctagagggtgaatccgattttagaactgcatggcacctgattagtaatggaacaaaaactggagaaatgccttgagctaccagatcgtacccttaaagcaccatgacttccaggctgtaaatcmctggctgaactgctttaggcctctcctgggaaaaactgtcaggaacgctggcctctcctcaatttctccaaagcatgtttgcctgaggtgagatgcagacagaagctacatgtgggtgcaggtggttgggaatcgcacttgcgaatcctctttccattagctagaacgctaccatgacgtgctacaggaatgaccacctaggatacagtacgtgttggcatattccccaaacagcaggaggataaattttcccaacttcataactg

SEQ ID NO: 726281 - DNA, 886 bp, Homo sapiens
tcaaacccacaaagtgtacaatacccagagcgagccctcagttgcactgtggactctatgtaacagtgatatgtccatgtaggttcatccattgtaacaaatgcaccctccaggggaggtgctgatggcgggagcatgtccatgtgtgggagctggggaatatatgagaacttcctgtacctttttctcaattttgctgggaattgaaaactgttctaaaagttaaacttttttaaagaaaaggtaatatacatagctatgattgcaccactgaactccagcttgggcagcagagcaagacaccatacctaaacaaacagaaaaacaagtagaaaacataaagttcattattttatcccttttcagttcttactttcttcatctagtctttactggacaggagacctctaggcaggctggagcagagtttctccggaacaggcgctaacaacacctgcccctgagaaccagtgttctcactacccagggaggttgcctagagggtgaatccgattttagaactgcatggcacctgattagtaatggaacaaaaactggagaaatgccttgagctaccagatcgtacccttaaagcaccatgacttccaggctgtaaatcactggctgaactgctttaggcctctcctgggaaaaactgtcaggaacgctggcctctcytcaatttctccaaagcatgtttgcctgaggtgagatgcagacagaagctacatgtgggtgcaggtggttgggaatcgcacttgcgaatcctctttccattagctagaacgctaccatgacgtgctacaggaatgaccacctaggatacagtacgtgttggcatattccccaaacagcaggaggataaattttcccaacttcataactg

SEQ ID NO: 726282 - DNA, 1281 bp, Homo sapiens
tgttcaccttagtactgaaaaggtggttgtcctcgttaatttttggttttaattctcctcctccaaattgagaaaaagaaatgaaagagcaaaagattgccttaattgagatggagtgacagtgataaacatatttacccagcattaaatagctgccagtggccaggcgtgatggctcagacctgtaatcccagcactttggaaggctgaggcaggaggactctttgaggccaagagctcaagaccagtctgggcaacatagtgagactctgttctgtctctactaataataaataaataataaataaatcaataawtaattaataattaattttagctggtcatggtgtcatgagcctgtagtcccagctactgggagggtgaggaagtaggacaccttggacccaggagattgagctgagggagtaagatcaactcctgaattccagcttggggacagagcaagaccctgtctcagtaaagaaacaaaagaaaaagctatccctgatttttcttttctgtcatacaaaagtgaagaaatgtttccacaaatgaaaatgcagtttctttcaatgtaagtcagtaagtatttatatagcattaactatactatattcattttgtcaggttccaagtaaaacatttagaaaagaaataaaatataatacaagtcttaagaaactggtgatgaaagacctaacaggtaggttctctcaaataaatacacattttcaaagaatatgcacttaagttatatatatttcattttcaagatgtggcattataaatataactaatgccacatcttgaaaataattataagaacgtttacttgagcttttccatcttggatgtaccccaaatggccaactgccctgctctcccatttggcctttgtcattgatattgctgcaaactgacgtctgtgctgctctcggtccagcagccttcacaccacacagtctcctctttggcaaatgccgccctgctaagcctgaggagaaaggcattcatggtagcaataaatatgttcaatatttcattgcagttactccctaatctttatttgatatattgcctgcgtgtatcaggtccaaatattttgaagtttctgttgaatcaagtttagcctaaaggggcttctatacatattttaagtttggcctgaaagtttctctgtaccttgtgaaccacagcctaaatggatatgtagacagaccacagcctatgcttatgccaatcactgaatttttgccaattaaagggggctgaccattcaaa

SEQ ID NO: 726283 - DNA, 1281 bp, Homo sapiens
tgttcaccttagtactgaaaaggtggttgtcctcgttaatttttggttttaattctcctcctccaaattgagaaaaagaaatgaaagagcaaaagattgccttaattgagatggagtgacagtgataaacatatttacccagcattaaatagctgccagtggccaggcgtgatggctcagacctgtaatcccagcactttggaaggctgaggcaggaggactctttgaggccaagagctcaagaccagtctgggcaacatagtgagactctgttctgtctctactaataataaataaataataaataaatcaataattaattaataattaattttagctggtcatggtgtcatgagcctgtagtcccagctactgggagggtgaggaagtaggacaccttggacccaggagattgagctgagggagtaagatcaactcctgaattccagcttggggacagagcaagaccctgtctcagtaaagamacaaaagaaaaagctatccctgatttttcttttctgtcatacaaaagtgaagaaatgtttccacaaatgaaaatgcagtttctttcaatgtaagtcagtaagtatttatatagcattaactatactatattcattttgtcaggttccaagtaaaacatttagaaaagaaataaaatataatacaagtcttaagaaactggtgatgaaagacctaacaggtaggttctctcaaataaatacacattttcaaagaatatgcacttaagttatatatatttcattttcaagatgtggcattataaatataactaatgccacatcttgaaaataattataagaacgtttacttgagcttttccatcttggatgtaccccaaatggccaactgccctgctctcccatttggcctttgtcattgatattgctgcaaactgacgtctgtgctgctctcggtccagcagccttcacaccacacagtctcctctttggcaaatgccgccctgctaagcctgaggagaaaggcattcatggtagcaataaatatgttcaatatttcattgcagttactccctaatctttatttgatatattgcctgcgtgtatcaggtccaaatattttgaagtttctgttgaatcaagtttagcctaaaggggcttctatacatattttaagtttggcctgaaagtttctctgtaccttgtgaaccacagcctaaatggatatgtagacagaccacagcctatgcttatgccaatcactgaatttttgccaattaaagggggctgaccattcaaa

SEQ ID NO: 726284 - DNA, 1281 bp, Homo sapiens
tgttcaccttagtactgaaaaggtggttgtcctcgttaatttttggttttaattctcctcctccaaattgagaaaaagaaatgaaagagcaaaagattgccttaattgagatggagtgacagtgataaacatatttacccagcattaaatagctgccagtggccaggcgtgatggctcagacctgtaatcccagcactttggaaggctgaggcaggaggactctttgaggccaagagctcaagaccagtctgggcaacatagtgagactctgttctgtctctactaataataaataaataataaataaatcaataattaattaataattaattttagctggtcatggtgtcatgagcctgtagtcccagctactgggagggtgaggaagtaggacaccttggacccaggagattgagctgagggagtaagatcaactcctgaattccagcttggggacagagcaagaccctgtctcagtaaagaaacaaaagaaaaagctatccctgatttttcttttctgtcatacaaaagtgaagaaatgtttccacaaatgaaaatgcagtttctttcaatgtaagtcagtaagtatttatatagcattaactatactatattcattttgtcaggttccaagtaaaacatttagaaaagaaataaaatataatacaagtcttaagaaactggtgatgaaagacctaacaggtaggttctctcaaataaatacacattttcaaagaatatgcacttaagttatatatatttcattttcaagatgtggcattatawatataactaatgccacatcttgaaaataattataagaacgtttacttgagcttttccatcttggatgtaccccaaatggccaactgccctgctctcccatttggcctttgtcattgatattgctgcaaactgacgtctgtgctgctctcggtccagcagccttcacaccacacagtctcctctttggcaaatgccgccctgctaagcctgaggagaaaggcattcatggtagcaataaatatgttcaatatttcattgcagttactccctaatctttatttgatatattgcctgcgtgtatcaggtccaaatattttgaagtttctgttgaatcaagtttagcctaaaggggcttctatacatattttaagtttggcctgaaagtttctctgtaccttgtgaaccacagcctaaatggatatgtagacagaccacagcctatgcttatgccaatcactgaatttttgccaattaaagggggctgaccattcaaa

SEQ ID NO: 726285 - DNA, 1281 bp, Homo sapiens
tgttcaccttagtactgaaaaggtggttgtcctcgttaatttttggttttaattctcctcctccaaattgagaaaaagaaatgaaagagcaaaagattgccttaattgagatggagtgacagtgataaacatatttacccagcattaaatagctgccagtggccaggcgtgatggctcagacctgtaatcccagcactttggaaggctgaggcaggaggactctttgaggccaagagctcaagaccagtctgggcaacatagtgagactctgttctgtctctactaataataaataaataataaataaatcaataattaattaataattaattttagctggtcatggtgtcatgagcctgtagtcccagctactgggagggtgaggaagtaggacaccttggacccaggagattgagctgagggagtaagatcaactcctgaattccagcttggggacagagcaagaccctgtctcagtaaagaaacaaaagaaaaagctatccctgatttttcttttctgtcatacaaaagtgaagaaatgtttccacaaatgaaaatgcagtttctttcaatgtaagtcagtaagtatttatatagcattaactatactatattcattttgtcaggttccaagtaaaacatttagaaaagaaataaaatataatacaagtcttaagaaactggtgatgaaagacctaacaggtaggttctctcaaataaatacacattttcaaagaatatgcacttaagttatatatatttcattttcaagatgtggcattataaatataactaatgccacatcttgaaaataattataagaacgtttacttgagcttttscatcttggatgtaccccaaatggccaactgccctgctctcccatttggcctttgtcattgatattgctgcaaactgacgtctgtgctgctctcggtccagcagccttcacaccacacagtctcctctttggcaaatgccgccctgctaagcctgaggagaaaggcattcatggtagcaataaatatgttcaatatttcattgcagttactccctaatctttatttgatatattgcctgcgtgtatcaggtccaaatattttgaagtttctgttgaatcaagtttagcctaaaggggcttctatacatattttaagtttggcctgaaagtttctctgtaccttgtgaaccacagcctaaatggatatgtagacagaccacagcctatgcttatgccaatcactgaatttttgccaattaaagggggctgaccattcaaa

SEQ ID NO: 726286 - DNA, 1281 bp, Homo sapiens
tgttcaccttagtactgaaaaggtggttgtcctcgttaatttttggttttaattctcctcctccaaattgagaaaaagaaatgaaagagcaaaagattgccttaattgagatggagtgacagtgataaacatatttacccagcattaaatagctgccagtggccaggcgtgatggctcagacctgtaatcccagcactttggaaggctgaggcaggaggactctttgaggccaagagctcaagaccagtctgggcaacatagtgagactctgttctgtctctactaataataaataaataataaataaatcaataattaattaataattaattttagctggtcatggtgtcatgagcctgtagtcccagctactgggagggtgaggaagtaggacaccttggacccaggagattgagctgagggagtaagatcaactcctgaattccagcttggggacagagcaagaccctgtctcagtaaagaaacaaaagaaaaagctatccctgatttttcttttctgtcatacaaaagtgaagaaatgtttccacaaatgaaaatgcagtttctttcaatgtaagtcagtaagtatttatatagcattaactatactatattcattttgtcaggttccaagtaaaacatttagaaaagaaataaaatataatacaagtcttaagaaactggtgatgaaagacctaacaggtaggttctctcaaataaatacacattttcaaagaatatgcacttaagttatatatatttcattttcaagatgtggcattataaatataactaatgccacatcttgaaaataattataagaacgtttacttgagcttttccatcttggatgtaccccaaatggccaactgccctgctctcccatttggcctttgtcattgatattgctgcaaactgacgtctgtgctgctctcggtccagcagccttcacaccacacagtctcctctttggcaaatgcygccctgctaagcctgaggagaaaggcattcatggtagcaataaatatgttcaatatttcattgcagttactccctaatctttatttgatatattgcctgcgtgtatcaggtccaaatattttgaagtttctgttgaatcaagtttagcctaaaggggcttctatacatattttaagtttggcctgaaagtttctctgtaccttgtgaaccacagcctaaatggatatgtagacagaccacagcctatgcttatgccaatcactgaatttttgccaattaaagggggctgaccattcaaa

SEQ ID NO: 726287 - DNA, 512 bp, Homo sapiens
taacaccataacataccataacgtaatataatcacataccacaaatagcaagcctgtatccagtgcctaccgtgtgccaggcactcctaataaattaaaccaccttctcttcgtttcattattataagcttggtgccatcaatcccattttatagatgaaaaacaatgaaaaaagagaaagaaaaaaatttcttttckcagagatcacccagaaataacttatttttatttttaattgatatatcatagtttaagggtacatattttgggggtatgtgtgatatttacatacgtgtatacaatgtgtaatgatcaaatcagtgtgggattatttgtcacctcaaacatttattttttctttgtgttgggaatattaaaagtcttctttttgatttattttaaagtatacaacaaattacagaaaatcagtgggaattgaacaatgagaacacttggacacaagaaggggaacatcacacaatggggcctgtcgtggggtggggggagggggg

SEQ ID NO: 726288 - DNA, 586 bp, Homo sapiens
ccatggtttatgtctgtcttaccccaaaatattgtgaaagacacaaacgacattatctcattccagtctcagctggaatttcaaatcccattgtctaaatcaaatccaggtgaagatgaggctcttcacatgtagttccttaagctttggcaacatgagtagagttttcttgacggtagatgtgttaactaaagagacaattatctgtcccacatacacctaacatgcaatggcagacaagcaaacaacattatagacatttctgctcaaaaaggatggtggagggaatggaaggcactgtccagtggaagaatygctggtccatagcaataatgtcaccaaataaggcaaatgttgtaagttccttgtttaggtctcaaaagtgatatcacaccacttttgccatatcttatttgtcaggagttagtgggtcaatctcacattataaggagatggggtccttgagggcatcttagagattgtctaccacacagtttcccagagcctttggctagtttgtgtaggacttccatatgccacaaaggcctgtgtcacacattcttttgtgttatcttctcaatactgc

SEQ ID NO: 726289 - DNA, 586 bp, Homo sapiens
ccatggtttatgtctgtcttaccccaaaatattgtgaaagacacaaacgacattatctcattccagtctcagctggaatttcaaatcccattgtctaaatcaaatccaggtgaagatgaggctcttcacatgtagttccttaagctttggcaacatgagtagagttttcttgacggtagatgtgttaactaaagagacaattatctgtcccacatacacctaacatgcaatggcagacaagcaaacaacattatagacatttctgctcaaaaaggatggtggagggaatggaaggcactgtccagtggaagaatcgctggtccatagcaatawtgtcaccaaataaggcaaatgttgtaagttccttgtttaggtctcaaaagtgatatcacaccacttttgccatatcttatttgtcaggagttagtgggtcaatctcacattataaggagatggggtccttgagggcatcttagagattgtctaccacacagtttcccagagcctttggctagtttgtgtaggacttccatatgccacaaaggcctgtgtcacacattcttttgtgttatcttctcaatactgc

SEQ ID NO: 726290 - DNA, 750 bp, Homo sapiens
tgttaagtggttcagaacatcaactcttagcatacattccctactgctaaataaaaggtgacccttcttttaatcgtttttgtggtttctcattagagwataggtaaataatgaaataactagagtcttcccttgctttcattcagttttgtgttgttctttccttccagttctttgcaactacacgatcaaaaacattttttttggtgcacattaaaaagactagagaaatgctttaatactttcgaagactgaatatcttaaaaatggctccaattctactgtcttattcaagcaaggtatttacttcttatttcttttctatccatttcatgaccttgttttatttcaagcactatcacagagtcagatggaccttaactcacctgagcaaaggcaacctagagccacacagctgagctgccctctttgtggcatcacgttgtccctctgccccacagagtcacctccccacttcccttttccagccctactgcccttttgtaagtgtaagacatcatttcctctcaactgcataacagaaatagcctctgaaagggcctttttacagctgatttcttctgtctccaattcatcgtccatactgcatccaaagtcttcttgccactgccttcaaaatttaaagctgattcctaaattatgaatctttgtcactgggaaggcaaaggacagttgcatagtctggttgagtgaagttttgcccacacttaactgaaaaaaaaaaaaaaa

SEQ ID NO: 726291 - DNA, 621 bp, Homo sapiens
aaagagaaagcagtattttttataaaaaagctttattggtataacagaggtataatgacattttttaaaaagttacacatgtaatgtatataaccttaatgagtctggacacttgtgatactgttaccacaaccaaggtgtgaaacatatcatcaagaccacagtttttgtgtatgtgtgcacattcatgacaggatatgtgttacagagctaatgtctttattttaaaaagctttattcatttggattttattccttactattatattctttattcaacagttgtctttccatctcatctctcctgattcttccccatgctttaaaaaatgttaatgtcttcttgagactgtcaaaaacaacattacaacaaatttctttatagatctaattggcttttataggtgatacatgaatcagggcagccttcattctacaaaactgaacaagtgttcttctgggcaggggcaaaacactgggttttgaaaggtgaaaagtaggaaatagaaaaatggaaatctagtaarcatcatattacctcaggttactttttttaaaggggtaaagcagaagagacttccttattaggattactgaggtaaactggaatctcttgttttc

SEQ ID NO: 726292 - DNA, 763 bp, Homo sapiens
gtgctgcagtcccactaagctagggtggtgactcttaggcactcctcagtagcttgaaaccaagagaacagggaggtagttgtgactctggtcctggggrtcaaggtgtaatactgacatagctctagggaagaattggtgttctacaggcttagtacttatggatccagccatagctgcaatttagatcctggaagcagtggaggacagagacattttgagcactgagagagggggtactgtgtagtggtggctccggaccctggagtgctaggacatagccgtggccaaagccctgcaaggttggctgcatcagcagcaataacccaggaatgttggggcacggctgtagcttggactccggggagtagggggcaatacaaaggtatcttcattgcccatggaggtgagatgcctcagcagttcagattccaaaaggcttgtacagattcagggaagcaaggtgctgaagctcttcagcccagaggacaaggtaacccagctcagccaaggctctttttccctggggggaagggtgcctgttaactcctgttccagggaatacagctgctctgctggactggggtccaagcattagattgcttcaggcactgagcgggtattgctgttcttccagcttggcaacagtgtctctgctgggtgggagcacatgattcttagggactgagtgctgcatgggcttggatgatggaattgtgactgatcctctggactaaagctcaaattcctgagggacaggaca

SEQ ID NO: 726293 - DNA, 763 bp, Homo sapiens
gtgctgcagtcccactaagctagggtggtgactcttaggcactcctcagtagcttgaaaccaagagaacagggaggtagttgtgactctggtcctggggatcaaggtgtaatactgacatagctctagggaagaattggtgttctacaggcttagtacttatggatccagccatagctgcaatttagatcctggaagcagtggaggacagagacattttgagcactgagagagggggtactgtgtagtggtggctccggaccctggagtgctaggacatagccgtggccaaagcyctgcaaggttggctgcatcagcagcaataacccaggaatgttggggcacggctgtagcttggactccggggagtagggggcaatacaaaggtatcttcattgcccatggaggtgagatgcctcagcagttcagattccaaaaggcttgtacagattcagggaagcaaggtgctgaagctcttcagcccagaggacaaggtaacccagctcagccaaggctctttttccctggggggaagggtgcctgttaactcctgttccagggaatacagctgctctgctggactggggtccaagcattagattgcttcaggcactgagcgggtattgctgttcttccagcttggcaacagtgtctctgctgggtgggagcacatgattcttagggactgagtgctgcatgggcttggatgatggaattgtgactgatcctctggactaaagctcaaattcctgagggacaggaca

SEQ ID NO: 726294 - DNA, 1311 bp, Homo sapiens
taacacatttgttttactttggttcatgtcaagataataagactacagtggctaataaaaatcagttataacaaacattaaaactttgtatgtgcatatgtgtgagaaatagaaatggagaaggtagctttgtgaaactccaactagtgactcccataactatgaaggattgctgacaggactttcattactgcaaattgcccctatttaataggcagctcttatgcagcctgtgctcctgctgtttgcaaaacttactttgaatatacaacaccaattacagagactaaacacatcaagattttgargagtctagagagttatgcaattaattttatttatgtactttctgctttaaatgcccctgaaaagagaaaattgactaatgtatcttaaaaggaacactcatatttatgtctttgccccagtcacactctttctctccacaaaaaaaaataaaagagaaagggaagaagggaggaaaggaggaagaaagaaatgaaggaaggaaggaattcagctgaaataaaataagcagatacagtactggagttttcagcaagggcaataaatggtaaaattctcttgaaagttctgtagtcatttattagctatggaaagctacagaaaaacttagagactctgaccagtgccagagaaggctgagaggcctgacacttctcttgaattctaggacagcaaagcatttattagtatctagatatgcatatttaattatgctgcaataataattttactgtcattcctcaaagctgagaagaaacaaacgataccctattcctttttcaatgatcctgtgaaacagcttggggcagcatataatgatagtaccacaagtgtctccttggcatttacatgctaatgatactgtccaattaaattatataatattgtgtgataagccccttttgcaactaggcaaaaatgtatacatattatagtacaattgttctcacttctcaagagagatctgtaaatcttgagactttgccttttacattagaataaatcctccactcacttattcatgcatttaatgcatatgttttcagagctattatatgcattgaatgactatttttacactcccatacctttttaaagttgacatcaaaaacaaatttttgtgtgtataattttaaagaatataattttggggttactatatattttatttatgctttaagtacatgttccttaaaacctttggtatacagatattttaatctttcatcttatcagaggaaatccaaaagaagatgaggatggatggagaaaagcttgatcaag

SEQ ID NO: 726295 - DNA, 1311 bp, Homo sapiens
taacacatttgttttactttggttcatgtcaagataataagactacagtggctaataaaaatcagttataacaaacattaaaactttgtatgtgcatatgtgtgagaaatagaaatggagaaggtagctttgtgaaactccaactagtgactcccataactatgaaggattgctgacaggactttcattactgcaaattgcccctatttaataggcagctcttatgcagcctgtgctcctgctgtttgcaaaacttactttgaatatacaacaccaattacagagactaaacacatcaagattttgaggagtctagagagttatgcaattaattttatttatgtactttctgctttaaatgcccctgaaaagagaaaattgactartgtatcttaaaaggaacactcatatttatgtctttgccccagtcacactctttctctccacaaaaaaaaataaaagagaaagggaagaagggaggaaaggaggaagaaagaaatgaaggaaggaaggaattcagctgaaataaaataagcagatacagtactggagttttcagcaagggcaataaatggtaaaattctcttgaaagttctgtagtcatttattagctatggaaagctacagaaaaacttagagactctgaccagtgccagagaaggctgagaggcctgacacttctcttgaattctaggacagcaaagcatttattagtatctagatatgcatatttaattatgctgcaataataattttactgtcattcctcaaagctgagaagaaacaaacgataccctattcctttttcaatgatcctgtgaaacagcttggggcagcatataatgatagtaccacaagtgtctccttggcatttacatgctaatgatactgtccaattaaattatataatattgtgtgataagccccttttgcaactaggcaaaaatgtatacatattatagtacaattgttctcacttctcaagagagatctgtaaatcttgagactttgccttttacattagaataaatcctccactcacttattcatgcatttaatgcatatgttttcagagctattatatgcattgaatgactatttttacactcccatacctttttaaagttgacatcaaaaacaaatttttgtgtgtataattttaaagaatataattttggggttactatatattttatttatgctttaagtacatgttccttaaaacctttggtatacagatattttaatctttcatcttatcagaggaaatccaaaagaagatgaggatggatggagaaaagcttgatcaag

SEQ ID NO: 726296 - DNA, 1311 bp, Homo sapiens
taacacatttgttttactttggttcatgtcaagataataagactacagtggctaataaaaatcagttataacaaacattaaaactttgtatgtgcatatgtgtgagaaatagaaatggagaaggtagctttgtgaaactccaactagtgactcccataactatgaaggattgctgacaggactttcattactgcaaattgcccctatttaataggcagctcttatgcagcctgtgctcctgctgtttgcaaaacttactttgaatatacaacaccaattacagagactaaacacatcaagattttgaggagtctagagagttatgcaattaattttatttatgtactttctgctttaaatgcccctgaaaagagaaaattgactaatgtatcttaaaaggaacactcatatttatgtctttgccccartcacactctttctctccacaaaaaaaaataaaagagaaagggaagaagggaggaaaggaggaagaaagaaatgaaggaaggaaggaattcagctgaaataaaataagcagatacagtactggagttttcagcaagggcaataaatggtaaaattctcttgaaagttctgtagtcatttattagctatggaaagctacagaaaaacttagagactctgaccagtgccagagaaggctgagaggcctgacacttctcttgaattctaggacagcaaagcatttattagtatctagatatgcatatttaattatgctgcaataataattttactgtcattcctcaaagctgagaagaaacaaacgataccctattcctttttcaatgatcctgtgaaacagcttggggcagcatataatgatagtaccacaagtgtctccttggcatttacatgctaatgatactgtccaattaaattatataatattgtgtgataagccccttttgcaactaggcaaaaatgtatacatattatagtacaattgttctcacttctcaagagagatctgtaaatcttgagactttgccttttacattagaataaatcctccactcacttattcatgcatttaatgcatatgttttcagagctattatatgcattgaatgactatttttacactcccatacctttttaaagttgacatcaaaaacaaatttttgtgtgtataattttaaagaatataattttggggttactatatattttatttatgctttaagtacatgttccttaaaacctttggtatacagatattttaatctttcatcttatcagaggaaatccaaaagaagatgaggatggatggagaaaagcttgatcaag

SEQ ID NO: 726297 - DNA, 1311 bp, Homo sapiens
taacacatttgttttactttggttcatgtcaagataataagactacagtggctaataaaaatcagttataacaaacattaaaactttgtatgtgcatatgtgtgagaaatagaaatggagaaggtagctttgtgaaactccaactagtgactcccataactatgaaggattgctgacaggactttcattactgcaaattgcccctatttaataggcagctcttatgcagcctgtgctcctgctgtttgcaaaacttactttgaatatacaacaccaattacagagactaaacacatcaagattttgaggagtctagagagttatgcaattaattttatttatgtactttctgctttaaatgcccctgaaaagagaaaattgactaatgtatcttaaaaggaacactcatatttatgtctttgccccagtcacactctttctctccacaaaaaaaaataaaagagaaagggaagaagggaggaaaggaggaagaaagaaatgaaggaaggaaggaattcagctgaaataaaataagcagatacagtactggagttttcagcaagggcaataaatggtaaaattctcttgaaagttctgtagtcatttattagctatggaaagctacagaaaaacttagagactctgaccagtgccagagaaggctgagaggcctgacacttctcttgaattctaggacagcaaagcatttattagtatctagatatgcatatttaattatgctgcaataataattttactgtcattcctcaaagctgagaagaaacaaacgataccctattcctttttcaatgatcctgtgaaacagcttggggcagcatataatgatagtaccacaagtgtctccttggcatttacatgctaatgatactgtccaattaaattatataatattgtgtgataagccccttttgcaactaggcaaaaatgtatayatattatagtacaattgttctcacttctcaagagagatctgtaaatcttgagactttgccttttacattagaataaatcctccactcacttattcatgcatttaatgcatatgttttcagagctattatatgcattgaatgactatttttacactcccatacctttttaaagttgacatcaaaaacaaatttttgtgtgtataattttaaagaatataattttggggttactatatattttatttatgctttaagtacatgttccttaaaacctttggtatacagatattttaatctttcatcttatcagaggaaatccaaaagaagatgaggatggatggagaaaagcttgatcaag

SEQ ID NO: 726298 - DNA, 1311 bp, Homo sapiens
taacacatttgttttactttggttcatgtcaagataataagactacagtggctaataaaaatcagttataacaaacattaaaactttgtatgtgcatatgtgtgagaaatagaaatggagaaggtagctttgtgaaactccaactagtgactcccataactatgaaggattgctgacaggactttcattactgcaaattgcccctatttaataggcagctcttatgcagcctgtgctcctgctgtttgcaaaacttactttgaatatacaacaccaattacagagactaaacacatcaagattttgaggagtctagagagttatgcaattaattttatttatgtactttctgctttaaatgcccctgaaaagagaaaattgactaatgtatcttaaaaggaacactcatatttatgtctttgccccagtcacactctttctctccacaaaaaaaaataaaagagaaagggaagaagggaggaaaggaggaagaaagaaatgaaggaaggaaggaattcagctgaaataaaataagcagatacagtactggagttttcagcaagggcaataaatggtaaaattctcttgaaagttctgtagtcatttattagctatggaaagctacagaaaaacttagagactctgaccagtgccagagaaggctgagaggcctgacacttctcttgaattctaggacagcaaagcatttattagtatctagatatgcatatttaattatgctgcaataataattttactgtcattcctcaaagctgagaagaaacaaacgataccctattcctttttcaatgatcctgtgaaacagcttggggcagcatataatgatagtaccacaagtgtctccttggcatttacatgctaatgatactgtccaattaaattatataatattgtgtgataagccccttttgcaactaggcaaaaatgtatacatattatagtacaattgttytcacttctcaagagagatctgtaaatcttgagactttgccttttacattagaataaatcctccactcacttattcatgcatttaatgcatatgttttcagagctattatatgcattgaatgactatttttacactcccatacctttttaaagttgacatcaaaaacaaatttttgtgtgtataattttaaagaatataattttggggttactatatattttatttatgctttaagtacatgttccttaaaacctttggtatacagatattttaatctttcatcttatcagaggaaatccaaaagaagatgaggatggatggagaaaagcttgatcaag

SEQ ID NO: 726299 - DNA, 907 bp, Homo sapiens
gctactcaagaggctgaggtggaaggatcacttgagcccaggaggtcaaggctgcagtgagctgtgatcacaccattacactgcagcctggttgacagagccagaccctgtctcaaacaaaaaagaaaaaagaaaaaaaaaatttgatactttcagtgagttacaggtaatcaatttcaggtttttatagctgaatttaaagaaacatggtaaaagggaaacattgatgagtcccatgttgtttggcactgttgcttttaaaatacaactagctttttggttttactttcagtatgttttatttatttatgtatttttagaaacaggttcttcttctgttaaccaggctggaatgtagtggtataatcagagctcatagcagcctagatcctaggctcaaccaatcctcctgcttcagcctcccaagtagctggggctacaggcacatgccgtcatgcccagctaawtttttgttttttgtagagacaaggtctccctattttgcccagtttggtcttaaactcctgggctcaagtgattctcctgcctctgcctcccaaagtgctgggattacagacatgagatgctgcggccggctattcaccatgttttaaaataagaagaagaatggctggttctggagctgatcttttctttctccatcctaaatggactggaggttattttgaaattttactgtgaatttcctttttaacttggagctgaaaaaagtagggtttcagccaggcgcagtggctcacgcctgtaatcccagcactttgggaggccaaggcgggtggatcacgaggtcgggagatcgagaccatcctggctaacatggtgaaaccccgtctctattaaaaaatacaaaaattagccgggcgtggtggtgggcacctgtagtccc

SEQ ID NO: 726300 - DNA, 907 bp, Homo sapiens
gctactcaagaggctgaggtggaaggatcacttgagcccaggaggtcaaggctgcagtgagctgtgatcacaccattacactgcagcctggttgacagagccagaccctgtctcaaacaaaaaagaaaaaagaaaaaaaaaatttgatactttcagtgagttacaggtaatcaatttcaggtttttatagctgaatttaaagaaacatggtaaaagggaaacattgatgagtcccatgttgtttggcactgttgcttttaaaatacaactagctttttggttttactttcagtatgttttatttatttatgtatttttagaaacaggttcttcttctgttaaccaggctggaatgtagtggtataatcagagctcatagcagcctagatcctaggctcaaccaatcctcctgcttcagcctcccaagtagctggggctacaggcacatgccgtcatgcccagctaattttttgttttttgtagagacaaggtctccctattttgcccagtttggtcttaaactcctgggctcaagtgattctcctgcctctgcctcccaaagtgctgggattacagacatgagatgctgcggccggctattcaccatgttttaaaataagaagaagaatggctggttctggagctgatcttttctttctccatcctaaatggactggaggttattttgaaattttactgtgaatttcctttttaacttggagctgaaaaaagtagggtttcagccaggcgcrgtggctcacgcctgtaatcccagcactttgggaggccaaggcgggtggatcacgaggtcgggagatcgagaccatcctggctaacatggtgaaaccccgtctctattaaaaaatacaaaaattagccgggcgtggtggtgggcacctgtagtccc

SEQ ID NO: 726301 - DNA, 608 bp, Homo sapiens
ttctgcaaacccaaccatactcaggtgaaaagaatcaaagacaatgaaataacactcagctaaattaaaaaggcacacttattttcacagggactacacaaataagcaactaaagagccaacgtcttaagaaactgagcctccaaacattaagaacatcctagatttatttcctcgcactctggacatggagtaggcagaaaacaacacaatcccagagaaagcctgtaagtcccactcttttcaattctccactcccaggatctttgttaaatggcccaaattaaacatgatggctcaaatgccctcacaagagagttgttacaatctacytaagcaaattcaatttactgaaaactctcatggctttattcccattctcttcagcatttgcaaacactttgatagttttcagtctggcattttccatgagtttcaaatttgaaaacgtgaaaatccagtctgattttgaggatagcaaagagttaatacttatggggaaaagtcagtgcccaaaaggaatgaactacattcccttttcaatttctctgccttctggctaactttccaaacagatttaatcactctcagtatgtcaccatcagaatc

SEQ ID NO: 726302 - DNA, 1279 bp, Homo sapiens
tgctattaaatcttccaaccactctttcagagttctttctcctagtgtcaaatgaaattgtgttatatgaatcacaaccccacaaaatgatcacttgtaattaactccttccagatttcactcattttagtcttgactaatggctacttttgtgaaggaatccaacccactgtaatccctaaacacaggagccagctttagtgtgcatcacattaaggctgctgaaaatgaatggtctgatttctgcttgaaattcaggaagcatagtattccatggtgtatatgtgccacattttcttaatccagtctatcaytgatggacatttgggttggttccaagtctttgctattgtgaatagtgccacaataaacatacgtgtgcatgtgtctttatagcagcatgatttataatcctttgggtatatactcagtactgggatggctgggtcaaatggcatttctagttctagatccctgaggaatcgccacactgacttccataatgattgaactagtttacagtcccaccaacagtgtaaaagtgttcctatattcagccataaaaaaggatgacttcatgtcctttgtagggacatggatgaagctggaaaccatcattctcagtaaactatcgcaaggacaaaaaaccaaacaccgcatgttctcactcataggtggggattgaataatgagaacacttggacacaggaaggggaacatcacacaccggggcctgttgtggggtggggggagtggggagggatagcattaggagatatacctaatgtaaatgacgagttaatgggtgcagcacagcaacatggcacatgtatacatatgtaacaaacctgcacgttgtgcacatgtaccctaaaacttaaagcataataataataaaaaaagaataaaaatacattaaaaagaaaaaaaaagaaattcaggaagcaaagacttaggggtcaggaaattacatctcgttgtctagaatttgtgatcaacatttcaagtcactcattcacatttaggggtagagataaagccaaaatctgtcttacactgagaagggatctaaaagggttttcttcacattgcctggtcatatttcttttactctttggaagttaatacagatagagtagaaacaaggcaacctagccccctcctttttctgttttagcttctgggtacaaccagtctctggccatctttgatggctaattccagacatttacaaaaatgcagaacctgctgtcaccatctctgcactgtgcaatgacaa

SEQ ID NO: 726303 - DNA, 582 bp, Homo sapiens
gggatagacactgctaaattccacataagctggaaagaaaagtcagttagaaatatagactagatgtctaaaggataaatgtgatttagtgtgagagtgtgcagccactgaggaccacaggaaaggggacttcaaaccatcattcagatgtttccttcactaagcccaccaagagctcacagagaagatgaggcagaattctgagaaatctttcccccatggggaggattgaggaaggaaatggcagcctctgttgaaactccaacctgactggtgtgtctctgtctctgtgaactaggtggaattaaaaaatagcttccagaatttccctttcatctagtatacatgccctgmagaattcctggaattgagaataggatggattttactcctgtgattaggatatatcctgtggcaaggctgaccttatgatatggttttggtatgtccccacccccacccaaagctcattgtgaattgtagtcctttaatacccacgtgtcatgggagagactcttttggaggtaattgaatcatggaaatggttaccctcctgctgctgttcttgtgacactgagtgag

SEQ ID NO: 726304 - DNA, 2030 bp, Homo sapiens
  misc_feature 1929, 1930, 1931, 1932, 1933, 1934, 1935, 1936, 1937, 1938,1939, 1940, 1941, 1942, 1943, 1944, 1945, 1946, 1947, 1948,1949, 1950, 1951, 1952, 1953, 1954, 1955, 1956, 1957, 1958,1959, 1960, 1961, 1962, 1963, 1964, 1965, 1966, 1967: n = A,T,C or G
  misc_feature 1968, 1969, 1970, 1971, 1972, 1973, 1974, 1975, 1976, 1977,1978, 1979, 1980, 1981, 1982, 1983, 1984, 1985, 1986, 1987,1988, 1989, 1990, 1991, 1992, 1993, 1994, 1995, 1996, 1997,1998, 1999, 2000, 2001, 2002, 2003, 2004, 2005, 2006: n = A,T,C or G
  misc_feature 2007, 2008, 2009, 2010, 2011, 2012, 2013, 2014, 2015, 2016,2017, 2018, 2019, 2020, 2021, 2022, 2023, 2024, 2025, 2026,2027, 2028: n = A,T,C or G
tgggtttttgtatggatgcatatctggtgtttggtttttttttttactgctgcttgacgactgagatcgaactgtttcctattttccccactctaaaaacatgtcaaatatgacaaaatgtagtaaagtcatcatgataaattgcataattacactgttctaaacacatactgttatagctatttttcttatggtagagaatatcacttttcaaataggctatatttttatgcttttactttctactcaatttttgtcttctgtttaaaaattttagagtaacttaggtattcatttattttcctcaaaacatatctggtattgcctggcataaaccaaacactctaacagattgtgtatataatgtcttactgaggagatgaacaagcaactatgtgattacaacacagtattattgtttatgtcatggtataaacaggcacaggattgtgtggactactcagtacgggtacttagtcctttctgatggggttatttaaggcttgtatgaagagatgacatctaagttgatttccgaatacagtaaacagccaggtgaatgtagactggtcagcattcagaaaagttattccaaagtgagaaaggcacacagtgtgtgtgtacaaagacacacagtgcgtgtgtacaaagacacacagtgcgtgtgtacaaagacacacaggtgagacaaggccgtaccccaagggtattgcaaagattgctggtgacccagtgagtagataaagaaggcaaatgattaatgagttaagtagggagcaagatcgtgaagcactttgcaaaccatttcaggggatttttgctttattctgatagcagtgaatgttaagagctgatcatttgtagagaacaatatggatagaagtgaactaggtatgctgtggtaataaccaaggaaagaaaggatggcagattaaatttagtggagtagcaaaagaaatggagagaaatggggatatggagatattgaagagggcttggagactgcgcaggtcttcagggagttgctgcagagagtagcagacaagtgtagggtgagtcctgggtcccttgcctgggcttctgggtggataatgctgccctttaccaatgttggggacataggagagtggggagaaatggggatgagctgagcgtgatggtgattttggactcttgaattcactgttgaaagatatttattctgctgttttaatatatttacctttataaatacaaccttattaacataaaacgtgaatgaaattcccaatgaacagttttcctgtaatttgagatttttaaaatgtcctttgcataagaattaacttttatgatcaacatatattaagtagtaaaaatttaatagtctacataagtgtttcttccatttggtttgtaataaaataaataaaatttgtaatctttcctgcaaggtagcaaaaacactccaggagatactaagaaatatttagagtaatggatgctcaggtctgaatgggactgtagagatcatctagtccaactatttattttataggtaatgttatctgtgaggaaaatccaggagttctgacatcgaacagctataatttcatgtatgtggtctcaattcattttaaggaaaatgatggatatgttacaattattttgtttgcatggtgcaagtgtttgtcatttcctgcaatctagctttttcctaattttacatcccacttcctacactgggctttggctgggattttcctactcccctgcaagatcttgcttcttccatttctgtaacttggaggccaagagrctttattctgtaaagaagagatagtaaatatagtttctttgcaggtcgcatgatattggtccctaaaactaaactctaccactgtagggcataataagctattggcaatagataaatgaatgagtgtggcnnnnnnnnnnnnnnnnnnnnnnnnnnnnnnnnnnnnnnnnnnnnnnnnnnnnnnnnnnnnnnnnnnnnnnnnnnnnnnnnnnnnnnnnnnnnnnnnnnnnaa

SEQ ID NO: 726305 - DNA, 898 bp, Homo sapiens
atgatttccttttttgatttatcattttgcatttatcaccagaggagttataccaggatgccagaaaaaaacaagctctttgaatttttagatcccttagctaccattgtaaagcctccttaaaagataaagacataaagactattacatattttataatgaaaatatawtgttaagaaggaacacctttgatagattctgttcattttaaatttcttttattttaccatatttatcttagatatttccctgaaatctacatgatttattttttctgtctcactgaatttgttttagaaagcctgaacgtaattgcctgggtttatatccaacagtatttttgcaagtttttgggaagtaacaattgtgtcacttctcttttaattcagcattatttgtggtatcaaacagctaagtttcagaagaaaacgatgatgtgttctactctggggatttagggactccaaaatatagtgaagaatatgcctttgtattaattatggctttgacattgctccagatgtacataatacctgatgtgtaagccagatgccctatgcgttcctgcctgcacctgtccaccgctgctaaggaaatcagaaccccactgctgcaggtgggccatggctgacttccaatatctgtctcatgatacttttgctgccctctggggagacatgtaggatcactctacagaaacatttatgatttcattatagaatgaatcaccaagagtcaatgggggcctgctaattggcatttagagagataaatttattttaactgcaaatgaaggtatttctgtctccttctcatataaccacttgcagaagctatatatcctctcaaaactttctcactaggcttgccacttttaaagcttcctaatggtttttca

SEQ ID NO: 726306 - DNA, 898 bp, Homo sapiens
atgatttccttttttgatttatcattttgcatttatcaccagaggagttataccaggatgccagaaaaaaacaagctctttgaatttttagatcccttagctaccattgtaaagcctccttaaaagataaagacataaagactattacatattttataatgaaaatataatgttaagaaggaacacctttgatagattctgttcattttaaatttcttttattttaccatatttatcttagatatttccctgaaatctacatgatttattttttctgtctcactgaatttgttttagaaagcctgaacgtaattgcctgggtttatatccaacagtatttttgcaagtttttgggaagtaacaattgtgtcacttctcttttaattcagcattatttgtggtatcaaacagctaagtttcagaagaaaacgatgatgtgttctactctggggatttagggactccaaaatatagtgaagaatatgcctttgtattaattatggctttgayattgctccagatgtacataatacctgatgtgtaagccagatgccctatgcgttcctgcctgcacctgtccaccgctgctaaggaaatcagaaccccactgctgcaggtgggccatggctgacttccaatatctgtctcatgatacttttgctgccctctggggagacatgtaggatcactctacagaaacatttatgatttcattatagaatgaatcaccaagagtcaatgggggcctgctaattggcatttagagagataaatttattttaactgcaaatgaaggtatttctgtctccttctcatataaccacttgcagaagctatatatcctctcaaaactttctcactaggcttgccacttttaaagcttcctaatggtttttca

SEQ ID NO: 726307 - DNA, 633 bp, Homo sapiens
taaagccaaactccatcgagcatgaaataaattccttctcactcactagcagttactgtttttaaaccctttctgtacacttggccttttgaagtgcatttcaggatcatgttaacctactggaagattctcttataaacattaggtgaaaaacggccaccaaggtggcagacaacaatgctactaccataattaccacagctgagacacttccagatagtttataattcatttttagaggtttttggatttcttcccagcagaatatatcttccctgtcttaaaaccaaagcatctaaaatgttggctaggcctgagacttgttacaacaacttcttygccaatatttttcaaatgattcagaagccaagcattcaaagtcttaattcatttgtgtgtaagagaagtatgaggttttttttccattttggaaaaaaaaaagtttctgagttctagaaaatgttgtatttgcttgatccatactcaaaatcaaggtgatgttctgaaaagaaaatgatttgcaattcttagctacaggatctgaggcaatatttccagatcatttttttccagaatgaaacaagagaatatgaatattttatagggttgaataatcagggtggcttctggtgt

SEQ ID NO: 726308 - DNA, 656 bp, Homo sapiens
tggtcttgaactcttggtctcaagcgatcctcctttctctgcctcccaaagttttggaattacaggcatgagcgaccgtgcccagtcagagcagattttgaatgtccccaacataaagaaatgataaatgtttgaggtgataggtatgctaattaccccaatacattgtatacctgtatcaaaatatcacactgtaccctataaatatatacaattattatgtgtcaattaaaagtttttttttttaagattgggccattcyacataggcccaggtgcctgcctcagccctggagaaagagaggggcataaagaaatctaagttgctttctcctcagtctacttaatccctgacaaaacctggtacatcttccacagtgagatcatatgtcgcctcttccatgaagccttccctgattccttcaggcagagtgggtgaggatttcctctgggctcctcattgccttgactaccttgtcgcatcctaccacgtaacagcaaagtctgattttccctttacatgcctgaagcagacactctcagggccttgcccacatccccactcttactgcttcagtgcacagctggactgtgggtttctagctgccaacacctgtgtacctttacccatgggccttctctcaccaccagagagcc

SEQ ID NO: 726309 - DNA, 1673 bp, Homo sapiens
tgtcctcctttcttcccccgcacagtgcaaacacacaatattgacattccagcctccagctactcactcttcccaaataggtccctgcttccaagtctcagcacctgtgcttcactctgctgcaataccttctcccccttcctggcttgtgagctattatttatcttgcaagacccagctccacaccctcaggcaagcttcatcactcttcactgtgctgctagagtaggccctcccttaaggctccaaagtcatcacttatatagtgtttgtcattaggcaaaagcctgttccactttcaccagcctgggaattccttaaggccatggaaaccctggggcctggcatatagtaggtgctcaagaatcatctgcagaagacaaggcttatacctgaaagacaggtacaaacataggcttaataggctctctagaaattatactgattgataccacaaactaatttgggggccagatataaagaaaccatcaatgagaatggtttccttcgtgtcaatgtaatagtgtattatgtgttttagggatacataaacaggaaccaaagcacactacttattatgacaaggcgcttayaatgatttgcatttctctgcaaaactctttaggcatataattttgttaatttgtgacaaacctcaaaaacacacttaccaccaataccttgattgcaatatatactttcaaatcacacagaaatcaagttcctttcaaaggtttccaaaagagtctgaagtgcgttgttttgtttggtttgttttaaatttgggaatttaaatgcagatcataatttataatttaacccagacttaagggaagaataatttcacaaggatgttcaagaacctgacctagccttcttttgaatgttggcactgacaatgcgtgaccttgagaagtctgtttaatctgagactgtttcatcctcagtcacatgggaataaggagagtttgttgagaggcttttaaaaagcaaaaataaataaataaataataaaaagcaaaaactttgaaaacatggagtctcttttttctcccctgagatacatcatttgaaaaaggtggcacctgttccagctcaaatcattcagcagtgatcttggtaataagtactttcctgaaaaaataccagtttgaagaaaagtaatatttcaaaacactgcctagtccttcacatttgtcccatgtatctttggcttcactcagctaacatccactgatatggattaaaagttaaacctgtttgtcttgttcctttttctactgacgcacgcaagagagaaagctctccagggaactctcctcatgaataatatcaaatttcaaaccaacaagtccacatccgaaaagcagaatggtagaaaggcaagaccttggttctaggtcctcctctttcactgtcactggacaattactaaccaaccaagacctctagttcccatttgtgaaccaagggcattgactaggatgtggtgatgataatgactgcagcaactacctcttgagtgtctctatgcaccaggcactgtactaggcatgtccccaccacgtcacagtgcacacagaatctcatttcgtaaatgaggatttatgaggcatcacagagatcaagtaaacttgcttaagcttctatggccaataatagtgagcagactc

SEQ ID NO: 726310 - DNA, 1673 bp, Homo sapiens
tgtcctcctttcttcccccgcacagtgcaaacacacaatattgacattccagcctccagctactcactcttcccaaataggtccctgcttccaagtctcagcacctgtgcttcactctgctgcaataccttctcccccttcctggcttgtgagctattatttatcttgcaagacccagctccacaccctcaggcaagcttcatcactcttcactgtgctgctagagtaggccctcccttaaggctccaaagtcatcacttatatagtgtttgtcattaggcaaaagcctgttccactttcaccagcctgggaattccttaaggccatggaaaccctggggcctggcatatagtaggtgctcaagaatcatctgcagaagacaaggcttatacctgaaagacaggtacaaacataggcttaataggctctctagaaattatactgattgataccacaaactaatttgggggccagatataaagaaaccatcaatgagaatggtttccttcgtgtcaatgtaatagtgtattatgtgttttagggatacataaacaggaaccaaagcacactacttattatgacaaggcgcttataatgatttgcatttctctgcaaaactcttyaggcatataattttgttaatttgtgacaaacctcaaaaacacacttaccaccaataccttgattgcaatatatactttcaaatcacacagaaatcaagttcctttcaaaggtttccaaaagagtctgaagtgcgttgttttgtttggtttgttttaaatttgggaatttaaatgcagatcataatttataatttaacccagacttaagggaagaataatttcacaaggatgttcaagaacctgacctagccttcttttgaatgttggcactgacaatgcgtgaccttgagaagtctgtttaatctgagactgtttcatcctcagtcacatgggaataaggagagtttgttgagaggcttttaaaaagcaaaaataaataaataaataataaaaagcaaaaactttgaaaacatggagtctcttttttctcccctgagatacatcatttgaaaaaggtggcacctgttccagctcaaatcattcagcagtgatcttggtaataagtactttcctgaaaaaataccagtttgaagaaaagtaatatttcaaaacactgcctagtccttcacatttgtcccatgtatctttggcttcactcagctaacatccactgatatggattaaaagttaaacctgtttgtcttgttcctttttctactgacgcacgcaagagagaaagctctccagggaactctcctcatgaataatatcaaatttcaaaccaacaagtccacatccgaaaagcagaatggtagaaaggcaagaccttggttctaggtcctcctctttcactgtcactggacaattactaaccaaccaagacctctagttcccatttgtgaaccaagggcattgactaggatgtggtgatgataatgactgcagcaactacctcttgagtgtctctatgcaccaggcactgtactaggcatgtccccaccacgtcacagtgcacacagaatctcatttcgtaaatgaggatttatgaggcatcacagagatcaagtaaacttgcttaagcttctatggccaataatagtgagcagactc

SEQ ID NO: 726311 - DNA, 1673 bp, Homo sapiens
tgtcctcctttcttcccccgcacagtgcaaacacacaatattgacattccagcctccagctactcactcttcccaaataggtccctgcttccaagtctcagcacctgtgcttcactctgctgcaataccttctcccccttcctggcttgtgagctattatttatcttgcaagacccagctccacaccctcaggcaagcttcatcactcttcactgtgctgctagagtaggccctcccttaaggctccaaagtcatcacttatatagtgtttgtcattaggcaaaagcctgttccactttcaccagcctgggaattccttaaggccatggaaaccctggggcctggcatatagtaggtgctcaagaatcatctgcagaagacaaggcttatacctgaaagacaggtacaaacataggcttaataggctctctagaaattatactgattgataccacaaactaatttgggggccagatataaagaaaccatcaatgagaatggtttccttcgtgtcaatgtaatagtgtattatgtgttttagggatacataaacaggaaccaaagcacactacttattatgacaaggcgcttataatgatttgcatttctctgcaaaactctttaggcatataattttgttaatttgtgacaaacctcaaaaacacacttaccaccaataccttgattgcaatatatactttcaaakcacacagaaatcaagttcctttcaaaggtttccaaaagagtctgaagtgcgttgttttgtttggtttgttttaaatttgggaatttaaatgcagatcataatttataatttaacccagacttaagggaagaataatttcacaaggatgttcaagaacctgacctagccttcttttgaatgttggcactgacaatgcgtgaccttgagaagtctgtttaatctgagactgtttcatcctcagtcacatgggaataaggagagtttgttgagaggcttttaaaaagcaaaaataaataaataaataataaaaagcaaaaactttgaaaacatggagtctcttttttctcccctgagatacatcatttgaaaaaggtggcacctgttccagctcaaatcattcagcagtgatcttggtaataagtactttcctgaaaaaataccagtttgaagaaaagtaatatttcaaaacactgcctagtccttcacatttgtcccatgtatctttggcttcactcagctaacatccactgatatggattaaaagttaaacctgtttgtcttgttcctttttctactgacgcacgcaagagagaaagctctccagggaactctcctcatgaataatatcaaatttcaaaccaacaagtccacatccgaaaagcagaatggtagaaaggcaagaccttggttctaggtcctcctctttcactgtcactggacaattactaaccaaccaagacctctagttcccatttgtgaaccaagggcattgactaggatgtggtgatgataatgactgcagcaactacctcttgagtgtctctatgcaccaggcactgtactaggcatgtccccaccacgtcacagtgcacacagaatctcatttcgtaaatgaggatttatgaggcatcacagagatcaagtaaacttgcttaagcttctatggccaataatagtgagcagactc

SEQ ID NO: 726312 - DNA, 2518 bp, Homo sapiens
agaatgtgagtggctcaaagccaggaagacaaatcctcaagtccttgagtagtctgatgagaactttatggactgagaggcacttctctcaatccagcaggcagggcagatgactgccaaggcattctgcaataccttgctatccaaatagactttggggtccagttttccaagattgagtgacactattgtaatgagaatcttcactggagcatcagaagaactgatttcaagccagttttgttggtcagcacggtcaaaacttcagaaggatcttgtgctctgaggctttccaaagctttgttccccagggcagtaacagcttccagtgttggcagagtctttagtattatcaccagggcagctgcactgtggcctgtagccatctttctcttttagtacgatcccacctgtcagacttcttgaatttgcacttcaaattagagccacaatcaaattatcagtcacgttgtttatttttgtcaccagagaaaggacagagtcctgttcagcagagttgggagccaggtactgatctctcttcagcaaggcctcactgaaggacatttcatcaggtgctggcttgacccctgggaaggccatttcacacagatggaaatcaaatgggatatgtggcacaaagagcctgaaccctcctcttgggcctcttctggaaccaaagcgcccaccacgaccatggcttctgtcatctctcatggcaccttaaatcccccacactggaggctgcactaaccacccctttcctctcagatacctcattttaaatcatggtaggcttaaactttataagcctttagcattacacattccattgtttatctttcattctctagcatttatgaaggtagaattttcctctccaaattgtaatgtgatgatgaaatagcagaaaagatctcacttttctccccttggaagaaatatggaattcagaaatacagtctagaatctgtcctcagctcagccattcctgattcagtgttacaattgtccagagagggcaaattgcctttggagctgagagggtctgttacaagattctctagttattcctgtaactagaatgcattagccttagaagaggtgtttgtatactgggcgagggatcctagtttgaatgaatgaatgaataagtgaggaatctaaaaagccattgggaggcttaaagaatggcagctccttctctggctctgctgtgagtcatcattgggaaaataagcagccttcactttagtagagggcaaggcagcatcctcagtggaaatcctgccatgcagttggagttagtgttctgggaaaaggctgagagttcagcagagtttatgaacttgggagttggaattctagaagagcagctatgggaagatgatttgctaaggaagaacgtagaaccaaattggagtgtgtgtgtgggaggggtgggatgactagagaggcttatattttggcagcttaggaagacctgggtgaaatgaaaggtcagatgaaacgatctcaagcttccattgtgaaattgtttccattctgcagcttcaggggtatgtgtgatcttgtcatctttcctctgtcctataatctctccacaaggcctgtgctccatacagtccagcacatagtaggtgttcacaaaaatttatggataccatgacttcattaagaagcatacagacaggaaatgcagaatacaggcttaggtcttcattgctcctaactgctagaccttctgtgtctccaaattatttttgttaagttagttcaaatacttgcagtgctttcctgtagaagacggattcagccagttcaaaactacctctaagggcagaactgaggacactggtagaagttagtgggaagtagattttggcttagaattttctaataactaaatttcagaattaaaagggtactgttttttaaaaagtagtgagcctcctaacacaggaagcatgcaagtaaaaaactgcatgtctatgtcttagggatgttttagagaggatcccttccaccaccaagagtttcgtattatttctgttattgtgttaagtgatggtctaatatgataaaatacaagtaatctattttggaaaggagacatagatacaattattgaaaagcacaataragaaaaagattgcatctatattattgttatataaccatatgccaatatgtctagtacatagtattagaaaatgtatcagggtgtaataagtaactttttagaatgccctatgcagaatgtagaagcaaatctgaattaaaaatgcagaaactgaagaggactggagtcattagggaaggcttcatgggccagctggttctttaacagggccttggaaaaggttagaatgaggacaggcaaaggggaagtccctccagggaggactgtgcaggagtattagtgggaggaggtgttgggaggaggcaagatgattgggctcactcagggtctctgtacgtatgtgctttgcacagcgaagatgggaacaatcaatgg

SEQ ID NO: 726313 - DNA, 2518 bp, Homo sapiens
agaatgtgagtggctcaaagccaggaagacaaatcctcaagtccttgagtagtctgatgagaactttatggactgagaggcacttctctcaatccagcaggcagggcagatgactgccaaggcattctgcaataccttgctatccaaatagactttggggtccagttttccaagattgagtgacactattgtaatgagaatcttcactggagcatcagaagaactgatttcaagccagttttgttggtcagcacggtcaaaacttcagaaggatcttgtgctctgaggctttccaaagctttgttccccagggcagtaacagcttccagtgttggcagagtctttagtattatcaccagggcagctgcactgtggcctgtagccatctttctcttttagtacgatcccacctgtcagacttcttgaatttgcacttcaaattagagccacaatcaaattatcagtcacgttgtttatttttgtcaccagagaaaggacagagtcctgttcagcagagttgggagccaggtactgatctctcttcagcaaggcctcactgaaggacatttcatcaggtgctggcttgacccctgggaaggccatttcacacagatggaaatcaaatgggatatgtggcacaaagagcctgaaccctcctcttgggcctcttctggaaccaaagcgcccaccacgaccatggcttctgtcatctctcatggcaccttaaatcccccacactggaggctgcactaaccacccctttcctctcagatacctcattttaaatcatggtaggcttaaactttataagcctttagcattacacattccattgtttatctttcattctctagcatttatgaaggtagaattttcctctccaaattgtaatgtgatgatgaaatagcagaaaagatctcacttttctccccttggaagaaatatggaattcagaaatacagtctagaatctgtcctcagctcagccattcctgattcagtgttacaattgtccagagagggcaaattgcctttggagctgagagggtctgttacaagattctctagttattcctgtaactagaatgcattagccttagaagaggtgtttgtatactgggcgagggatcctagtttgaatgaatgaatgaataagtgaggaatctaaaaagccattgggaggcttaaagaatggcagctccttctctggctctgctgtgagtcatcattgggaaaataagcagccttcactttagtagagggcaaggcagcatcctcagtggaaatcctgccatgcagttggagttagtgttctgggaaaaggctgagagttcagcagagtttatgaacttgggagttggaattctagaagagcagctatgggaagatgatttgctaaggaagaacgtagaaccaaattggagtgtgtgtgtgggaggggtgggatgactagagaggcttatattttggcagcttaggaagacctgggtgaaatgaaaggtcagatgaaacgatctcaagcttccattgtgaaattgtttccattctgcagcttcaggggtatgtgtgatcttgtcatctttcctctgtcctataatctctccacaaggcctgtgctccatacagtccagcacatagtaggtgttcacaaaaatttatggataccatgacttcattaagaagcatacagacaggaaatgcagaatacaggcttaggtcttcattgctcctaactgctagaccttctgtgtctccaaattatttttgttaagttagttcaaatacttgcagtgctttcctgtagaagacggattcagccagttcaaaactacctctaagggcagaactgaggacactggtagaagttagtgggaagtagattttggcttagaattttctaataactaaatttcagaattaaaagggtactgttttttaaaaagtagtgagcctcctaacacaggaagcatgcaagtaaaaaactgcatgtctatgtcttagggatgttttagagaggatcccttccaccaccaagagtttcgtattatttctgttattgtgttaagtgatggtctaatatgataaaatacaagtaatctattttggaaaggagacatagatacaattattgaaaagcacaatagagaaaaagattgcatctatattattgttatataaccatatgccaatatgtctagtacatagtattagaaaatgtrtcagggtgtaataagtaactttttagaatgccctatgcagaatgtagaagcaaatctgaattaaaaatgcagaaactgaagaggactggagtcattagggaaggcttcatgggccagctggttctttaacagggccttggaaaaggttagaatgaggacaggcaaaggggaagtccctccagggaggactgtgcaggagtattagtgggaggaggtgttgggaggaggcaagatgattgggctcactcagggtctctgtacgtatgtgctttgcacagcgaagatgggaacaatcaatgg

SEQ ID NO: 726314 - DNA, 994 bp, Homo sapiens
gaaaatagttatattcataaaaatgtgttatttatrtgtatttcattcataaaatatgttacttatatgaaatggtttacattaataaatacgtatttaatatcatacatgcttacaaaatatcttcacaaacaaaagctctttggagtcttcaataatttctaagaatgtaaagggttcttgagataagcaatttaggaattattgctttaaagacttccattcttgctctttatttctcattttcaatgacaactatctgcatataacagcaatgaagtggtagtgccagtgctgcttcaagggcgtgaggagatgaagaccaatgtatctccctttctcttgactttttcctcatggttacagtgtggctgctccagctttgggtctgcattttactccaaaggacacaggaaagctcaataaggaataaggacaagatctaaatcataaactgaaaacattagccatgaatatatcccttcccccacgtacagattcttgcttttgtctcattggccagatggttgctatgtatacaccagatgctgcaagtagttttatatctggatccattgctatccacaacagaatcagtgttccggttgtaatgagtgaagaatgtgtgtaatagaaaactagccgcagctgcattacttgatttgttcatctgtttttaaacaggaaaataaaataaccaaaagtatgatagaaacaagggattttaaatgggaattagtgctcacatgaagatgtagagaagatgaaggaaaggaagaaggtagaaagagaactgaagaaacattcttaatccacttaatctcaaagccctgtcatgaatagaaagcttagtttgcagacaggtccgagaggttgcatgcatctggccattgtgaagttgaaaccttggggaggtatttggaagctgctatttctgggaatgctgccatttctatggaagctgctgtatctgttcgtgggagccaccatatca

SEQ ID NO: 726315 - DNA, 2534 bp, Homo sapiens
gcccctctatgcctagcatggaactaatgcagaatgtacccatgtagtgtattgtcactgaatgaataatttagtctgagtaagtctatatccccaggactgattttgtggatgccagccatctcttcttggatttctttgccttttaattaacttcccattagacttgtggttcttagtgacctcctgagggcctgaaaatcagaaggttgcagactgggccatctattttatgggagtaatataaagacatactctctttggtcacgttttcagaaccttttgacyaaatgggcagaagtaattgggaataaaaatgtgttgggaagtagaagttataatttcttatttttttctaataaggactttaattctaaattcattcatagctttgttttaaagttattgtcagtattttatgaagttaaagacaaattcaaacattaatgattctagatgttttgcttcaagtatctttgccactgtttcctcctgtgagatggagtctagattttctttccttctcttcctctctctctttttcttctcttcctctctctctttttcttctcttgtacagaataagcctgattttttttaattttgtgatattttaaaaattctcttttattttgattgatattgcatatgcttaaaaattggtagaagaggctgggtgcagtagcacatgcctgtaatcccagcgctttgagaggccaaggcgggtggatcatgaggtcaagagatcgataccatcctggccaacatgatgaaaccccgtctctactaaaaatacaaaaattagctgggtgtggtggcacacacctgtagtcccagctactgtggaggctgaggcaggagaatcacctgaacgcaggaggtggaggttgcagtgagcagagatgatgccactgcactccagcctggtgacagagcaagattctatattaaaaaaaaaaaaaaaattggtagaagaattcaagtgagtgaaactgagagtttatggttttctccagcaaatcagtgagtgttttccctgaacatggatgctttggctctggtcttcacactctgtgagatgaggaccagcccttgtggcctctgacttccaagacttcagtacctgagggtattattacatattttatgagtttaaaaattgaggaaacttttttcccctccaacagtgaaacattctatttatcatttgttgaacctgtctagtgagtactgattttgtagaatacttccccaaaagctgattttccagattcagttcttttcaaactgcaaccagcccggctgggcagacagccctctccttttgctccgctttattcttcctgaattgactttatcactgtccctccagccatttccaggattcatcacagattatctctgcttgttggcagaaagcaagcaccgccgagactgaagggcacaattgccgaaaggttcttctttcagttcagtcctcattctaatttttaacttatttggtgctgctgtggaaaagctgtttgcctgaaatatggtaaataaataaataatatcctacatatggagtccataaaataggatgcagaaagctaggagctcaaatttagatccaaggcagtaattctccttgcttctttttccgcttcccttcttagcctcccttttctccttaaatgatcaggctgaatggggttgtcaggattgaaagaacaggatcccagattttataaaattgtttactcctctctgtttgaaatgtgtaactttgcagaattgagtgtaattccagtcatctcctaaaaggctgggatgatggccagggcgaatgggcttcctgaccttttctgtgtggagaggcttcacggaggagcactgagggcagaagacacagagccagtcttccatggaggcgacccatagcagcgggatccagcaatgtgtgaagtcatgctggttttacatatgaaccaatttgaatagaatccttcattttttttacataaatattacatcttaaccttttcatagaagagcctcggttttctttccaaaggtataaaggcgaggtctgtgtttccataagcagagaacatttatcctctgtcctgcctccctctagaacaaaatccattgctgtcttaatttccagttttgattgtagctctcagtgtgagacctcccagtgctgtagagtgtgtttcctctatgaggctcactcaccacaggcataaagatcggggtgaatttcccagccgcctacatccgggaatctctcattcggactcagcaagatcatttttatttttgaccagaaccttataaataaatcacaaatatataaatgtgatagggaaggcgcccatcacaactatttgttcaaacaaatcctgggcccaaagaaggagtgaaaaattaacttcctatcactttattttagtagttcatactgacagcaaatatttaattatccattattttgaattccacattaaaataatactcataaggtttggattaatagaaaatactca

SEQ ID NO: 726316 - DNA, 1461 bp, Homo sapiens
ttggccaggctggtcttgaactcctgacctcaagtgatccgccctgcctcgaccccctcaaagtgctgggattacaggtgtgagccaccacacctggccgagggagtcagttttaaaatgtcaaaaaaaaaaaaaaactcagttaaaaattattttcagaagttgcataattcactttaaaaaataaattatatatatatatatatatatctccatgagaaggacttccagaagggcaaaggttttcttgtaatatattgcaactaatgatattaatgatattaatactaatatattaattatatatatgatattaatatgcagctgggatattaatgatattaatacccagctgggataaagttartaatgataaagagttatagtagattgacaagtgataattattcccaattaactaaaattctaaggaagggaagcagtatacaaattcaactggatattgttctgaaatatatgtatttttaaataaatataggtacttttaactttttaaatgtctaatggtctttttttcaccataattataattcgacttaagccatttatttaaaaaattttcttcacatctgagacttgcttcaaattagttcaggagaaggagaaatgattgagaatatagataaatcaagattggccatgaattggtcattgttattaacaagtaatggcaatttgaattttttatattagtcattctattttttcacagtttgaaattttccatgatttaatgttaaatacagatgttttactcataagaaacgttttataaaagacatatgagtaattctgttgggtttcactttctgagagctggttgttaaatattactaatcctaaaggagtttaagaacattaatttttaatctctgtcagtttaatgatgatctctgacaattagggagcacctgatatgtattgtttaatcaaagacaaaaccttcatacatatgaacgtattttatatccaatagtcatttgaagtctatggaatctacctattcatttttttttcttattccttgcaaaaagcctatgtttaaacatgaagttttagtcccctgcagcagcaaaaagtagtcttcactatgtaaatcaatgcaggactgtcacactaagcctcaagccaaacagactaaaacaatatgaccaaaggtgatattaatgaagctttattttaggaataaaagatgcaccatttatatattaacattattagtccagtatatcaaaacaaatagcttccattcacatatattgaataactgggaatgaaataaactatttcaacatcaggctatattgggcaagaatagccctccatagattagagtggttatacttttcccttacttcaggttcgccaactggtatgggatatgacatttagatagacaataacagtgatttgttttattttctagaaggaaagataata

SEQ ID NO: 726317 - DNA, 1416 bp, Homo sapiens
  misc_feature 1315, 1316, 1317, 1318, 1319, 1320, 1321, 1322, 1323, 1324,1325, 1326, 1327, 1328, 1329, 1330, 1331, 1332, 1333, 1334,1335, 1336, 1337, 1338, 1339, 1340, 1341, 1342, 1343, 1344,1345, 1346, 1347, 1348, 1349, 1350, 1351, 1352, 1353: n = A,T,C or G
  misc_feature 1354, 1355, 1356, 1357, 1358, 1359, 1360, 1361, 1362, 1363,1364, 1365, 1366, 1367, 1368, 1369, 1370, 1371, 1372, 1373,1374, 1375, 1376, 1377, 1378, 1379, 1380, 1381, 1382, 1383,1384, 1385, 1386, 1387, 1388, 1389, 1390, 1391, 1392: n = A,T,C or G
  misc_feature 1393, 1394, 1395, 1396, 1397, 1398, 1399, 1400, 1401, 1402,1403, 1404, 1405, 1406, 1407, 1408, 1409, 1410, 1411, 1412,1413, 1414: n = A,T,C or G
tgcctctagttctgcttcagagaattccactttaggtatcttctttggctagtcctcttgatctgtgagagtccaggccatttccattatggctgactctccttgcttcattgtcagggcagctggggcagccataatcagtttctcttcctgagactttccacctgagggtctaacaccacctggggaacacagtctccaccagatttcctgaagcctctttcagactggggtcaaaccaccctgcttcccaccaacactgggtgagggagggaaaatccacagcaaaccaatgactctccccatctctttctttgatagtttactcttaattgacactgccttacacttgtgagtattgggctcaggccatgacaacctttcttttcccccatctcctctgcaagtcatgcacaaatagcccaatacttcattttagaatgtgcaagtgcctgccacctattgttttgttcttagctttttatgactgtagcaaaattagagacagatcagcaattagactatcaatcaaacatattttccaggtattgataatagcaatamttccaaataataaagctaactgtagtatattatattattgaggtgataggaaagtctttttaaggaagcaatccactcaccctaaagggattttgcaaaaaggaaatagggaggaacagtggtattgagatgaccttgggcttatttcccaaaccaaactattttgtttttgagatggggtctcactctgttgcccaggctggagtgcagtggtgtgattatagctcactgcagtttcgaactcctggcctcaagaagcaatcctcctgcctttacctccttagtgactgggattataggaatgagccactgtgcctggcccaaatagaacttaaacaacttgaaggaaagaggaagggatcatgagttatgcttctagagtgctcaacattgctgctagcccagcactgttcaatagcaaatattcagtattttttttttatttaataactaaatgactgaggaggtaaaaagcagagctgtcccttgttgatagcggatttgttagccatatgaattcatacccattaaaatacgccatttgagttggtcaagttggtgggtgcagtgttttgggtctaccaacctctgataactcttctttttgctcacagttttcctcacttcagacccagcctttttttgtttagaaaaagcattaaaaaaagcactagaaaaaacaaactgtgatgtacattttagagatttttaaagttcaaagcgaatctcaggctgaagtttgaaacctgtnnnnnnnnnnnnnnnnnnnnnnnnnnnnnnnnnnnnnnnnnnnnnnnnnnnnnnnnnnnnnnnnnnnnnnnnnnnnnnnnnnnnnnnnnnnnnnnnnnnnct

SEQ ID NO: 726318 - DNA, 778 bp, Homo sapiens
tatgtcaaagaggcagagaacaaatttgcaattgcatgttttctaaagtaaatgctctaagaaaagggaggaagagcaatctccctggttaggtcacctggattctgtaggggccagagtaggagggaggtgaggtcttrgaggcagaaagaagactgtctaaggtttattcaagctgagggaaaccctgaggctggcttgagcaaagcccatgtgttggcagagataggatttacgctgccacaaactaaggatgccaggacctacaagaggcataggaagaatacttccttaaagctttcagggggagcatggctctgccagaaacttaatttaggcttctggatgcttgatctgtgagagaatgcatttctgaaattttaaaccacccagtttgttgtgataggtgatggcagtcatagaatatgaatatactatgggccataagtcttctttctccccaagtttggatgtagccctggaagtaattggtaaaaatcttactttgggattaattacacccactgtggaaacctgagaattgagagaaattgtcctagtaatatcgatgaaatgcaaaatcaagtcaatatacattgggcctctatttatccatcttgttttttgaagcaataaatgccatttaggttgatgtagttttgagatggaaccctgttacttgcaaacaaaaacatcttaattggtgtatgcactgcacaactcgggagagcagccccacatagattacagtgtgaatggcactttctggaattattca

SEQ ID NO: 726319 - DNA, 636 bp, Homo sapiens
tggtgaaaccccatgtctactaaaaatacaaaaattagccaggtgtggtggtgcctgcctgtagtcctatctactcaggaggctgaggcaggagaatcaccacttgaacctgggaggtggaggttgcggcgagccaagattgcgccactgcactccagcctgggcgacagagtgagactccgtctcaaaaaaaaaaaacaaggctgggtgtggtggctcacgcctgtaatcccagcactttggcaggccaagatgggtggatcacctgaggtcaggagctcgagaccagcctgaccaacatggagaaaccccgtctctactaaaartacaaaattaaccaggcatggtggcgcatgcctgtagtcccagctactcagggaggctgaagcaggagaatcacttgaacccggaaggcagaggctgcggtgagctgagatcatgccactggactccagcctgggcaacaagagtgaaactccgcctcaaaaaaaaatagtaataataaaacttggtaatttccaatgttacaactttgtaacattgagtatgcacacacacacacacgtgtgtgtgtgtgtgtgtatatatatatatgtatatgtatagtgtaatgaaatgagaagtagatatgaagca

SEQ ID NO: 726320 - DNA, 1331 bp, Homo sapiens
gaggagctggcaccatttcttctgaaactattccgaacaatagaaaaagggagactcctccctaactcattttatgaggccagcatcatcctgataccaaaatctggcagaaacacaacaaaaaaagaaaatttcaggccaatatccctgatcatcaatgcgaaaatccacaacttttaaaaaagtggtctgactttttgcaataattgcaaagcagagggttgggttcattttgaggtttatagggacattttagagacccagattggatatatagttgtttcaactgtaaactcagaaatttattagccttactcttttgtttgcactctttcctctttcttccttagttaaggtacaagacaaatgattgccaagattaaacaaattgtgtttgagaaatagcccaactacagcattgtcttatttctatgaatgctaatttctcatctaacccatttatgaaattggaattgaggagagtatcattttaatgattagcataactcacttcagataatcctgagtgtttaaatatattttttaaaatctcccaaaatatgacatcaccgactcatttggattttgttgacatggttttattctagttaactatttctgaaagactaaagagatagcatcaagtaaagatttagcagtatcataggcatgttcacaattagtttctgaaaatttcagaaagtctccaaaggagttcctccaattttccttagctatccaatctttagctttactttctcttactaacatgtgaattaattaatataaatcagaaaaaccaggatcatgagcttgaatattcagttcaaattagctggcaaaactaatagagtccttgtgagggttgggaattctttaattattcgttttagttgtacctttgaccatggttaataaaccaaagcaggttatccttcaccagacacctgctgttcacaaaatggagccaaaacagcaggtgtcggagaaggaggaggaacagaaggtacaaatgggcaaggcagtccagaccatgaaggataaagagaagaaggagctaaaggaggaggagaaattttagcagtctttttaaatacaggaattgttttaggtcatctttttttgtttccttcctgaagagaaaggactttatcagaaccccttttggaagtttccaaataccrttgaaaacaattttcacaattgttctatttcagagtcagctttttctaattgagcatgcaagttaactaatttaggcattaaaggtagtgcattttggccgttgtaatttggggtcatcaggagttatgtgtgatcaattttctaaa

SEQ ID NO: 726321 - DNA, 3226 bp, Homo sapiens
  misc_feature 1070, 1071, 1072, 1073, 1074, 1075, 1076, 1077, 1078, 1079,1080, 1081, 1082, 1083, 1084, 1085, 1086, 1087, 1088, 1089,1090, 1091, 1092, 1093, 1094, 1095, 1096, 1097, 1098, 1099,1100, 1101, 1102, 1103, 1104, 1105, 1106, 1107, 1108: n = A,T,C or G
  misc_feature 1109, 1110, 1111, 1112, 1113, 1114, 1115, 1116, 1117, 1118,1119, 1120, 1121, 1122, 1123, 1124, 1125, 1126, 1127, 1128,1129, 1130, 1131, 1132, 1133, 1134, 1135, 1136, 1137, 1138,1139, 1140, 1141, 1142, 1143, 1144, 1145, 1146, 1147: n = A,T,C or G
  misc_feature 1148, 1149, 1150, 1151, 1152, 1153, 1154, 1155, 1156, 1157,1158, 1159, 1160, 1161, 1162, 1163, 1164, 1165, 1166, 1167,1168, 1169: n = A,T,C or G
aaccgattcaccctttcaagcaatcacttgaataaatacatagaagagtgcttataagataggtgggtgacatgaagctatgagaggtgcaatatgttttgaatgacagaacaagtttcaaaaggatctctcaagccatacttcatttatgacaggtaaagtcaagaacttgaatccaaatataaaactgaggagatcgggcttaacagcagcatgtgcgaaaagagttcttaaaccctttaggtccaagttgagagtaagttcaatatggggcagcagtgcagtggagcttccagaaagtattacatatcaaacaaagaaacagtggcagtggtcagatatacttgtaatgtcaggtttatttcaccccctcagtaatcccatgacactcactgaaatgtggtatgtcatcagaattttagaagccagagtcttcacaaagcaatggaaaactccaaaggcaaagaaattccaaagcaaaggaatgtaatttggcagtgtgcttgatgaatgatcatggcctgtgtatctagaatactatcaccaaagacaagctgttgatatgctagagcaagatagggttttacaaagactttcccattccccttagtgaaattcacagaaagttgctcatctgaccgaaagcaggggaaagaggaggaactgtaagtccctcatggatagtgcacttgggttctttctttatcaagacttccttttccactaagcacttatgtaaatagttcaaggacatagttatacatgtaatcctctgcagagtttttttgttgttttctccctgtcagagcagtttttctaaaaatgaaattcatagatcatttgtccctcaagagccaggaaaaaaagtgatctgtggtcaaataagtgggtacatttagttaacagtggttttgtattctgcttttaaattgaagatttatttgttatcgagtaacaaaagaacataatttttaaaattaggtcctactacaagctaacatccccaaggctcttcatcccattcttccacaaacccaatcccctttgtaggagatttgtcatttacatannnnnnnnnnnnnnnnnnnnnnnnnnnnnnnnnnnnnnnnnnnnnnnnnnnnnnnnnnnnnnnnnnnnnnnnnnnnnnnnnnnnnnnnnnnnnnnnnnnntcttcctttctccatgggaatccaggaactctgcagaagataacaacggcttccatgataagtgtaaagtgtgtgtgtgcacacgcatgtgtgtcctgcacaagtatgaaagtatgactttccacttttcttggatatcatctaccyggtttatgtctttagtacctcttaggactcactcaacaatttaagtgtcaaggcaatgtcaccaaaaactttatttaatgtcacaactctggcagctccattcttgaatgatgaatcttgtaaaggcactccaagcgtttttcaaagagaaaagagaaatggaaaaatctcaactgtgcccgcatagaggactctaaagtccagggctaggccacaacatttactaaagtctactgcgtgctgggcattgtgctaggtgcatggagaaagtaataatgccttcgctcaaaggaagtgaagtccaggagaagactagacatcagtgaaacaatcacacatataaacatgtaaagtcagacagccacaaattgtacaaagacaaaataccctcataggaatgcagaactctgcacattactgcagcctctcagaatacatgaaaactgtgtgtgtgtgtgcctgtagacatgtgtgagcctacgtgcccatttgaagttgtactgggccaggaatgagaataaaaacatcgataattcaaagattctctaagagacaaggaattggggcctgcttggggccttctttttgtcacttctttgacactccatggtatgactagaaatgctggaaccagaagctaattcagaatttctttgcttgggcttggcatgtgcttgtaatgaaagtgaaattaggagtagaggacatgcaaataagtttgctctccatcaaccttgacttcccagtgcataggcaataataaagtcacggtgaaggaagtttataataaaattacttctcaaaacaggtacgtttgctaaataatgtgccattgaaccagttttgttgaattcaattatgtgatattaagtcgtgtgctgcatgcaaggccctgttttaaacattcctgtgagcaaatgcggaggtttacaatcactctctgccctaaagaagcaatgatttgaaacagaattggcatcagaacaaattactgtaaagaacaattcaaccctaccagttagttttaataaatgtgtttatcaagtttttaatggggccaagtggaaaggcagtgccttatgtgcagccttgtgacataatggaaaatataatttcataatgagttaataataaatgtgtatgggctaagcaagagcacagttcattttaaagactcattaagtagaagatttgaccgtgtctctgaaatgaaagtgtgcacacactgtttcaaaatgaagtggagttgaaagcctgggattgcattgcttgatcaactcttcctggaaaagcaacagaatttgtaacacttgttttgtcactcttgctttactctttagagagtgataaaattattaatgctctatttttttttaactaaacagaaacttctgtttaggacagactacatggaaatgttcaggaaactgatttctgcataagcatatgtggctgcctctagggcaagaagactggggatatcaccatgggctcaatgttcattgtgaagaagcctcaaggaaattgtaccttatgattaaaattttacaaatgacatatttcacaaattataatgttgccaattaaatgtacacatttctatgcaaacatgcattacttgagttgttctaagctcacacctttacagcactgtgcatatgtgtacttgcaaatttgaaactaagtagtatttcaaggatacaaactactcacgaggtgcagttagagggcttctgttgcagggaaggcttcctgggaacttagtgagcatgatgtttcttagggagagcccttagtagccacacctgtggaagggtggggacagaggcaggcagagggagaagtgagttgtaatgcaggccaaatgagctccagatgacctcactggaagctatgaaggtcaaataacc

SEQ ID NO: 726322 - DNA, 861 bp, Homo sapiens
ttacatttcttctctacacacacattttaaaatttttagtgggttttttatggaagtaagcagaaaagtacaactcataagcattcagtaatttgttattgctggaattcctaaagttgtctcagtaagttgttaactgacagttatagcataaacaaagagtattggtttttcacgcttctagggagcaagccataaactcatgcctttctctgcactcaggcaaagcataatggtaccagaacactcacacagtactataaaaataaataaatactcattaaaagaggcagaaatatagaaatattttattctaaaatgataaaaaacatgtatctcaaacaaacagctaatctcatacttcattaacattaataaaaaatcaagaattcccatcattaaaagtactatctgatgtgatttgggacataattagccaatgaaatttgatgagagaaaaattgagagcagaagtaaagaaaacaggaaaatatctttatttgtaggaaattcatctctctgccttttttcttctatttctctcatttctactttgtttctttatattgcatttcttcccactagacctgaactccataaggaaagggatatttatttgtctgtgaccctaagtgttttgtgctcagacctacgaccatacctcataccacataaatgctaaataaaactctgttaaatgaatgaacaaatgtatgttatgattagattgttaatctaactggaaaattcaagtctccataacatacayaagaaaaaagaagagattcagaataagagaatttatattcaagaaataataagcaaattcagaattcagtctccataacatatacaagaaat

SEQ ID NO: 726323 - DNA, 861 bp, Homo sapiens
ttacatttcttctctacacacacattttaaaatttttagtgggttttttatggaagtaagcagaaaagtacaactcataagcattcagtaatttgttattgctggaattcctaaagttgtctcagtaagttgttaactgacagttatagcataaacaaagagtattggtttttcacgcttctagggagcaagccataaactcatgcctttctctgcactcaggcaaagcataatggtaccagaacactcacacagtactataaaaataaataaatactcattaaaagaggcagaaatatagaaatattttattctaaaatgataaaaaacatgtatctcaaacaaacagctaatctcatacttcattaacattaataaaaaatcaagaattcccatcattaaaagtactatctgatgtgatttgggacataattagccaatgaaatttgatgagagaaaaattgagagcagaagtaaagaaaacaggaaaatatctttatttgtaggaaattcatctctctgccttttttcttctatttctctcatttctactttgtttctttatattgcatttcttcccactagacctgaactccataaggaaagggatatttatttgtctgtgaccctaagtgttttgtgctcagacctacgaccatacctcataccacataaatgctaaataaaactctgttaaatgaatgaacaaatgtatgttatgattagattgttaatctaactggaaaattcaagtctccataacatacacaagaaaaaakaagagattcagaataagagaatttatattcaagaaataataagcaaattcagaattcagtctccataacatatacaagaaat

SEQ ID NO: 726324 - DNA, 1401 bp, Homo sapiens
  misc_feature 576: n = A,T,C or G
tttctctggcatttagcttcctgagtcatggctcctttatgtttgccagcacacaaaccaatttcccctaatcaagagcacctcagcaagcatagtgtggtaaaaggtgttctgccagcaggcctttgtggtgatgagaagatagccacaaccatcatctatcaagaagccccctggtgtgagccttcagctcacaatgtcagaaaagtagaaaagaagatacttgcaactgtactcttccacattagcaactctttccctttaaacatacacacatacacacaaacatatctacctgtrgacacatgtgcaaacctatgcatactggcatacacaaacatgtgcacacatacatgtacatatgcacgtattcactcatacacacacatatgcacacaaatacacaaggctgccaggttatcagcgatggcaaagggtgattcacagttctgactttttattagtctggtaagagttgggaatagggaaagtttgtttgggtaattttctcaccattacaaactaaggaagttaaagctagacgtgattgtgatagtgactctgcaatggtgaatntgaggacttgatctgaccacattttacccttcctttattcagtggttttggaaacaaattcagagcccttgtgtttgagaacacttcaaactcatatgggcaatctggaaatcctggttttgcagtgtttgaggagcacgccagtgtgcttggaagacagaaagatttagataaaaggaagctgtacatactttcccctgttttatgttatcatgagttagaaccaaggaactaccagttctttcttttttttttttaacaagcaaaccgcatttttttttctgtctcatggttggaaatgtctttttcctctaatcttacaaacggctacttgtaattatccaagaatcataattccaggcaagccacagttgaattaggctttatagttggcagtaatcagaaatgtgacaatttcttcctcttcaatactttgagtatatgacacacacacacacacacacaaacacacacatacatatatatatatacacacacacacatatacacacacatgtatgtatgtaagtatgtatacacatacactctcttctggataaaaccagggtaatttcccatagagcccaactggctttttgatggatggtgtctgtaccaacatgatctatttgtgctttcaggtcagggcagttgaggtgggcaggttgaagcaaggtctttcccaaactgaaaacctgggtggaaggttagacgtcatttggatttgctgttcacttttggacatgaaacaatcccatgcacaagtaaatcatttagtgactgtttaattttattgatcctcatatttttctactgagacataaa

SEQ ID NO: 726325 - DNA, 1552 bp, Homo sapiens
tggctattatttatctccttatatatatgtctttttttgtttgctagcatataaatctctcggaggcagaaaacatgtctgaaatctacagcatgtagatttcatacagggcacagtggttgaccagtaatgagttcctgcaggaggggacccttccagtgaatgtagacctggaaaatgagattgtcctatttattcctctgaatattccccagcatctatcacagtgctctttataaagtaagtgctcggtaaacgttcattcgtggtgatgctaaggaccggaagggtctttaaccttttctctccctcctagctcagccctcacggaaccctaaaagctggctaaggggccattctcctcgccacctgggcctgcgtctgccgaatcgcttcctaaggactttgactagaaaccaaaggtcccatttttcatctgccatttatttatcattgyataacttaggtaagtccctccgccttcactgtcagttcttcactcattgttttgcatccaaggagtctggaaataagcgggaacaccctgcacgtgagaggggccctgaaattcacgaggggctggggctttgcgtttattcctccagttccgcctgcagcaaccctgacgatcgagcagggcccgcgggggagcgagcggaagcgggcagcgtgcgctgctgtcccgctacccagcccgctaggctgcgcagctgcgtctgcgggcggggagccggggcggccgtgggcttcctccgggcgcgggctgacggctgccgcctgtgggcgccccagccctgcagccgagcgggaggggcggaccagcgggtgtcgggagcaggctgcagcggccaggcctctgcggcttctcggagtactgggtccactggagagcgaagagccgcggccgccaggattcccagcagcggccgcgtgttgagagcctagaagtggccccgaagccgtgcctttcccgatagccaagcagaagtaggacttgaagcaccgaggctgggatgcccatgctggtgacgccttggggctcgcagttatacttggtgaccggtctacacggcgattcggtgctttccggagtagcagattcatctatctttagacccaccttcgtccttcggcggtttagcacggcctgcgctttcctgcgagccctgctgtcacccgaacagcctgatgacttcacgctcaaccactggagggcacaaccacatcatttttaaaaaatagattcctccacttaaaggacatggttttgggggaaagaacatttaaaaaatgtaaaaagatatatatctatatctatatatctatctcagattgttctgatataaactcaggtgggattcttcaaaacaggaggctgttccagtctcttcattttgcagctgagaaaacgaaggccttggagcttgagaactccagttgcccaaggcacacaggtggtgggtaaggaagctgatcatgtctccaaagaatccttccatgacccaggaggatccggtgggagagcagggccgtccacagctcagctaggaca

SEQ ID NO: 726326 - DNA, 1782 bp, Homo sapiens
agaacaaggcaccaaaatgatcaaaggaatgacttgtgcattaagatcaaaagacctggcagtgcaggtcaagaattggtggagaggggatacctggtacttgataagagtctacaaatatttaaaaggtgttaacagggaggaaggcaagcccaattttgcctgcttggaggtgacataatgtgaaacagtaaaggtaacaccaaagaatgaacaatgtagccagaagatcaggatctatttccagcaaagaactactgaggtttctgcaaaattacacaatgtgaagcattagatccactgtacccctagcagaaagtaaccttgaacaatttctatttgcagatcgctgtgtcttacgtctttcttgcctctattagcccatcattcagtacttaacaactcacctccttctacccgttacccaaattctttaacatctttaggggtcccatcaatgacagtatgcctactttttggaagaatatgatttatgtagcaaagctaagatagaaatttgcaaacagaagccgggcgtggtggcttacacctgtaatcccagcacttcgggaggctgaggcgggcagatcatgaggtcaggagatcgagaccawcctggctaagacagtgaaaccccgtctctactaaaaaatacaaaaaattagccgggtgtggtggcgggcgcctgtagtcccagctactcagaagcctgaggcagaagaatggcatgaacccagaggcagagcttgcagtgagccgagatcgtgcgactgcactccagcctggatgacagagcgagactccgtctcaaaaaaaaaagaaagaaatttgcaaacagaaaagcatttgaacagttgttgtcactttatgtgttccatatgcagcacatttgttaatccaggagtacagagtttagaatcatgaattttaagaaacagaggcaagcttgaggtgatccactctgatcagagaggctaggtgacttctacaaaatgcatgagccagagacttctgcaaaatgcacaaaacagagcagagactaaaacctaggttctcaccgaagtggggttgattattatcaggtagcattacctttctgttcctttagagacagtgtctcgctcagttgcccaggctgaagtgcagtggtgcaatcacagttcattgcagcctcaaactcctgggctcaagtgatcctcctacctcagcttacagaggaatcctttttcattttttaaaaaatgcagtagtttccatttctctttttttcctaaaagctatgacaaacaaattttaggactttttttttttccttggctggatttccaaagtctcacacttttattattgcttaggatggatttacttaaaattctaaactaggtttgttaatggtaaaggccttatagcaaggcctgagcaaaagtcaacccatctgttgcctttcatacaatgagatgcttgggctgagaggggaggctgctcccccacacaggaatgaacagctctgctcccctacacatgaatgaacagctctgctcaatacaaattctccagttagatcaagcctccgacggggcatgcctgaatctgaaacaggaagctcctgagctgtcaagaaccatgctaaacatagtttggagacactcttactaaacaaaacattttaccaaaaattaaactatggttatttcttctttacctatgtaaaccaaaaagtgactgagacaggtctcatttaatttagagatttattttgccaagaattgaacacatgcccag

SEQ ID NO: 726327 - DNA, 1302 bp, Homo sapiens
  misc_feature 502, 503, 504, 505, 506, 507, 508, 509, 510, 511, 512, 513,514, 515, 516, 517, 518, 519, 520, 521, 522, 523, 524, 525,526, 527, 528, 529, 530, 531, 532, 533, 534, 535, 536, 537,538, 539, 540, 541, 542, 543, 544, 545, 546, 547, 548: n = A,T,C or G
  misc_feature 549, 550, 551, 552, 553, 554, 555, 556, 557, 558, 559, 560,561, 562, 563, 564, 565, 566, 567, 568, 569, 570, 571, 572,573, 574, 575, 576, 577, 578, 579, 580, 581, 582, 583, 584,585, 586, 587, 588, 589, 590, 591, 592, 593, 594, 595: n = A,T,C or G
  misc_feature 596, 597, 598, 599, 600, 601: n = A,T,C or G
ccagcccgggtgacagagcgagactccgtctcaaaaaaaaaaaaaaaaaaaaaaaaaaaaaaaaaaatccctacctcaacgactgaatcacagtttagtgagcctctgccatggttgtacatggtcaatcctccccaaagaattagtttttaaagaaataattgaatattatttttccttcaaaaagtcaatattattagataatatcaattaagatattatgtattctgaaatgacacttaaacatcaaatatattttagtcatataatctatttttaaaatttcatttagcagctttgagatattcacataccatacaattcactcatatgtgatattatttttatgtaaaattttatctttgagaataattgagcttttgaaggcaaacctaagactctgggagattctatttcggtgccagccttctagtctcctgcctccacaattagctctgccagttgacaagctagaatctgaggccagataaactacatacannnnnnnnnnnnnnnnnnnnnnnnnnnnnnnnnnnnnnnnnnnnnnnnnnnnnnnnnnnnnnnnnnnnnnnnnnnnnnnnnnnnnnnnnnnnnnnnnnnnactagttattttttctgttgtacattttacatcgaaatctttattacacacacacaaaagatcagtagcactctcctttaccttcaccttttgtgctctagaaactattttacgtacatatttaatttcaggattatatttaaggtctggtactggctgtggtgacccccgacctttcctgcagcacactatgccaacacaggtctttcattaatgtcatccaaaatgcttgctgtgccttacctttaaaggtctattgatttatagcgtgaattcatccgacttttccattttgcaaatattctatttttaaaccaatttagtctttgctgactcatattttctcctgaagttaggagagtgagatgattacttcgctgataattcccatggaggcgttctgtgggcctgaagtctgtctgcatttggctccttgtttttgtaatgatagcggctttcaagggtcagctttcaccatattccagaggatttggccatgtatgaatttggttgaaccaaaaggatgaatttttcattcccatcttcagatgaacatggaccccatttcttaggagatcaccaagggcaattctgcctctattcctttctcaaagagcgtttctagggaaactcaagctrttctgccaggtgcagctgcagaggcgtgtctgtgaacacggcagcactgaaaactatgaaaa

SEQ ID NO: 726328 - DNA, 596 bp, Homo sapiens
gaagacaaagccatatccatggcaaccacaggccacacagcagaagaaagaacacatccagacacagcgcataatagctctgtttactgatgactaagatcttgaaagcactactgtacattccaactcccagctcagggcaggactccagcccgtcctcatcttccaagtccagcatctataatcagagccacagaaagggagagaagcccttttcccagccctggtctgctcctccctgggggtgagggatatgccgcttccatcaaggctctcgatggtcctgcaagaaacagtaggccaaaatgagagggaggctggatagggacgagttatgtggggaagtactggagcccttacagttctaggggtttctctgcctaattctagctgtggtggctgccttctgaggtcrgccctgcagaaacagcctcacactgaggccatgctccagagacaggccttcagaccccgagaggtacttgaacacacaacagcaagttcaagttcacattcaagtgttttgtgacttaccctttgaccccttcacacaccagcatacctcattccatcactcttttccatgtgccaataaa

SEQ ID NO: 726329 - DNA, 596 bp, Homo sapiens
gaagacaaagccatatccatggcaaccacaggccacacagcagaagaaagaacacatccagacacagcgcataatagctctgtttactgatgactaagatcttgaaagcactactgtacattccaactcccagctcagggcaggactccagcccgtcctcatcttccaagtccagcatctataatcagagccacagaaagggagagaagcccttttcccagccctggtctgctcctccctgggggtgagggatatgccgcttccatcaaggctctcgatggtcctgcaagaaacagtaggccaaaatgagagggaggctggatagggacgagttatgtggggaagtactggagcccttacagttctaggggtttctctgcctaattctagctgtggtggctgccttctgaggtcggccctgcagaaacagcctcacactgaggccatgctccagagacaggccttcagaccccgagaggtacwtgaacacacaacagcaagttcaagttcacattcaagtgttttgtgacttaccctttgaccccttcacacaccagcatacctcattccatcactcttttccatgtgccaataaa

SEQ ID NO: 726330 - DNA, 608 bp, Homo sapiens
cagaacagggcagtaactgctgtgccrggtgtcagtgcaggcagcaggtggataccggcccactgggcttcagggattcaatcccagcagggtagggaggtgactgcctctccttcctctagaatgagccttgtgggatcaccaacattcctaccatgtgccttcatgtgcttaatctttcgtgaagatttacggtcaagcactttcccggtaggcgagccatgctttagaagggacactatgcctggccctgaagaaaaacaggaataaaagagaaagaagtaagaagaaacagaatggcagaaactaactaacacagcccaaacacatcggaagacaagcagctctccctctcccacaaattagtgtccagtatatgacccccacccttccacaccagccctcttccctgctaaccaggccacctgccctacccctccactatgggcaggcactcccaggtgctgatctaatctacacctgcctaccagcagtattggaaccacaaatgcctccggagcagacagctcctcactgtgagagtactttatcccctttatttaagacaaactttaggccaggcgcggtggctcaagcctgtaatccca

SEQ ID NO: 726331 - DNA, 1184 bp, Homo sapiens
atgaatgccagaccctacagcagaaagccattttctcacttttccacacacaatggttcctactaagtgaaaaaaaagccataaaatttcattcacaaatgtactactctgtctcaaaacatcgcacataatcatgcactgtactaaagccattagatcagttcttcagtcaggttaaagaagtatccctctaataactgacttttataatgctatcaatatccactcccaatcagtctgccattgttaatggtgtacagcattactgaatacaatggaattgatgacgcccatatccacggacaaaccgtgacttatgatggtttgatttacgatttttcaacgttatgatgggtttactggaatattagatgcgtttctgagttacactgggtttatgagtatgcgaccctatactccagaaacagctgtataaggaaaaacaggtttacctaatgaaaatatgcttagtgacttgggataaaccaatagatgttcacaactgatggagagccgtgaaagagagataacggtaaatagttacaataacacaattttcctgcacctgtcgaggatttccccaaaaaaacgcagaatgtgggatgcacctaaggcataggaaagagagagggcagaaggagtaagagagaaataggaggaaggagggaaggaaagaaggaagtcaggaaggaaggaaggaaggaaggaaggaaggaaggaaggaaggaaagaaggacgtaaggaaggagaaaacaccggtgttactaaaagcccccaaaaaaatggtttccccctgtgggtaagcctacaatgtggacgaatcttgaaaatattgtgctacgtgttatgtcagtcataacagctcccctattgtgcaattccgcttataggaaatgtccacaatatggtaatctatgcatatgggattgatcgcactaggtagttgctacctagggctgmgggtcagggagagggtttgagacagaatgaggagtgactaatgtctacagggtttttctctggtcgggagtgactatagtcaaagcaatttaattgtacatttttaagtaactaaaagaatgttattagattgttcgtaaaataaagaacaaatagttgaggcaatgaataaccatttatctgatgttatttttgtgcatttcatgccttcatcaaaatcagtg

SEQ ID NO: 726332 - DNA, 3430 bp, Homo sapiens
tgatgaaacatcctaaagattttctttttacaccagcaaatcccaatttttttcttgtagaaaggcactgaaattaattaatgcaaagcagaagcacccaagagacattctgcaaagaaagaaaatgaaactctgaggaagtattaggaattatgtattgaagttatcctcacccagggagaccaggttcctgtagttctccaacatcacatctctatacaaattctgctgggcagggtccagacatttccactcttcaggggagaattctatggccacatccctgaatgttacgagttcctgaaaacacatatttatcatgtcacagagttcttaatttgactataagtgaaatcagagaactagttgtgacttatggggctgactggaattatctgataaaataacttttaacacagtaatgttatctaaagtattgtataattctgaagaaaaaggagggcatgccagcaatttttgttgctgcaatggaaatatgggctacactgatctgtccctaccaaaaccaagcaaagcaggtcctgtgacctccttgaacaaagggtgaactcacgtctcattaaagtaactggaagccctcatgcttgaccctggcctcactgtaatgtcacacaagaaacttaacaggatctgtggggagggaacaggtgactgtttctcttcaaactgccatgtgatcctactggaagactgggctgagagtcacttagctaaacattgcctctcaagcttcaatgtgcacataaatttggtattctaggcctcactgtaagtaacaaaattctgcaggtttgaaaagggtccattaatcagctttttatagccaagtctcccattaatgctcatgctcctcctagacccgttatagtaccactcagctagagaaagcagacacagcacgcagagtcccttaccccaacacccttatcacaacacaaatacttttcatccgaagacaagaccagcaatcaacatcctgaaacgtggcattatctgcaagccctttaaaggttacagaggctggagatggtggcaatgtctgagtaagtctgcatttgaaaaacagcacatccacatgcattaatgygatatttgtggagcatgtactatgtgctcaggagtatgtcacagagcactgtgctgggaagctcacattatgtgtgttaattctcacagcatcctgggaggtgggtacaaagtgtgtgatacttcccaggatttaaatgcagggcccagcatttctattttttcttctgttttcctatcattgatttttaaaaaatatatagaataatagctcaatgtagataaatgggagagacacagaagaaagttttaagtacaattcgggaattttttatttttgtgtttatagttactttgagacttgtgaaaaatccactgaaactgcaaagatggagaacaggttgctggatgggatgtctctagaaatactggttttaattttacataaaataatttaagtacattaaattcaaagtacattgcctttctccatttatcagcttttgtgtttcaggaaattgggagcaccagctctggagaggcagtaggaatagctactccaaactctgatcttctctaagcagttctgtgaggtatttcagtgtggggtcagacctggacaaggttcagtagaggggggatctgggcaaagttgggacagaaaatgggccctaggcttctgctctctaggccactaagtagtttcagttttgtcttttctaagcctgcccaaaagaaatttgattcccagagtttgtgaaatttttatctattttgccacttccccatctataacatacaataacaaggaatttaaccaaaacccttttgtttttccagaccaattatatttgaagttaaatatttattcttagcaaggcaaaaacaatacaaataatgacttctcttctgtccataaacagccatgcaggtggtggtatcaaaactcacaaaacaataaaagggaagtaacccaaacgaagcttaagtctcctgtacagttttcatctttgtactgaatacatgacgctgaattcaatcatttattaatgtgctctagaatgcaagttccttgatggtagggaccacgactatttcatctctttttctatgtccatatgaaacactgacccagtctgcacaggacatcctcaaatgtctcaaatactcactgatgctgctgagagtgtccccagtgaccctgggctgatgcccccatagtgatccaggcaggagactcaggctgactttctggggtgcaaacagaaaatggaactgccctgatggagatgcagatcctggatctggatgtgatatcccctgtccctgatcagctaactctgaggtaggcgaaggaaaaaagtactctactccagtaacacagggaggcatagttggcattatggctctggatatttagtggccttgacttcccactgctaaggtgcttgtttacacttacagattctgccacagtattgtgttcacaccagaagcctcttactcagctgtagcaggtcactggacaagatctggaaaactcaaagggctccactctgaaagtggggcttatgtctatgctgacctctcatgatgcagaaaacaccttctgtgacttttctgtatctcttcaacccaaagtctggccctgtcttgtgaatcctgggcagaagccagcttttatgtgcagattctaggtgagatcaatgtgtgctgcattcttgagttacaggaaacagagtaaaatcagaggaaagaccttctcatgaagcctccttcaacatattctaaagaatattttgagctaaagggaaaaagctggggtaaacataagtagagagtttatttgagccaaagcttgaagactgcaatcctggagtataaagttgccctgaatatacactccaattagaagcagttacaagcatatttttacaggcaaaaaggaagtcagagaggagattgatagaaaggtgtcagaaattcttattggtttatagaagtaacattggttagtgattggccatatacatagttaagctatagggtatgggtcatagtgtccagtgtggcattattaggttaatttacagccacttgtggcaatagcaagcaatttcaaaagacaaatagttcaaggaggagaacagtatgtgagtgtggtctcattttaacacatctctgggtctgataaatctaaaaacttgtatttctcaaataaaagttcttttatcaaatctcaggacataaattcagaatttggaactgcacatttaggtcttggagggctggtgagctatgtttgtgggccacaatgtggcccatgccaaatgtttgtgggcatgttggcaagggaggtgggagggaacagaatttctcaggt

SEQ ID NO: 726333 - DNA, 1669 bp, Homo sapiens
aactgccatgcatcagggtcagggggaggtcttgttacaacacagatctgcggatctccggcgtttgactgtggcaaggatgctgctggtgtcaaaaccacaacgtgggaaccacagaaccactagtgggttttcagtgtttcagtgcatacaattcctaatatttctggccaagaaaacttgtaagttcttagattgtcccaaaggtggcgcatgaaatcaaagcaggagaacagtttcctacgaggtgtagcctgggaaagttgggggtgactgatggaaaggaggagtgaagctccgccctttccgctgctaggctgcgcccgaggctatttaaacccaccctggctggcctgtactcagatcttcgcggagcggatcagcggccggagcgtttggcggactctgcgtggacttggagctcacagcgtcttgcgacttggaagcggattcagaggacaggacagaacacttgggcaagtgaatctctgtctgtctgtctgtctgtctgtctgtctcattggttggttgatttccattttcttaaggggcacatacctcacaccgcacacacacaaacacacacacgcrcacacacacacacacgcacacacacgcacacacactccttccttctgcgagttagtacattagtaggggcccctgggagctgcaggtttcctaatcatgtctgcacctaagaacagtagggtcttgtgtggctcttcttatgaacggtcccccagcccgaactcgccaaggtccatgcgagcctcacccagcttctccctctcccctctcagaaactcaggcttaaggggaagctcctcaccagggatccggagctaccattcaccatcccctagggcttcaccacactcacctctgtcatcaccagaatcccacaagctcccatttccctgtcctcaccgtgatgggcaatcaatgaagccattgggctctcccgtgtcctcctctgaggattcctcagagtccccacgttcatcaataatataccacatgttcttactgccatcacccagcagctcacccccagctctcggggggtctcctgtgtctcccagctactctccaaacaacgccagatttcagctggagtcagccccccacacccaggaatcacctacaaactcacgagcctcacggtgctccacccccgtgtctttcatctcttcacccccaggcctcagggactctcctgtggctcccagttactctccagccatccccaggttcctgcgggagtcagccccatgcacccaggagtcccccagagactcacaggtctcgggagaaagtgagcggtcccccagccctgactcctcaagattcatgcctgcctcacccagcttctccctctcccctcccagaaactcagacccaaggggcagctcctcaccagggatgtggaagtcctctacatcatcccgcagggcttcagcactctcacatccgtcatcaacagaattccacaactttacgtttccctttcctaaccaagcaggacagtcactcatgtcattgtgttctcccgtgacctcctctggagattcttcacagtcacctcattcatcaataatataccatatgttcttactgccatcatccagcagctcacccccagccacccatgactctcctgtctgtc

SEQ ID NO: 726334 - DNA, 1669 bp, Homo sapiens
aactgccatgcatcagggtcagggggaggtcttgttacaacacagatctgcggatctccggcgtttgactgtggcaaggatgctgctggtgtcaaaaccacaacgtgggaaccacagaaccactagtgggttttcagtgtttcagtgcatacaattcctaatatttctggccaagaaaacttgtaagttcttagattgtcccaaaggtggcgcatgaaatcaaagcaggagaacagtttcctacgaggtgtagcctgggaaagttgggggtgactgatggaaaggaggagtgaagctccgccctttccgctgctaggctgcgcccgaggctatttaaacccaccctggctggcctgtactcagatcttcgcggagcggatcagcggccggagcgtttggcggactctgcgtggacttggagctcacagcgtcttgcgacttggaagcggattcagaggacaggacagaacacttgggcaagtgaatctctgtctgtctgtctgtctgtctgtctgtctcattggttggttgatttccattttcttaaggggcacatacctcacaccgcacacacacaaacacacacacgcgcacacacacacacacgcacacacacgcacacacactccttccttctgcgagttagwacattagtaggggcccctgggagctgcaggtttcctaatcatgtctgcacctaagaacagtagggtcttgtgtggctcttcttatgaacggtcccccagcccgaactcgccaaggtccatgcgagcctcacccagcttctccctctcccctctcagaaactcaggcttaaggggaagctcctcaccagggatccggagctaccattcaccatcccctagggcttcaccacactcacctctgtcatcaccagaatcccacaagctcccatttccctgtcctcaccgtgatgggcaatcaatgaagccattgggctctcccgtgtcctcctctgaggattcctcagagtccccacgttcatcaataatataccacatgttcttactgccatcacccagcagctcacccccagctctcggggggtctcctgtgtctcccagctactctccaaacaacgccagatttcagctggagtcagccccccacacccaggaatcacctacaaactcacgagcctcacggtgctccacccccgtgtctttcatctcttcacccccaggcctcagggactctcctgtggctcccagttactctccagccatccccaggttcctgcgggagtcagccccatgcacccaggagtcccccagagactcacaggtctcgggagaaagtgagcggtcccccagccctgactcctcaagattcatgcctgcctcacccagcttctccctctcccctcccagaaactcagacccaaggggcagctcctcaccagggatgtggaagtcctctacatcatcccgcagggcttcagcactctcacatccgtcatcaacagaattccacaactttacgtttccctttcctaaccaagcaggacagtcactcatgtcattgtgttctcccgtgacctcctctggagattcttcacagtcacctcattcatcaataatataccatatgttcttactgccatcatccagcagctcacccccagccacccatgactctcctgtctgtc

SEQ ID NO: 726335 - DNA, 604 bp, Homo sapiens
tgacctcaagtgatccacccgcctcggccccccaaaatgctaggattacaggtgtgagccgctgcgccaggctcccttacctaatttttaccctttaatttgcactgaagaaaccttcagttttcttactgcccccctcaccccgtctcccccrcgtgcacatgcgcacgcgcgcatgcacacacacacacacacacacacacacacatacacagtaactgtgagatgatcagtgtgttaagtaacttgattgtgattcctttcacaatgtatatgtatatcaaaacatcacattatatgccttaaatacataccatttttatttgtcaattatcccttagtaaaactagagaagaaaatccattacgtaaaaaaacaaacaacaaaaaagaatataaaggaaactgtgctaattctattactgtcctaagtgatttttaaataacatataggaaaaaattgcaaatataaataatttaaaatttatgttatgtttcttgttgtattgccattctgctaggaattttagatttttgctaatattaatggaatttcatgtaataaaatatgagtggattagtctttggatttggaatatatatct

SEQ ID NO: 726336 - DNA, 604 bp, Homo sapiens
tgacctcaagtgatccacccgcctcggccccccaaaatgctaggattacaggtgtgagccgctgcgccaggctcccttacctaatttttaccctttaatttgcactgaagaaaccttcagttttcttactgcccccctcaccccgtctcccccacgtgcacatgcgcrcgcgcgcatgcacacacacacacacacacacacacacacatacacagtaactgtgagatgatcagtgtgttaagtaacttgattgtgattcctttcacaatgtatatgtatatcaaaacatcacattatatgccttaaatacataccatttttatttgtcaattatcccttagtaaaactagagaagaaaatccattacgtaaaaaaacaaacaacaaaaaagaatataaaggaaactgtgctaattctattactgtcctaagtgatttttaaataacatataggaaaaaattgcaaatataaataatttaaaatttatgttatgtttcttgttgtattgccattctgctaggaattttagatttttgctaatattaatggaatttcatgtaataaaatatgagtggattagtctttggatttggaatatatatct

SEQ ID NO: 726337 - DNA, 823 bp, Homo sapiens
ttgctccaacactgtcctatcaagaatacagattggtgacttatagctggcttggtgacttatgctggtacatttccctggagccacactcagtccccagtatgctgaattccatttatgacccagttgcaggcactatatatggcacccagatgtatattagaatgtcatgactttgagatagataggcagatggataggtagatagatagatagatacatagatagataatagacagatagataaaaaatttatttcagatgaaaggatatcttcttttctgcaagcaaagaaataagctgctagcattttagttctatctttgttggatttgtgttctaaggccacagggcattcacaagtctgcctaattacttctatactctgtggataagtacatggaagaaacatacatgcatctgtaatgtaaaaaggtaacatgcaatgtaaggagagcatgcataagagtatttattaatagattatttacgtgaggagatgctagacagtgcacattatggaggatatacaatataatgtgaagaggtcatgccatagacagagcacatttgggtcattagcacttgtcccyctgaatatgacatttaaagccacaatccattatacttatccaaggatattcttgggttgtgatgaagtgggaagtgatgagaaaatcgaggaagtctctgtgctatgtctgggcattgatttgaccaacgatactgagaagattaagacactggatttagcatcaaggaagatacacaaaagtcaatactgtgcacctcaggcccccagaatttctctttaccttctgaa

SEQ ID NO: 726338 - DNA, 1127 bp, Homo sapiens
caatgcagtgtgaaagaggaaatgcttgaggtattctgaattcataatgaagcatcatctttcaacgaatccactgtggttagacacacaaaacacctgctctctttatagattctatgcagtgcctggactggctgaatgtcttgattctgtggtgcttaaagcagaaaatgtcactatgatttcaaagggccttaatggttagaaattgctataaatgataaatttccatgtcaccttaaaatttcttagctttgttagttcaagccatgtccttaatgtagtttaatgctgctgttattatcattatttaatatagtcaatgtatggactgaacaaaacatacttgcaagtttagcattttccaatcaatattttaaatttacttgatgaagaaaaaaagtgtgctcttcaattgtaagaattatctcagtgcttcccgagatcactttaatgtaatacatttatctgtatgtaaaaatggtttctctggttaccagaaataaattgcagtatatcactggattaattgacatcagtttctcaaggtaagatatgacatcttgctgacacaatatgagtaaaaattctcaaaacaattagacaacattataggaggtgaaatatagaaaggtttatttatcatacatattatgaatcaacattatattttcagtttatttttacaataaagtatatattatatttctttttttgtaaaattgtgttatattaacatacacaaatagattcacatttgaatgtcttatagagctctcaaatatatcaaaagaaagaaataaaggaacgccataaggttatatctcccaggtaaaattttcaatacttgtctgataaatatgcataaacgtgtacattgctaaaaatatacatattgttccatatacttacaagctatgtgctataactgagaagaaaatgtcttcttatgagaattattctgttaaaatcagtggtttcattttcttcaaatccaggttaaaatacaaaattataattacaaaagtacagatttaaaaattacttttaatattacataatckaatcatctatcatcacaaaaattaaaaaacttgaagctctgtgttttggagctttatatttta

SEQ ID NO: 726339 - DNA, 619 bp, Homo sapiens
agtttcttcttggatatcagtatgaaagctagaatgagcactctgtgcagataggaggacaatcaagaatgaacatttccccagacatcctgggagaggtaaatttcaagcactgagtaattaactgtactaaaggccagagaggacaaataaaataaggactaaatatatgcatagggtttggcaactagcaggtcattgcttgtcttaatgagagaaattcaatggagtgccaatattgcagtagacacttaaaaactctctagcaaagagcaatttaaaagccatgtttctcaatttttagaaccatagatttgagaaagaaaaggattttgtgaatgctaaaagcttgattgcacatatcaaagtttaaaatccaaagaagtcatgagtcgtattgcagagaaaaccacgtaataaaattataagcttttctgtgaccaaaatgagaaaagaaaaatagcttagggaagtctgagttatgtgacatctgcaaaatttttcaggccagagagayatgagtatgggacttcagtcatgcctccctacccccaaagccattctcaagctttgggctcaaataaactctatacttagtcatattttctgactctcattg

SEQ ID NO: 726340 - DNA, 944 bp, Homo sapiens
gagggaaagttctgccagacttcgccaatcccagctgcccaaacaatgtctgctctctgaagcttaattcttcccgggctctggagaaatgagagtcagaccatgtgtcttagtctgttttctattgcttataacagaatccatgaagctaggtaatttataaagaaaagggatttrtttcttatatttatggaggttgagaagtagaaagttgaggaactacatctggtgggggttttcttgctggtgaggactctctgcagagtcccaaggcagtatagagggtcacatggtgaggaggctgagcatagtagctcatatcttttttcttcttctgataaagccactagtcacactcctgtgataacccataaatccattaacccattaatctattaatctgtggatagatgcatccatttatttggggaggacctcacgacccaataacttcttaaaagtcccacctctcagtactgtcatattaaggattaaatttcaacatgagctttggagggagggaacattcaaaagacagcacctggagtgatgtccatttgaagcccactcctttctagtggtatgcaggattgagctgcagtccttccagggtctgtgtgccaggcccttgggcaaatgcagaccttcagcctctttaaacacacccgctgcatacctaagagccaggctcttctgccctggctctctgttgtgccctcttgtggagttcctgccagtccctttgccttctgagctggactttgctcctggcacccttcacctcatctcaaatgattctgcctggtttatgaagtggatgaaccaaatattgatctgctatatcagaacttcctggactgtgaatcccagtgtgcatcagacttgaattttctatgccagctttgacttagttgggattacctgcctttccctgaggaggagga

SEQ ID NO: 726341 - DNA, 944 bp, Homo sapiens
gagggaaagttctgccagacttcgccaatcccagctgcccaaacaatgtctgctctctgaagcttaattcttcccgggctctggagaaatgagagtcagaccatgtgtcttagtctgttttctattgcttataacagaatccatgaagctaggtaatttataaagaaaagggatttatttcttatatttatggaggttgagaagtagaaagttgaggaactacatctggtgggggttttcttgctggtgaggactctctgcagagtcccaaggcagtatagagggtcacatggtgaggaggctgagcatagtagctcatatcttttttcttcttctgataaagccactagtcacactcctgtgataacccataaatccattaacccattaatctattaatctgtggatagatgcatccatttatttggggaggacctcacgacccaataacttcttaaaagtcccacctctcagtactgtcatattaaggattaaatttcaacatgagctttggagggagggaacattcaaaagacagcacctggagtgrtgtccatttgaagcccactcctttctagtggtatgcaggattgagctgcagtccttccagggtctgtgtgccaggcccttgggcaaatgcagaccttcagcctctttaaacacacccgctgcatacctaagagccaggctcttctgccctggctctctgttgtgccctcttgtggagttcctgccagtccctttgccttctgagctggactttgctcctggcacccttcacctcatctcaaatgattctgcctggtttatgaagtggatgaaccaaatattgatctgctatatcagaacttcctggactgtgaatcccagtgtgcatcagacttgaattttctatgccagctttgacttagttgggattacctgcctttccctgaggaggagga

SEQ ID NO: 726342 - DNA, 977 bp, Homo sapiens
aaagtgacttacctaaggaaaacctagttaataaatagcagtcataggaccattactcacatttcccaattgtcagaattgagttttttccattattttcctcctttacttcctttgctgatgaattcacaaatatgcagtttttcatgaacaaccattcaatattatgtacctctgaggtcttttcatgggttatgaaaactcataacttacaacttataaaataaaatattcataaaatattaagactgcagactcaatgtttaaaaatatactatactctagagtcatataacacagtcctaatgattttgaactacactacacggtgaccactattagctccaatttataataaggatttgattcttcccaaggcaatgagagtaaatccccacacaatttctcactaactcattccaagcaattttcaggggtggattagtcaatgaaatgtggcattcttttgctgcattgtgtgatgtgacttgaaataaattgaaacaaatmggtttaatttgccatggaacacatgccattaagtggctgagagcttgtgttttaccacatagaaggcatgtaagaaaataagcactaaggaaaaataatttaggcatcacgatgtagttttgtcttcctcagccttctcaggtataatagctttcacttgatttactttttatttgtagatggactgccaatactatctatggtattgactaaagtgacacaggaaatcattatcaaggaattgattaacttttaatacgttgttctaatgtatgaatgtttggttagattaacacatcttaattttaaaataacaacaatagtcctaatggatcctggagtttatctaagttattttaaaaaactgcattcatgccaaaatattacctttagtgagaattccaaattaaaagattatttttgaataatctgggctcacttcagttatttttaaaaacatgtatgtg

SEQ ID NO: 726343 - DNA, 605 bp, Homo sapiens
caaaaacaaccagccggtctcagtctataaaactgagagaacttgattgcccggggtgaatcagaatctaatactccaaaattgtcttccctagcctcttccttctggtaacactgataatggaatctaaagtcaattttatgtcctttcagaaggaaattaatgattcttggccaaaatgacactgatgcgggtgatctagactctctcatctttggaaagcttattggtgaaacatccagagaaggaaatttagaaattaccctggaacaagataggtgatggagggctgcagattgcccttgcttgactgtaatgacgaatcrgtattagatataaagttgcgatcgctatagtatttttcttcttttctaaagttaatttactcctaaaatgtttctatcatacagattttcacgtggacatttcctaaaatgtagacagctcctccataaagaattcctgtcagcccggcgcgttggctcacccctgtaatcccagcactctgggaggctgagtggggtggatcagttgaggtcaggagctcgagaccagcctggtgaaaccccatctctacaaaaatacaaaaaaaaaaaaaaaaaaaa

SEQ ID NO: 726344 - DNA, 598 bp, Homo sapiens
cgctccatagtaaatcctcagcccacaagggaaataccctagtaaatagtgccctgctgctgcctgtgtccctgctgtcattcaggtggacatagactggtaggcatcaccctgaactgtcaggaggccattgggaacctgytggtctcagggaataaggtgggttgggctggaggtttcaaatgaaccctgcgctgtcatcttttctgagcacagagggtacaggccggctcttcttcgaattttaccacctgctgaattactcacgccccaaggagggtgatgaccggccgttcttctggatgtttgagaatgttgtagccatgaaggttggcgacaagagggacatctcacggttcctggaggtgagggaatctggggacctgattgtcacagacagccagggcagggaaagcgctgctggcagtgatgattggtgggtgttgccaacattgggaatgactttcccgttcttggtctggctagatccaatagtgagggattcagtgggttctcttagtacatggaaaatattttttttgagacagggtcttgctctgtcacccaggctgaagtacagtggcattattacagctca

SEQ ID NO: 726345 - DNA, 776 bp, Homo sapiens
tctgtgttccacagctctctggtactcaaggggcaagtccccccaaggccccttggcctccagggtctggggaaatagctggagcaaagcacacatgggccagaccagacaccccacattccactcccatcagatctccacgggaggaaaagcagaggtcctgcaggaacacctgggagaaacagacaagcacagtctgggccatggtgggtgggaggttcaagatcacttctgttctcgcagccacagttcaaatcctatccattcaagtaatgagaccagcatctcacttggaatgaaaaatacaatttatgtgaactaatttgttctgcaagtgatttgtgcagatagctttttgaaggcttgtaatattttccaaatatttctaccaaaaaaaatgaagaagaagaggaatattgctgacaagaatggagtatttggaaagaaaacaaaataaaaatcatgcaaaaatgcctttagcattatttttcatggtattatcagtctttaggggtaagatatttggttgtcagtcgtaaccttggaaactcgcctaaccaacttccaaatggaaaagaagatctagttggcaaagttcactgctcaactgccaaatacyccaactaaatgatattatccaggttcattttgcaaaacaaatttaatttcttatagagaaacttgaaatttataaaagaaccctggagaatttggattttaataatcaattattcttcagcctgattcatcttataaacacatggaatatgcaaaaa

SEQ ID NO: 726346 - DNA, 1100 bp, Homo sapiens
tgcaggccgtgcaggctgccgaggatgctgctggccaggccctgcagcaggcggaccacacgtgggcggtgaggcccctcacttcccctcagccccagcaggagcgcccccactgcctgcacctcccgcagccccggcctgcgtgtctgagccacggtctgccctggcatccacagacggtggtgcggcagggcctggtggaccgagcccagcagctcctggccaacagcactgcactagaagaggccatgctccaggaacagcagaggctgggccttggtgagtgctgggctccgatgggggcccttaggcctgctgggcatctgagctcccagggaccctcagcccccagccacatgcacacgtggggtttgtgggtcaccgcagcatggtttggggtgggagagctttggagatggctccccagctgcttgtgtgtcagccccggggagccctgcaggggagtccagggaggagcagcctcctgcgaggcactggctgccactgaggcaccagctgagccacagggcacagggcaagagatacgtggcctctgctctgctgacccgagggctacacgcgtgccaagctgcgcaatgagaaaggtgtgagctgctaggaccagagggctgtctcttctgagcctctattgtttcatctgtacaatggggacagctatgcctgcagtgggaccagaggccttcagggaacagaggcyacgctgagactcaacacctccccacaggctaagggactccatgtctgagtgtccctgtccatctgtctgctgtgtgtcagccttggtcctcctggggtcagaagggtggaggtgggctgcaattgtatactgggggtgaagctgcctgggagctgaagctgcctcccccgcagtgtgggctgccctccagggtgccaggacccagctccgagatgtccgggccaagaaggaccagctggaggcgcacatccaggcggcgcaggccatgcttgccatggacacaggtatgcggagcctgggcccggctctcgcagccggccgaccatgaggctctgtgacagtggcgctggccacatgtggttggtgagcactcactgtgctg

SEQ ID NO: 726347 - DNA, 610 bp, Homo sapiens
actacaattcatgttgtttatgtagtttatgttgtgcgatatccgattccacagtgttgctagtattacatagatgtagcgttacttcatgggtaattttcataatacacaaaagtatgaatcattaaggggcactttcctaagaaagcttaagcaatatataaaaatctttagaaaaaaatgttgaaatttctgcagaagctgaattctttatatagtcttcatataagtaatggcttcaagaactactatatttttgccaaaactttaagtaaattgtgatgctgacagtgcagaaagtgtagatgtaaagccatttcttgttacaatattgattagtaatgaatgctatgccacgtatcaaatttaaattttgatggaactggtctctagtggaagaayatgctgccaaacaacctacgattctaagaaagaagcttcagttttcaagttaaagatgcagaatatttaatgatagtggtcccagacattattgccaatggagatctaacagggctatttaaaataagattatttatggtcttggtagtgctctaattaaaattcacataagtttatgtggtttgcgaatgatcgatttttagttgtg

SEQ ID NO: 726348 - DNA, 610 bp, Homo sapiens
actacaattcatgttgtttatgtagtttatgttgtgcgatatccgattccacagtgttgctagtattacatagatgtagcgttacttcatgggtaattttcataatacacaaaagtatgaatcattaaggggcactttcctaagaaagcttaagcaatatataaaaatctttagaaaaaaatgttgaaatttctgcagaagctgaattctttatatagtcttcatataagtaatggcttcaagaactactatatttttgccaaaactttaagtaaattgtgatgctgacagtgcagaaagtgtagatgtaaagccatttcttgttacaatattgattagtaatgaatgctatgccacgtatcaaatttaaattttgatggaactggtctctagtggaagaacatgcygccaaacaacctacgattctaagaaagaagcttcagttttcaagttaaagatgcagaatatttaatgatagtggtcccagacattattgccaatggagatctaacagggctatttaaaataagattatttatggtcttggtagtgctctaattaaaattcacataagtttatgtggtttgcgaatgatcgatttttagttgtg

SEQ ID NO: 726349 - DNA, 628 bp, Homo sapiens
taatttaatttttaatttttttttttgaggaaaatttctattattttctatactggccatttgactttacatttccaccaacagtgttatatagttttaatgcatctgcatatttactaaaatgtacatatgcatatgaacacataaaaacacacatctttttttaaccttggaaactggatatcactttccatgtccatttttgggagtcttaattaatttacttagtactattaaatatctgtgattcatccctattgtactttgtcttaatttaatcatttaacagcaatataatattgttttgttcattaatttattttcctgccaaggaaaattgtgtttattttctgaaatgtgttactgtgaaaagcattgcygtgaaaattcttggaaatgtatcatagagtacatatgacaaaatttttctttgttatatactgggggatagaactgctgagttgtagagtacacagtattgacaaccttcagaaatagaatccacttaaaatcccaccagtaatgtagcatctggagtcacatactaacaaatggctctgtcagattttgttatttgtataattaaataaatgaattttttgaaattattttattcataatttgaatt

SEQ ID NO: 726350 - DNA, 1788 bp, Homo sapiens
caaaattgtaactatgtgccaagtacattaatataaaactcaataatttattaaagaatatctaaatccaaatcatttttctctggctggttaaataggttttttggttttgtttgcttgtttgtttgcttttcccagatggctaaagctttagactaatatgtgtgaaaaagtcttttaagattttttttatttgccctctgtaaagaaccttttaaagcgccagtatttgattcattcaatcttttagatgtctctttgtaccaattaaagaatgcatctcattgcttttgttgtgttttagatcttttcttttctaaagtatcttgcaagttaacaattttatttgggttaaaactttgccactgtgttcactgtaattccaccttgttcttattaaggttaactcagttttcaaacaatgaacaggttctgggaccagaatttttatgcataaacttagctgatgtctcaatctcctggagtctgaaactccttcaatttggaggaattcagtttcaaaaggtatttacctggctctaactgacagaatctaatcaagttaatttttggattcaatttaatcctggacctagtccagtaacaattgctcaaatcaagttggagacttcaaatcacaaatttgtggagctcaaatctgttagcaaactcattcatgacctccagttgatgtgagagatcaatgggcaaaatgggccctagagggtaccttcatttgctcacttggtgctcctggaggtcagtagaggtcttcagatcccrctttttaatgccaaactgttaaaagaaaaactttagacacattaaattttgcataatttatttgagcgaataacgatccataaattaggaaacgcagcgaaccaggagagctagttcaaccagcaaaatgggcaggtgatattcacatagaaagaaaagatgtaacttataccaacaatttgattggttacagttcagcatttgccttatttgggtgtagtctgatcagttggaagcctgtgactagctgaagtttggctgatgtgattggccaacactcatctgctttttataagaacattgtcttaagttgtagtttatttacatactaagtcaggttgtcattcactatgtaggaattcgaagtacagaggcagttttaggccaagttgttttatttaatttgacaatatcaaatatttagcagtcttttcatccatcaatgaataatgcaatataaaatttttatattcagactataaaatgcattatcttcattaagttattttacatggattcacaagaatagaataaaatacttcgaaagtgcaaaaaaatagtgtactgagctttagttagcatttttgtttttaatatttttatttttgccccttagaaaaatgtatgcaaaactaactccatttagaagaacaacatgcatattaagtaagctacacattgaggaatctcaacataatatgaattaaagtcatagaatcatacattgagcaaggatttggggtattaattttatccatttactcatttaacagaattttactgagggtctcctgtaatcaggcattttacaaaggtgagcaaacagagcaagtccctgtcctgtcgacatagtgtctagtctatataaatatagcatatatacctattgttctctctttaataatatatatgcttatctctgtgtggcagggcatgcatatatgtaggtgttagtgcatttaatttgtcttaattttataatataatagatgttctagctaagtc

SEQ ID NO: 726351 - DNA, 1788 bp, Homo sapiens
caaaattgtaactatgtgccaagtacattaatataaaactcaataatttattaaagaatatctaaatccaaatcatttttctctggctggttaaataggttttttggttttgtttgcttgtttgtttgcttttcccagatggctaaagctttagactaatatgtgtgaaaaagtcttttaagattttttttatttgccctctgtaaagaaccttttaaagcgccagtatttgattcattcaatcttttagatgtctctttgtaccaattaaagaatgcatctcattgcttttgttgtgttttagatcttttcttttctaaagtatcttgcaagttaacaattttatttgggttaaaactttgccactgtgttcactgtaattccaccttgttcttattaaggttaactcagttttcaaacaatgaacaggttctgggaccagaatttttatgcataaacttagctgatgtctcaatctcctggagtctgaaactccttcaatttggaggaattcagtttcaaaaggtatttacctggctctaactgacagaatctaatcaagttaatttttggattcaatttaatcctggacctagtccagtaacaattgctcaaatcaagttggagacttcaaatcacaaatttgtggagctcaaatctgttagcaaactcattcatgacctccagttgatgtgagagatcaatgggcaaaatgggccctagagggtaccttcatttgctcacttggtgctcctggaggtcagtagaggtcttcagatcccactttttaatgccaaactgttaaaagaaaaactttagacacattaaattttgcataatttatttgagcgaataacgatccataaattaggaaacgcagcgaaccaggagagctagttcaaccagcaaaatgggcaggtgatattcacayagaaagaaaagatgtaacttataccaacaatttgattggttacagttcagcatttgccttatttgggtgtagtctgatcagttggaagcctgtgactagctgaagtttggctgatgtgattggccaacactcatctgctttttataagaacattgtcttaagttgtagtttatttacatactaagtcaggttgtcattcactatgtaggaattcgaagtacagaggcagttttaggccaagttgttttatttaatttgacaatatcaaatatttagcagtcttttcatccatcaatgaataatgcaatataaaatttttatattcagactataaaatgcattatcttcattaagttattttacatggattcacaagaatagaataaaatacttcgaaagtgcaaaaaaatagtgtactgagctttagttagcatttttgtttttaatatttttatttttgccccttagaaaaatgtatgcaaaactaactccatttagaagaacaacatgcatattaagtaagctacacattgaggaatctcaacataatatgaattaaagtcatagaatcatacattgagcaaggatttggggtattaattttatccatttactcatttaacagaattttactgagggtctcctgtaatcaggcattttacaaaggtgagcaaacagagcaagtccctgtcctgtcgacatagtgtctagtctatataaatatagcatatatacctattgttctctctttaataatatatatgcttatctctgtgtggcagggcatgcatatatgtaggtgttagtgcatttaatttgtcttaattttataatataatagatgttctagctaagtc

SEQ ID NO: 726352 - DNA, 1560 bp, Homo sapiens
tattttcaaataaatggctatatattataagcactggagttttactaatcaatatgtcttggaaatacatttgattgatatatatttgaaactctctattaaatagtagtagagtggccgggtacggtggctcacgcctgtaatcccagcaccttgggaggccgaggtgtgtggatcacctgaggtcaggagttcgagaccagcttggccgacatggtaaaacctcgtctctactaaaaatgcaaaaaacatagccgggcatggtggcaggcgcctgtaatcccagctactcaataggctgagtcatgagaatcgcttgaaccgtggaggaggagtttacagtgagccaagattgtaccattgctctccagtctgggctacaagagctaaactccatgtcaaaaaacaaaacaaaacaaaacaaaaaaacamaaaggtaatagaagggaaatcatactctattactctataagagatatcattaaaaagataaaagcccctgcatataacttcatatttatagatcaaatactgaattagcttcttcagaattcaaaaagaagtctctaatgttttctatcaacatttctattcaactagagtaactaaactgtataacagaaaaaaaaagaaatagaagtacaaaattggaaccctgaaaataaagctgtcattatttctaaatgacataattgcatacgtagaaagcccaaagtactctagaaaaaaaataagagtgttgattaataaatttaacaaggttcttggatgccagtaaaatgtattaaatcagttgaatcatctacatagttggcaaacttttctttaaggaacaagataatatgtattttcacctctgtggccattatggcctgtcactactcaactttgcaattatagtagtcctttgatttgtgttccatacactgttccatatcacaatcttgctacgagcctctgctgctctgaacatgtggtaccagcatggtactgtgttccattcacatattttacaacagtctctacttgacatttagacagttttctttgcctcacaatataattccatctgcaacatacatttagatatccattaagagtttggccaactgatagtacttttttccacttgctagtaataattctgagttttttcttggttttgtgactttttttttttttccagtaaatgtaatggattctaagcaggtaacatataactgccctcttgaaacaagtagtcctgcccatcaattactcatcagcagaaacacttatgcttactgaaaagagaaacccagtaaggtagcctcattatttgaggctggaatagcatagaacagatccacttagcttctaagcttctgcctgattttgcaagcatatttcaagaaaatgatctaaggatttatacactgaataggactatcaacccagttttaaataggaatatctaacctttcttaatattgttgaacacttgtaagaaattgattccaggaggtacaatcaactactactttatttgcaatactccaggactctgaaacactaatttcc

SEQ ID NO: 726353 - DNA, 647 bp, Homo sapiens
agaagcccagctcaccaccctgattcttctcccactggaaccttaacctcttcatttcttgtggcttcagaaggtcttagcttcctcaagaaagttgattgttatattttctttggtttttctacttgttctaaatcagagtgcttccctacttacagttactccatcagacccacagaagtagttctcccccgttcattttataaaacacaatttccccacatctttctcagtccttctgattgtgaaccactgatctaaattataccaacaaatttctggcatctcaaatcattttagcatacgctacaataatcttaagtttcaaacaactgaacacacacttagaatcacttccagctaccttgagccagttttgtgaatataaatcactggtaaatatattcaggcaatttgtactatgtgcagcratctgtgataggaactgttggtggaaaattttaaacacttctttcagtaattgttataacttgggaaaacaaattattgaataaccaaattaacaacttctgaacacagcacaattaaattggaaaataaaaaataatgactaaaaatagctgaaaataccccttaaacactttggattataagatatccctttatatatttcatggaacaaaaaa

SEQ ID NO: 726354 - DNA, 647 bp, Homo sapiens
tgggaaataaatttctgctttttataagccaccctacagttttctgttataccaacccaaatggactgacagcagtgtcatccacaaagatagagaaaaatccccaatcttttccaagatcagaagtattttgttaagcatactctgatcagtgtgatatttctattttccatgtcactccttaattattgaccacgacaatcatatagaaacaagagttgagaatacacagccaccttctgggttatgcctcttttttttgtcccccaagacagaggctgagtcaggaatttttgaaaacaaaaggaagcaggaaagaggtgaaagggagattcagcttggactgtaatcagtgtktcaagtatcacatttataagtataattttaaggtcatctcttctaactgtcggtctaataacctgaatttggctctgcaaaccctaccaagttactatgcaacatgttcttgaacacttccagtgatgtgcagctttcaatcaagcaaagaaagtctttctttctttggacactattgctaaaaatttttccaatttttttctgcaacttccacttattagtagtggtgttcctataggattcacaatttaatattctatctaacattcctttgaaaatttgaaattata

SEQ ID NO: 726355 - DNA, 595 bp, Homo sapiens
ggtcaacagcacaataactcatgcctgaaagtagcttccctaacacacgtattttctctgtaaagcacatcacaaccttcttgcacttagagacaccagacagtaagtactttagcattgtgtttggggccatttttaaatagcaaaatcaccccaraaaagcacaaaaatgcaaaaaccatggactaaatgggccaagagaaaagaaaatgtgtttataagagctaaaacaagaaagcagagtgtcaccttgtgcgacctcaacgtatgtgttgggtgacttaaatttttcactgctttgtgcacgtcacaaatgactgcaaaagtgctgtgagtattgattttggggttgcaaacagatttaaatgaatagatgaatgcggagatatggaatccatgaatcatgaggactgataataagtaatttcccttccgtctccccaaccttccctgaaaagacccaacctcatccataaagatatataaatttaccttggatgttttgggaaaatagttatctctatgtaagactgtgttcttaaatatattactcctatctcataaatctgtgttcatttcaggattttctagcttg

SEQ ID NO: 726356 - DNA, 635 bp, Homo sapiens
aaatacaaaaaattagccaggcgtggtggtgggcgcctgtagtcccagctacttgggaggctgaggcaggagaatggcatgaacctgggaggcggagtttgcagtgagcagaaatcatgccactgcactccagcctgggcgacagagcgagactccatctcaaaaaaaaaaaaaaaaaaaaaagaggaatgagtccaaccagagggagaattgatcttgctggtttggtcagggactggctgattaattacagagaaatgaccaaggaagaggtgatgtgatgggaccaccccacccagcaccaggctctgcaaacaagcatgtttgactcatctgcaaagggctgggggcactgccttgtgcggcagaatcccactgtacaaaagaaaacatgtggacacagacctgtggcctcaacactgaggaacagaaccccagctgcagggcctgagttggccttgcatccactccactggcttcgtcastaggtatcacttgccctccacggcgccatcctgaggcctgcctgtgcatcacactgcacagggtgcctggtctccaaggcacagccttacattgtgcacattctgctgagcggttgactctcccatatttgcaggcatacatgggggact

SEQ ID NO: 726357 - DNA, 680 bp, Homo sapiens
ttcccaaagatatccttgcaaatgtaataaatataaaattaataagtagacatgattgtataaatataacaattawcaaaacataccgtgtggtgttatatatattacaattaacaacatttgttattaaaattgttatccttccttctttactaattcctaggcagttgagtatcacactcttttttttgtttttttctcttacagtatcccaacagacttttcatgtagcacctgctctgcctgtgccgtgctaagaggctctttccactgaatctgttggatggtcattgaagtacgatgccataacaaggtgctgagggccgagccaggtcagtggtggggaaagaggagatgggaatgatgaattcaagggagtttagacaaagcctaatatcctctatgggatgaagtcttggttggatatagggtaaaggagaaggagttgttgaggataattgactcagctaccaagcctagcagattggtcataccatcaaataacacagaaaaggaacagattcagttcagtttcgggtatgttgaatttgagatgcccgagggcttccaagtggagatgatcagcaggtggctggtaggagatgatgtgatacttcacccacatccccctttcagagataaggcactcatcgccctgtttctaggagtgttggtagctg

SEQ ID NO: 726358 - DNA, 680 bp, Homo sapiens
ttcccaaagatatccttgcaaatgtaataaatataaaattaataagtagacatgattgtataaatataacaattaacaaaacataccgtgtggtgttatatatattacaattaacaacatttgttattaaaatygttatccttccttctttactaattcctaggcagttgagtatcacactcttttttttgtttttttctcttacagtatcccaacagacttttcatgtagcacctgctctgcctgtgccgtgctaagaggctctttccactgaatctgttggatggtcattgaagtacgatgccataacaaggtgctgagggccgagccaggtcagtggtggggaaagaggagatgggaatgatgaattcaagggagtttagacaaagcctaatatcctctatgggatgaagtcttggttggatatagggtaaaggagaaggagttgttgaggataattgactcagctaccaagcctagcagattggtcataccatcaaataacacagaaaaggaacagattcagttcagtttcgggtatgttgaatttgagatgcccgagggcttccaagtggagatgatcagcaggtggctggtaggagatgatgtgatacttcacccacatccccctttcagagataaggcactcatcgccctgtttctaggagtgttggtagctg

SEQ ID NO: 726359 - DNA, 637 bp, Homo sapiens
ctgcagtgggctctgcccagttctagcttcctggccactttatttacctacacaagcctcaggaatggtgggagcccctcccccagcctcactgccgccttgcagttggatctcagactgatgtgctagcaatgattgaggctccgtgggtgtgggaccctccgagacaggcgcgggatataacctcctggtgtgccatttgctaagaccattggaaaagagcagtattagagtgggagtgacccgattttccaggtgcagtttgtcaccccttcccttggctaggaaagggaattccctgaccccttgtgcttcccrggtgaagtgatgcctcaccctgcttcggctcacactcagtgggctgcacccactgtcctgcccccactgtccgatgaaccccagtgagatgaacctggtacctcagttggaaatgcagaaatcacccatcctgcatcgctcatgctgggagctgcagactcagtaatctgttcttgatcacagaagtcagaaatggaaatacacatttgggaatcatgaatatatagatgataattaaaacaaggacgttcctaggcttctctttctttacagcaactgaaaaagggcactcagaaacatctattttctttaccagctt

SEQ ID NO: 726360 - DNA, 637 bp, Homo sapiens
ctgcagtgggctctgcccagttctagcttcctggccactttatttacctacacaagcctcaggaatggtgggagcccctcccccagcctcactgccgccttgcagttggatctcagactgatgtgctagcaatgattgaggctccgtgggtgtgggaccctccgagacaggcgcgggatataacctcctggtgtgccatttgctaagaccattggaaaagagcagtattagagtgggagtgacccgattttccaggtgcagtttgtcaccccttcccttggctaggaaagggaattccctgaccccttgtgcttcccgggtgaagtgatgcctcaccctgcttcggctcacactcagtgggctgcacccactgtcctgcccccactgtccgatgaaccccagtgagatgaacctggtacctcagttggaaatgcagaaatcacccatcctgcatcgctcatgctgggagctgcagactcartaatctgttcttgatcacagaagtcagaaatggaaatacacatttgggaatcatgaatatatagatgataattaaaacaaggacgttcctaggcttctctttctttacagcaactgaaaaagggcactcagaaacatctattttctttaccagctt

SEQ ID NO: 726361 - DNA, 600 bp, Homo sapiens
ttactacattattatttttttaaaactttgtagtagaaacatatataacataaaatttgtcatttaacaattttaagtgcacaatttagtggcattaattagatgactatcatttcatctcattatttcagttacttttataaataaagctgcaaatcaatatcctcatatataatttgtgcaagtgtttgcaaagaatagaaagctctcacctggaagggctagtgataaggatgaagagtgataaagagaagaatgggatactcctagagaagagcaaccccaagacacataattgtcagattcaccaaggttgaaatgaaggaaaaaatgttaagggcagccagagagaaaggttgggttacccacaaagggaagcctgwcagactaacagcagatctctcggcagaaaccctacaagccagaagagagtgggggccaatattcacattcttaaaaagaattttcaacccagaatttcatatccagccaaatcaagcttcataagtgaaggagaaataaaatactttacatacaagcaaatgctgagagattttgtcatcaccaggcctgccttacaagagctcctgaaggaagcac

SEQ ID NO: 726362 - DNA, 630 bp, Homo sapiens
gttctcctgaaataacatttaaaaaaaactacatattttactcttaagcagatgggattgtcttctcttccaactaaaaacagtatgctgatattgaggattagtatttatcatttatcactgataaatggtgtattggttgggataacactagctacagtaacaaatagatgcaaaatatataatgatcaagcagaatagaaatttacttcttgttcatgtaatakgtcctggtattcctggtcagcaggcagctctcttccatgcactcattcagggattcagaccccttcccttttgtggcttcactatcctctaaggcattcttgttacgtgaatcctattggtagaaaagaaaagggcagggggatgcgtacccatttcttaattgctttggcccagaaatagcccatgtcttgccttctcacaacccactgtctacaactcagtcagatggctgtacctaaatgcaaggaaagctgggaagtatagtagtgtccaggcagaaaaggagagggatttcagagcagtagctcacaatctgtatcacaaatgcctaccatatgccagtcccagtgctaggtagtaaagatattgagatgaacaagacactttttctgccctaagcta

SEQ ID NO: 726363 - DNA, 630 bp, Homo sapiens
gttctcctgaaataacatttaaaaaaaactacatattttactcttaagcagatgggattgtcttctcttccaactaaaaacagtatgctgatattgaggattagtatttatcatttatcactgataaatggtgtattggttgggataacactagctacagtaacaaatagatgcaaaatatataatgatcaagcagaatagaaatttacttcttgttcatgtaataggtcctggtattcctggtcagcaggcagctctcttccatgcactcattcagggattcagaycccttcccttttgtggcttcactatcctctaaggcattcttgttacgtgaatcctattggtagaaaagaaaagggcagggggatgcgtacccatttcttaattgctttggcccagaaatagcccatgtcttgccttctcacaacccactgtctacaactcagtcagatggctgtacctaaatgcaaggaaagctgggaagtatagtagtgtccaggcagaaaaggagagggatttcagagcagtagctcacaatctgtatcacaaatgcctaccatatgccagtcccagtgctaggtagtaaagatattgagatgaacaagacactttttctgccctaagcta

SEQ ID NO: 726364 - DNA, 630 bp, Homo sapiens
gttctcctgaaataacatttaaaaaaaactacatattttactcttaagcagatgggattgtcttctcttccaactaaaaacagtatgctgatattgaggattagtatttatcatttatcactgataaatggtgtattggttgggataacactagctacagtaacaaatagatgcaaaatatataatgatcaagcagaatagaaatttacttcttgttcatgtaataggtcctggtattcctggtcagcaggcagctctcttccatgcactcattcagggattcagaccycttcccttttgtggcttcactatcctctaaggcattcttgttacgtgaatcctattggtagaaaagaaaagggcagggggatgcgtacccatttcttaattgctttggcccagaaatagcccatgtcttgccttctcacaacccactgtctacaactcagtcagatggctgtacctaaatgcaaggaaagctgggaagtatagtagtgtccaggcagaaaaggagagggatttcagagcagtagctcacaatctgtatcacaaatgcctaccatatgccagtcccagtgctaggtagtaaagatattgagatgaacaagacactttttctgccctaagcta

SEQ ID NO: 726365 - DNA, 630 bp, Homo sapiens
gttctcctgaaataacatttaaaaaaaactacatattttactcttaagcagatgggattgtcttctcttccaactaaaaacagtatgctgatattgaggattagtatttatcatttatcactgataaatggtgtattggttgggataacactagctacagtaacaaatagatgcaaaatatataatgatcaagcagaatagaaatttacttcttgttcatgtaataggtcctggtattcctggtcagcaggcagctctcttccatgcactcattcagggattcagaccccttcccttttgtggcttcactatcctctaaggcattcttgttacgtgaatcctattggtagaaaagaaaagggcagggggatgcgtacccatttcttaattgctttggcccagaaatagcccatgtcttgccttctcacaacccactgtctacaactcagtcagatggctgtacctaaatgcaaggaaagctggraagtatagtagtgtccaggcagaaaaggagagggatttcagagcagtagctcacaatctgtatcacaaatgcctaccatatgccagtcccagtgctaggtagtaaagatattgagatgaacaagacactttttctgccctaagcta

SEQ ID NO: 726366 - DNA, 965 bp, Homo sapiens
ccagcttgggctacccgggctaattggatagaggccactgggcaaggctagaaggacttcaggcaggggagggggtgctggggatcctctgtgtccaaacacagagaagagcacatgtaaatttaagacgcaaaagtacatttggtacttgttaagttcttaagcccaggaatgacagatttatcactaattaaacaataattgcattatggagtactgaaaaaattgtttgtgtataaacaacatctggtaaagattaaaaagaaagaataatttttccgagctcaaatttgttaaaaggaacctgaatgttttaaaacaaaatagatctgaaaatgtaaaagggatatttagagtcttatgtttagtattttgaaaatagaaaagaagcaaatggcataataaaaaatacatatttataaaggtgcctcattgtacatgatagatgtgaaggttttgtataaataggtttttctcaagccaaatcatttttcacttcaatagaggagttcactggtgaaatgactcttatggagaatcttctttttaagaagaaaggtattttgtagtgaatatgcacatattaacaacaagggcttcccactgtggagagaacagtggctcggaaacagctacacggtgggacgggattgtccggctgctgggtaaactggaggggaagctgcccatcagctgattctttaaatgacccatttcctaagtaaatatttaagctacatgcaagtacatgaaaataccaggaaagaatctattccaggcttaatkaacttcagcttctctgtcatctgctatttccttctttatttttaaggcgaatatatctatgaaaggtgatagatggaaagcacttgataattttttctgttccttcactgcctttttattttttctaaaagggatttgcttttgtctgtgagttaccttaaatcatagtataatttccc

SEQ ID NO: 726367 - DNA, 506 bp, Homo sapiens
ttccaacattacattattattgaatgatgaaaccaagaatgaaactcaggcttctgggtttctaaaatccatgctcttgtcctactctttgtatctgtggcacctagcactgtacctgctgcatttgcatgagtttttatgtctgaactatatttcactcaacygatttcttaaccctgagactattaatatcacctttgttgtaggggctgttctgtgattgtaggatgtttaatagcatccctggcccctactcactagatgctgggagtactctcatctttcagcccattctccaccagtttcccagttataataaccaaaattgtctccagactttgtcaaatgtgctatagtgggtgaatagttctttaaaaatgtttttagtagattgcaataatctataactaacatgtattggataatcttttgtaccaagttgaaataatctataaggcaactaattaaattgaatttttaaaaactatggaaacatttgaaagaaa

SEQ ID NO: 726368 - DNA, 506 bp, Homo sapiens
ttccaacattacattattattgaatgatgaaaccaagaatgaaactcaggcttctgggtttctaaaatccatgctcttgtcctactctttgtatctgtggcacctagcactgtacctgctgcatttgcatgagtttttatgtctgaactatatttcactcaaccgatttcttaaccctgagactattaatatcacctttgttgtaggggctgttctgtgattgtaggatgtttaatagcatccctggcccctactcactagatgctgggagtactctcatctttcmgcccattctccaccagtttcccagttataataaccaaaattgtctccagactttgtcaaatgtgctatagtgggtgaatagttctttaaaaatgtttttagtagattgcaataatctataactaacatgtattggataatcttttgtaccaagttgaaataatctataaggcaactaattaaattgaatttttaaaaactatggaaacatttgaaagaaa

SEQ ID NO: 726369 - DNA, 506 bp, Homo sapiens
ttccaacattacattattattgaatgatgaaaccaagaatgaaactcaggcttctgggtttctaaaatccatgctcttgtcctactctttgtatctgtggcacctagcactgtacctgctgcatttgcatgagtttttatgtctgaactatatttcactcaaccgatttcttaaccctgagactattaatatcacctttgttgtaggggctgttctgtgattgtaggatgtttaatagcatccctggcccctactcactagatgctgggagtactctcatctttcagcccattctccaccagtttcccagttataataaccaaaattgtctccagactttgtcaaatgtgctatagtgggtgaatagttctttaaaaatgtttttagtagattgcaataatctataactaacatgtattggataatcttttgtaccaagttgaaataatctataaggcaactaattaaatkgaatttttaaaaactatggaaacatttgaaagaaa

SEQ ID NO: 726370 - DNA, 701 bp, Homo sapiens
ttcataggaaagtgaaaaaaatttataatataatatattaagaacatatgttgtaatctcaaaacagcactaacagaatggtccaaaaatatataataaacataaggaaaataaaataattttaaaagtttcattagtcgccaaacagcaaggaaagaaattgaaacacatgtctactggttcaaagttttttaaaaatatagtaagatggtacataaaactcaactatgctgtcattacattaaatgaactaaattattcaagaaaaagatcaatatttttagactagattgaaaagaaaaaccaaattatttgtttcttgcaataaataaaacttgcatacaaaacacagaaatattggaagtaaaaggatagaaatagatatgtcatgcaaagctaaccaaaacaaagctgacatgaatttgcagtaatactataaacatagtagatgttcaggccaaaaaaaaaaaaaaaaaaaaactatgagatgtaaagaaaaatatataaaggaatatatttaacatttcaaaatcaacattcacaaaaacattctttcaaaacatattaarcaaaagtttaatgtggagaaacagatgaattcacaatcaaacaaatcttcagattatggagatttcaatatatctccttcaatagctaacagaacaaagagaaaactataagaaggaacagagaagatctaa

SEQ ID NO: 726371 - DNA, 701 bp, Homo sapiens
ttcataggaaagtgaaaaaaatttataatataatatattaagaacatatgttgtaatctcaaaacagcactaacagaatggtccaaaaatatataataaacataaggaaaataaaataattttaaaagtttcattagtcgccaaacagcaaggaaagaaattgaaacacatgtctactggttcaaagttttttaaaaatatagtaagatggtacataaaactcaactatgctgtcattacattaaatgaactaaattattcaagaaaaagatcaatatttttagactagattgaaaagaaaaaccaaattatttgtttcttgcaataaataaaacttgcatacaaaacacagaaatattggaagtaaaaggatagaaatagatatgtcatgcaaagctaaccaaaacaaagctgacatgaatttgcagtaatactataaacatagtagatgttcaggccaaaaaaaaaaaaaaaaaaaaactatgagatgtaaagaaaaatatataaaggaatatatttaacatttcaaaatcaacattcacaaaaacattctttcaaaacatattaaacaaaagtttaatrtggagaaacagatgaattcacaatcaaacaaatcttcagattatggagatttcaatatatctccttcaatagctaacagaacaaagagaaaactataagaaggaacagagaagatctaa

SEQ ID NO: 726372 - DNA, 701 bp, Homo sapiens
ttcataggaaagtgaaaaaaatttataatataatatattaagaacatatgttgtaatctcaaaacagcactaacagaatggtccaaaaatatataataaacataaggaaaataaaataattttaaaagtttcattagtcgccaaacagcaaggaaagaaattgaaacacatgtctactggttcaaagttttttaaaaatatagtaagatggtacataaaactcaactatgctgtcattacattaaatgaactaaattattcaagaaaaagatcaatatttttagactagattgaaaagaaaaaccaaattatttgtttcttgcaataaataaaacttgcatacaaaacacagaaatattggaagtaaaaggatagaaatagatatgtcatgcaaagctaaccaaaacaaagctgacatgaatttgcagtaatactataaacatagtagatgttcaggccaaaaaaaaaaaaaaaaaaaaactatgagatgtaaagaaaaatatataaaggaatatatttaacatttcaaaatcaacattcacaaaaacattctttcaaaacatattaaacaaaagtttaatgtggagaaacagatgaattcacaatcaaacaaatcttcagattatgkagatttcaatatatctccttcaatagctaacagaacaaagagaaaactataagaaggaacagagaagatctaa

SEQ ID NO: 726373 - DNA, 1331 bp, Homo sapiens
agtccccggtacattcatttaggctccggtatacttaataacaaattcagtgattacattggtttaaaatccataatatctaaataataagtatttgcaaaaacaacattcccttggaaatgtatccttaaaataaattaggagaacatagagagctatttgtagaattttatcagcagattaaaactttcaaactctgaaaacattttaaattgtcacattaaccattttatatrtatattctgaatacttattgagtaaatatttctaccaatcagtatataaacttttctttgaaaaaagaatgatggaaagatactatgcttatgtgcaaggagcttccagtgtaatacaggagagtgggcaggtgctcacattgctagaaggagggaggaaggaaaaaatcagatggattaagtgctggaaaaaattagaaaaatagattactcctggctgcagagccaggtgagccttcatcaaaaagcagcagtttttgacagtcatgtaaggcatattttctgtcccttactcagttgctaaagggaagagaacataggaaataaagagaaataaatacaggatgaggtaatgagaggatagaaaatatgggggaaaatgattgggaaagagaagaaaaagaggtttcaggaaacatgaagaaacatggtagttgctgaaatatatagacggaaaataaaaggggaaaaatagaagaggaattagaaaagggaggaaggaaaaaaatgtgaaaagattgaggtaagcagagttagagaacaaggcagtgagacatttattatcaactccagagagtgtgtcaaaagcctatgggtttctttccaggacacccccaaaatacaaccttaggtctaataccttaatcttcacacagttctagatccactcagatacgcattcccttctattttgtttttgtctaactaacacagcaatactcactcgctttgcttagggttcaatctcaaaatcccaacccaagaagcgccataggtttttgtgtagtggttgttgcttgtgtatttgaaagccacagaacttctgtgttttgcccttgcaaacataactaggaatagagaacactgtcacgtgccctgaggctacccagtgggtccagaagtaaaagtaaaactttcccaaccactttttcatacacaaatagtgttaaatttgaaaccagcagctgtgcactttaaccactttctcttgtgtgatttattccaattgcacttcttaaataaaacttccattttagctatggaaatagatttccttcctgaacaacttgttcttctagaaataagtgttgagtc

SEQ ID NO: 726374 - DNA, 628 bp, Homo sapiens
tttcatgctataatggcaaaatagtccccttttgaactactctcttcccttagcttctctgacattaatcctcttgtttacagtttatctagcttctcctgtttcatctccttttctgactcctcatctatcagtcttcaaatactggagttctgtgggctcaatcctgggtcttctcttctcatacattctatctctagcaagcttcatctattctttcagctgaaaacagcatctctaggttaatacttcacaaatgcacatcatcaactcagacctctcccttgtgctccagaatcactgagccaactgcatatatgacagctccatttggatgtttcactggcttctcaaacttaaaagtccaggactgcactgttaacttccacaccatcacacacacacacacacacacacacacacacacacgaaatctgtttctcttgtagaggttytcatcattgttcatagatcttttctggatctattagcccatgctagaaacctaggagtcaaacttgataacttctttctcaattcagtgctgtcaattccattgtcaggataggtcttgaatttactgagttctttgtttcaccacatcatttctgcaagctgctattatttc

SEQ ID NO: 726375 - DNA, 659 bp, Homo sapiens
taccagagtaagcatctttttcaattatgagtattcactgatatttattaatactatatcatgaagaaattcaaaagaattaaaatcatttatatatacyctgagaacagtggaatttagctagagagtcataacaaatgtgcacttggaaatttcatacatcttacaattaacaatgaagatcaagattgcacaaaaggttctactgaataccaagatttttataatgctaaagctagtgttgtatatgtaccaagcagaaaatattgaaacagaatggaaagctcagaaatagatccacatatagatgattacttgctttatgataaaggagacttcagagcaatggagaaaggttttttttaaatcaacgtgaggcatttagatagccatgtaaaaattaatctttatccttaattcacataatatgcaaaaattcagtacaggtgagttataaatgaaaatgtgaaaggcaagtagtaaagcttttacacaataacataggaagatatttccataaacttatggtaggaaagatgtctttgcaaaaattagccagtggtggcacgtgactataatcccagctatgtgggaggctgaggcaccaggttcacttgaacccgagagatggaggccacaatgaaccaaggtcatgccac

SEQ ID NO: 726376 - DNA, 613 bp, Homo sapiens
tttctagttcaataatgaattactggcaggcattttgtgcaatgtaaccatgtcccagtcctgcccctgtctgctgttaactgggcttgtcaatttgaaaaaagagagaagtataaaggtagaaaaggagaggagactttatttcatataagaggttacaacctgcaagttggccatctcccaggctgggaagcacagcctccagccaagaacagagacaagcacttcaaaagagaaggtgttgggttcaaaagatgagggcttacagctttaggctgaatgggttgactaaacgtacatattcaacaggtaacgagaggaactatgaattcatgaaagtagtcctgacacatgtgtattgaaaaaacatgcatataacatacaacccatgtccattttaggggggagacttaatatttaaatgtgttacaattaggcyctctacatccaaaggcattttcaggacaagaaggcatgcaatgtacaacctctgtaaactagccacaaccagccatggtcagtagtcttctaacctggagaaagttactaaaatcagtctcttctccaatcaaagctgcagttatggctggtgggccagggcatcagttagctg

SEQ ID NO: 726377 - DNA, 1114 bp, Homo sapiens
attttttgccatatggactgaggaggagaggaagctggatgcagcaagagagaggaatgaaggcaacactcacagaagagtagagatgagaggcagagagactagttgtgttcaggtctctgcttccagcttgctcctggggtcccactatttcttgccattaggtttttgcgatccagtccttacaatcaggtgtcctgctttgcttaacttaattttagtaagattcttacttataaccaaaagaatataactaatgtagtctgttaaagacactaaaatcctgtttgccacatttatggtaaaatttttagtataatgatttgttatataaacaaaaacatggcaatatcattcttagcctataggctttttaagtgaaaaagaaaactataatttctcctccttctccaccatcttcttcccatcttcctctttcttcttttctgaatcttcttccttttttttggtgctcttggagcctagaacaatgatgggcattaatagatgctcaattaatgtttattgacctaaactgaacataaataaataggaaaataagaaagaaattcctccacaatctcaccactacatgaataaaactcttttcagtcatccctgtacttaccattgtccacattcttccgtcatttttatttttctgcaatcccaggatagacccagttttgattcctacctttgttcaataacactgtattataaatacatttccatgatggtcacagcctttaaaattgcaattattattgttgcttcaataacaggaaaagataaatgtagaaagtattttttattgaatatttcataaggccaaacagaaatggaaagtgctttcattatagtcaacaagccaaatctctggcttttctcttgcttcattgcctttccctgagaaaccacatcctgcacaaatccarctctgctcttactccacgcctgttcccgtgctgctgaaccaggctggaagaaaaacacagccacacatgcctgtctcactttcacttcctgaccactcaccccaagaaggctcataatgctgcgtagcaatcattctatatttctctaatctatttactctcccttctcttaggcg

SEQ ID NO: 726378 - DNA, 2352 bp, Homo sapiens
tcaagagtttgccacaggtcagtagcattcctagggggcacttggaaatataagggtatggggagtttcttttgtcacaatgaatgcagatgttagtggcatttggcaggccaaggatgctaaattctgcaatgtaagaggcaggctacctaacagagaactagcccagcaaaaataccaactgtgctccactgagaaatgctaccagattgtggctcttaatctttcttaacygagacccttggtctcacaatctcaaaaacacacttctgaaacaaaggtttcatgtagcaatatttgcccatactacatgtaacgcattcagatattttctactctgttgtgctccgttatattttttttaaaaaggctgatcaaaacccgttcaatagatttcatgatgcacaaataggccacaacccatactagggtgtgatgatttcaaaactcttcatcagcccgagagggtggaaatatatggaatgaaactcaccataggaatcgtttgtctgctctcacgcacactacctgacctaaaaaaatctcagggctaaagtgaaagccccagtgacttctaacgagctaaatctgacttgctctgtctcccacaaccagatggccaaagagagacaaacaatcgtgcattgctgagggccgtggttctttcagggctctgctctctgaagcgggtggcccatgtgttttgtgtttccccgaatgggtggatccgacccattcaaaggctcttgcatcacagtggacgatgaagctagccacaatgggagtgggggctgaggaccctcaattaagccaaaaggtcttaagtgagtatttctcagcaacatcgagccatagcaccttacgccagatgggcagcccggttctccaaacccattgcaaagttccctaccacacaggcaagctatgcgggtcctaaagagacagaaaccgcacaggaatagatgctgcccaggaggctgagggctgggccaggttcaaggggtggagcctgtggcagtggttggtggaagaaccagccgctctttgaccatgtcaaagtcttcatcacaaattaaattaatctgatccctttttccaactgcttcctcctaatagttttaccatgctcttaacaaccaccatatcaacatgttattgttaaaggatttaaagacaccatgttcggaaaacgtggtccaccccacacccttccatggttattcctccctagcttggcttatgctttttctgcttctcggattttgtggctcagtgttcccacatgtagagccctcatgtaaggtgccgcacattccctctgccagcagcctggtgtcaccaagaagccagaccccaccccgtttcaaaccctacccccatcactccaggccctgaggaacccagccctaccagggctcccgtttttaatgactcatgagatttcgtaggtttcccatccaaaatgctgacaaaatacaaccttggtgcgcactggcctctgttcttacaatctaaacaagatgccgctgacccacatctgtctggacctttacagttccctcactacttacgtcacatgattatcaaaacagccccgggggtgtggaaacagactcaggggttaagcagcaaacgttcacaaggtcagctggttgataaagggcagagctggagctggaacttggttcttctggcctcacatcccatctcgcctacacttcaggaaagcacgcagactttattcacttcagccacctaaacttgctatctgggtgatccagggaaagccacctgaaggtttttcacattcgcatgagcccatgcgggagtactgggggacttctctgagagatgaaagtttctagccgcaaggtgagaccagagaaatcccaacacatctttgcttatgtggatgcctggctgtttgcttgggatcagcttctcagacccccatttccagtagttgcctgtggtccatgaataaagacgaaaatcagagctggctttgtggattctttctagaaaagctcagaagtgtagaacatcctagaaaagactcttctcaaaaacaaagtgaaaaataactttttatatttgtttaatttaaaagggcaagctttaattacttagaaaagtatcagaacagctctacgacaaaattttaatgtacatgtgttacaagggagtttttgaagccaaatttcctcttttatgtttgtggacctcatgaaatggaacacctaccttcttcaaaagatactatgaagccataaaaatgttaatgtgctttgactcagtaatccccttctgggaagctagcctaagaaaataccctgaaatatggaaaaagcc

SEQ ID NO: 726379 - DNA, 2352 bp, Homo sapiens
tcaagagtttgccacaggtcagtagcattcctagggggcacttggaaatataagggtatggggagtttcttttgtcacaatgaatgcagatgttagtggcatttggcaggccaaggatgctaaattctgcaatgtaagaggcaggctacctaacagagaactagcccagcaaaaataccaactgtgctccactgagaaatgctaccagattgtggctcttaatctttcttaactgagacccttggtctcacaatctcaaaaacacacttctgaaacaaaggtttcatgtagcaatatttgcccatactacatgtaacgcattcagatattttctactctgttgtgctccgttatattttttttaaaaaggctgatcaaaacccgttcaatagatttcatgatgcacaaataggccacaacccatactagggtgtgatgatttcaaaactcttcatcagcccgagagggtggaaatatatggaatgaaactcaccataggaatcgtttgtctgctctcacgcacactacctgacctaaaaaaatctcagggctaaagtgaaagccccagtgacttctaacgagctaaatctgacttgctctgtctcccacaaccagatggccaaagagagacaaacaatcgtgcattgctgagggccgtggttctttcagggctctgctctctgaagcgggtggcccatgtgttttgtgtttccccgaatgggtggatccgacccattcaaaggctcttgcatcacagtggacgatgaagctagccacaatgggagtgggggctgaggaccctcaattaagccaaaaggtcttaagtgagtatttctcagcaacatcgagccatagcaccttacgccagatgggcagcccggttctccaaacccattgcaaagttccctaccacacaggcaagctatgcgggtcctaaagagacagaaaccgcacaggaatagatgctgcccaggaggctgagggctgggccaggttcaaggggtggagcctgtggcagtggttggtggaagaaccagccgctctttgaccatgtcaaagtcttcatcacaaattaaattaatctgatccctttttccaactgcttcctcctaatagttttaccatgctcttaacaaccaccatatcaacatgttattgttaaaggatttaaagacaccatgttcggaaaacgtggtccaccccacacccttccatggttattcctccctagcttggcttatgctttttctgcttctcggattttgtggctcagtgttcccacatgtagagccctcatgtaargtgccgcacattccctctgccagcagcctggtgtcaccaagaagccagaccccaccccgtttcaaaccctacccccatcactccaggccctgaggaacccagccctaccagggctcccgtttttaatgactcatgagatttcgtaggtttcccatccaaaatgctgacaaaatacaaccttggtgcgcactggcctctgttcttacaatctaaacaagatgccgctgacccacatctgtctggacctttacagttccctcactacttacgtcacatgattatcaaaacagccccgggggtgtggaaacagactcaggggttaagcagcaaacgttcacaaggtcagctggttgataaagggcagagctggagctggaacttggttcttctggcctcacatcccatctcgcctacacttcaggaaagcacgcagactttattcacttcagccacctaaacttgctatctgggtgatccagggaaagccacctgaaggtttttcacattcgcatgagcccatgcgggagtactgggggacttctctgagagatgaaagtttctagccgcaaggtgagaccagagaaatcccaacacatctttgcttatgtggatgcctggctgtttgcttgggatcagcttctcagacccccatttccagtagttgcctgtggtccatgaataaagacgaaaatcagagctggctttgtggattctttctagaaaagctcagaagtgtagaacatcctagaaaagactcttctcaaaaacaaagtgaaaaataactttttatatttgtttaatttaaaagggcaagctttaattacttagaaaagtatcagaacagctctacgacaaaattttaatgtacatgtgttacaagggagtttttgaagccaaatttcctcttttatgtttgtggacctcatgaaatggaacacctaccttcttcaaaagatactatgaagccataaaaatgttaatgtgctttgactcagtaatccccttctgggaagctagcctaagaaaataccctgaaatatggaaaaagcc

SEQ ID NO: 726380 - DNA, 2352 bp, Homo sapiens
tcaagagtttgccacaggtcagtagcattcctagggggcacttggaaatataagggtatggggagtttcttttgtcacaatgaatgcagatgttagtggcatttggcaggccaaggatgctaaattctgcaatgtaagaggcaggctacctaacagagaactagcccagcaaaaataccaactgtgctccactgagaaatgctaccagattgtggctcttaatctttcttaactgagacccttggtctcacaatctcaaaaacacacttctgaaacaaaggtttcatgtagcaatatttgcccatactacatgtaacgcattcagatattttctactctgttgtgctccgttatattttttttaaaaaggctgatcaaaacccgttcaatagatttcatgatgcacaaataggccacaacccatactagggtgtgatgatttcaaaactcttcatcagcccgagagggtggaaatatatggaatgaaactcaccataggaatcgtttgtctgctctcacgcacactacctgacctaaaaaaatctcagggctaaagtgaaagccccagtgacttctaacgagctaaatctgacttgctctgtctcccacaaccagatggccaaagagagacaaacaatcgtgcattgctgagggccgtggttctttcagggctctgctctctgaagcgggtggcccatgtgttttgtgtttccccgaatgggtggatccgacccattcaaaggctcttgcatcacagtggacgatgaagctagccacaatgggagtgggggctgaggaccctcaattaagccaaaaggtcttaagtgagtatttctcagcaacatcgagccatagcaccttacgccagatgggcagcccggttctccaaacccattgcaaagttccctaccacacaggcaagctatgcgggtcctaaagagacagaaaccgcacaggaatagatgctgcccaggaggctgagggctgggccaggttcaaggggtggagcctgtggcagtggttggtggaagaaccagccgctctttgaccatgtcaaagtcttcatcacaaattaaattaatctgatccctttttccaactgcttcctcctaatagttttaccatgctcttaacaaccaccatatcaacatgttattgttaaaggatttaaagacaccatgttcggaaaacgtggtccaccccacacccttccatggttattcctccctagcttggcttatgctttttctgcttctcggattttgtggctcagtgttcccacatgtagagccctcatgtaaggtgccgcacattccctctgccagcagcctggtgtcaccaagaagccagaccccaccccgtttcaaaccctacccccatcactccaggccctgaggaacccagccctaccagggctcccgtttttaatgactcatgagatttcgtaggtttcccatccaaaatgctgacaaaatacaaccttggtgcgcactggcctctgttcttacaatctaaacaagatgccgctgacccacatctgtctggacctttacagttccctcactacttacgtcacatgattatcaaaacagccccgggggtgtggaaacagactcaggggttaagcagcaaacgttcacaaggtcagctggttgataaagggcagagctggagctggaacttggttcttctggcctcacatcccatctcgcctacacttcaggaaagcacgcagactttattcacttcagccacctaaacttgctatctgggtgatccagggaaagccacctgaaggtttttcacattcgcatgagcccatgcgggagtactgggggacttctctgagagatgaaagtttctagccgcaaggtgagaccagagaaatcccaacacatckttgcttatgtggatgcctggctgtttgcttgggatcagcttctcagacccccatttccagtagttgcctgtggtccatgaataaagacgaaaatcagagctggctttgtggattctttctagaaaagctcagaagtgtagaacatcctagaaaagactcttctcaaaaacaaagtgaaaaataactttttatatttgtttaatttaaaagggcaagctttaattacttagaaaagtatcagaacagctctacgacaaaattttaatgtacatgtgttacaagggagtttttgaagccaaatttcctcttttatgtttgtggacctcatgaaatggaacacctaccttcttcaaaagatactatgaagccataaaaatgttaatgtgctttgactcagtaatccccttctgggaagctagcctaagaaaataccctgaaatatggaaaaagcc

SEQ ID NO: 726381 - DNA, 861 bp, Homo sapiens
tcacataggaagcatattgggtagcagtagtttgaaccctctgttcttcaacaagtcttcatctaatggtttgtctatcgaatgatctttccaaaatcacttatattatttttatttctaaagttattagctggaattcttctgtaagaacatttccaaatcatcttaagtgtttggcttcctcagaaataaataagggagatcatatttttattccattctgtaccttagtattgagtctcaaaaaggttaaatgaattgtccaaacatataaactttgtatcctatatagctcagaatcaaacctaagtttttgataccaattctaattatttcagatgcactgccaatgggagtcagtcagttgacatcgtaacaggttcttctttgttgttgtaygtatagctttaaaagttaagggatgagaaataggatgatttaggataagcccctttcctgttttattttctgcataaattcaggaaagaataggtaatttcatctgacaaactacagatataattttcagagcaattaagtgcttggaaatacaattacttggattcaaattcttgctctgcaacttagcagctgtaacctgacttttggcagtttccttaacctttctgtgctccagtttcttcatctgtgaaaagaggatcctaatagtatctgtcctaaagggttgttgtgagtactaaataaagctaatacaaagaaagtgcttagaaccgtgccttgtacatagtaagtactcaatatcattttgcttttcagaaataaaactgtcccatggctatacctttacttctaccagtcatccaaaccaaacattagaaatattgtaattttgatcagcat

SEQ ID NO: 726382 - DNA, 861 bp, Homo sapiens
tcacataggaagcatattgggtagcagtagtttgaaccctctgttcttcaacaagtcttcatctaatggtttgtctatcgaatgatctttccaaaatcacttatattatttttatttctaaagttattagctggaattcttctgtaagaacatttccaaatcatcttaagtgtttggcttcctcagaaataaataagggagatcatatttttattccattctgtaccttagtattgagtctcaaaaaggttaaatgaattgtccaaacatataaactttgtatcctatatagctcagaatcaaacctaagtttttgataccaattctaattatttcagatgcactgccaatgggagtcagtcagttgacatcgtaacaggttcttctttgttgttgtatgtatagctttaaaagttaagggatgagaaataggatgatttaggataagcccctttcctgttttattttctgcataaattcaggaaagaataggtaatttcatctgacaaactacagatatarttttcagagcaattaagtgcttggaaatacaattacttggattcaaattcttgctctgcaacttagcagctgtaacctgacttttggcagtttccttaacctttctgtgctccagtttcttcatctgtgaaaagaggatcctaatagtatctgtcctaaagggttgttgtgagtactaaataaagctaatacaaagaaagtgcttagaaccgtgccttgtacatagtaagtactcaatatcattttgcttttcagaaataaaactgtcccatggctatacctttacttctaccagtcatccaaaccaaacattagaaatattgtaattttgatcagcat

SEQ ID NO: 726383 - DNA, 861 bp, Homo sapiens
tcacataggaagcatattgggtagcagtagtttgaaccctctgttcttcaacaagtcttcatctaatggtttgtctatcgaatgatctttccaaaatcacttatattatttttatttctaaagttattagctggaattcttctgtaagaacatttccaaatcatcttaagtgtttggcttcctcagaaataaataagggagatcatatttttattccattctgtaccttagtattgagtctcaaaaaggttaaatgaattgtccaaacatataaactttgtatcctatatagctcagaatcaaacctaagtttttgataccaattctaattatttcagatgcactgccaatgggagtcagtcagttgacatcgtaacaggttcttctttgttgttgtatgtatagctttaaaagttaagggatgagaaataggatgatttaggataagcccctttcctgttttattttctgcataaattcaggaaagaataggtaatttcatctgacaaactacagatataattttcagagcaattaagtgcttggaaatacaattacttggattcaaattcttgctctgcmacttagcagctgtaacctgacttttggcagtttccttaacctttctgtgctccagtttcttcatctgtgaaaagaggatcctaatagtatctgtcctaaagggttgttgtgagtactaaataaagctaatacaaagaaagtgcttagaaccgtgccttgtacatagtaagtactcaatatcattttgcttttcagaaataaaactgtcccatggctatacctttacttctaccagtcatccaaaccaaacattagaaatattgtaattttgatcagcat

SEQ ID NO: 726384 - DNA, 1373 bp, Homo sapiens
tcatattggattaaagtctacactcatgaccttattttaacctgacctctgtaaagaccctgtctacacataaaatcacattcttaagcgcaaggagttagggcatcaccatatgaattcaacccattacagacagaaactgaaaagygcttaaccctgtttaagaaaataagataagaactaataattgatataaggcgcattttaagtttggattctgcattaagcataacaacttggattccagttagttttagctccattaattaagacaaatgggtgcctactacagtaaacttagctattggagtcatgctgaaatttgttataatccatgtcttcctttttctattaccattttattttttaccatcattgtgatatatgtctatttttcctgtctctgctccttataaatcaattgtatcttgtaagattttgaattttctggtgtggagaataaatctgaaataaaatgaaatactagtatgtaatctttcatgaacattttggctcacatccatattattggtcttagtgacatccagtggccatgacgggtcaatgtcaggatttcagatctttccagaaatgtctttactatgtagtcctcacctagaacagaggaaaaatagtatattcttaagccattggttaacatagttgtaataaaatatcccctggtcttttttgattcataaattgaactaccttttagataaaaataaagattattacacttagttttattttacttcacttttgtcaatgacttagtgtctcccatcgcttaaaaatatttaatctacaaaagctatttaaagagaagttctaaacagacaggattttataccattgaatagtattttattttcacacatctctaagttagaatattttactaaaataaaatgatcaaatatactagtaatggtatgtattttcctaaacaatcaaaattgtcctgtcaggtaataactttaaatatcacgtatctcattagaatgtagtgaagaaagtttgtgctgagacgtaattattaaggtctgactacgcttcaggggctaaatttggagaatgaagaaccagactactgcttggttacaaaaaaaaaaaagttcactaaatgtatgttgcaaatgtttgtgccttgaggaaagtttagtccttttggctgagtttcagataataacaacgctgatctgtattatagtgataagctacgaactaactacaaataatggttacctagtaatttgtagtttaaaaagtcaattatgcaaatttgcacatacaaaaaacctatggggagttgggaagtaaatctttctttctaactaatagcaaagtagcccatattcaatctcttttgt

SEQ ID NO: 726385 - DNA, 656 bp, Homo sapiens
ctttttttagacggagtctcgctctgttgcccaggctggagtgcagtaggcaatcttggctcactgcaacctttgcctcccgggttcaagtgattctcctgtctcagcctaccaggtagctgggattataggtgcccaccaccatgcccagctaagttttgtatttttagtagagatggggtttcaccgtggtgaccaggctggtcttgaactcctgacctcaggtgatccacctacctgggcctcccaaagtgctgggattacaggtgtgagccactgtgcctggcacagaattattcataggtatgattaactagctttgcttcagatttgaaagatcctgggatgaaaggttaaagatgtatttctttgttgccacacaatggatttctgaagctgggacgtgggagatagtactgagctttaagcattcatgactagtatgtaagaaagattagtgcccagaattgtgtttctaataagatagtaatttaaaagtcatttagagaatggtagttttttttttccccttcagttgaagctgttgattgtagacagtttagccaaatcattttgttyttaggattttttttttttttttttttttgagacagagtctggctctgtcgcccaggctggagtgcagtggcgcgatc

SEQ ID NO: 726386 - DNA, 1318 bp, Homo sapiens
tgttctgttttggatcccaaaattaaagaaaggcatacacaaaaacccaaaaaagccatttcagcagaacatggactcaaaaaaaaaaaaaggaaaccaaaagatttttatttaatgtatgtattttttatttattttagacagagtcttgttctgttgcacaggctaaagtgcaatggcaagatatcggctcactgcaacctccacctcccaggttcaagcgattctcctgcctcagccttccgagtagctgggattacaggcatgcgccaccacgcccggctaatttttgtatttttagtagagacggggtttcaccatattagccaggcggtttcgaactcctggcctcaagtgatccacccacctacacctctcaaagtgctgggattacaggcgtgagccactatgcccagccctgaaacaaaacaatttaaaaagaaataaaaaaggaaaacctcctgtgttttgcagaaatccaggcagcctgtgtgtgggttgggcccggtcacctgttatggagagggacaacagcagcttggttcactttccagtgaccttcgtctgcattgccagtcacactccatcttctgaggactctgaaatcacttcctgaacaatctgcccccgactttgcttggcgagtctgggctcatgagtccatgactcctgggctcacccttctagaagggtggggtgatggtgctctcttctctactggcttctggcctcaggcctgttttttttkttgttgttgttgttttttgttgttgtttttttttttgagatgggttttgctcttgtcacccaggttggagtgtaatggcacgatctcagctcattgcaacctccacctcccaggttgaagcgattctcctgcctcagcctcctgagtagctgggattacaggcacacaccaccacgcctggctaattttcatatttttagtagagacggggtttcaccatgttggccaggctggtctcgaactcctgacctcaggtgatctgcccgaccttggcatcccgaagtgctgggattacaggcatgagcaacagcccccgggccatctctgggctgttctgtgtggcgtcagattcatacccttcactctggctctcttggaatacgatttgccagatctagaaactcagccttatttatcttaccgtattttttaatacgtgtttttctaagacagtcattctgtttggatagcaaagtgacctagacgtcagaaggaacctgagaagcccagggggtttgaccaccacccactgtccccagcgtgggcccacagccccagcctgcattccca

SEQ ID NO: 726387 - DNA, 1318 bp, Homo sapiens
tgttctgttttggatcccaaaattaaagaaaggcatacacaaaaacccaaaaaagccatttcagcagaacatggactcaaaaaaaaaaaaaggaaaccaaaagatttttatttaatgtatgtattttttatttattttagacagagtcttgttctgttgcacaggctaaagtgcaatggcaagatatcggctcactgcaacctccacctcccaggttcaagcgattctcctgcctcagccttccgagtagctgggattacaggcatgcgccaccacgcccggctaatttttgtatttttagtagagacggggtttcaccatattagccaggcggtttcgaactcctggcctcaagtgatccacccacctacacctctcaaagtgctgggattacaggcgtgagccactatgcccagccctgaaacaaaacaatttaaaaagaaataaaaaaggaaaacctcctgtgttttgcagaaatccaggcagcctgtgtgtgggttgggcccggtcacctgttatggagagggacaacagcagcttggttcactttccagtgaccttcgtctgcattgccagtcacactccatcttctgaggactctgaaatcacttcctgaacaatctgcccccgactttgcttggcgagtctgggctcatgagtccatgactcctgggctcacccttctagaagggtggggtgatggtgctctcttctctactggcttctggcctcaggcctgtttttttttttgttgttgttgttttttgttgttgtttttttttttgagatgggttttgctcttgtcacccaggttggagtgtaatggcamgatctcagctcattgcaacctccacctcccaggttgaagcgattctcctgcctcagcctcctgagtagctgggattacaggcacacaccaccacgcctggctaattttcatatttttagtagagacggggtttcaccatgttggccaggctggtctcgaactcctgacctcaggtgatctgcccgaccttggcatcccgaagtgctgggattacaggcatgagcaacagcccccgggccatctctgggctgttctgtgtggcgtcagattcatacccttcactctggctctcttggaatacgatttgccagatctagaaactcagccttatttatcttaccgtattttttaatacgtgtttttctaagacagtcattctgtttggatagcaaagtgacctagacgtcagaaggaacctgagaagcccagggggtttgaccaccacccactgtccccagcgtgggcccacagccccagcctgcattccca

SEQ ID NO: 726388 - DNA, 1318 bp, Homo sapiens
tgttctgttttggatcccaaaattaaagaaaggcatacacaaaaacccaaaaaagccatttcagcagaacatggactcaaaaaaaaaaaaaggaaaccaaaagatttttatttaatgtatgtattttttatttattttagacagagtcttgttctgttgcacaggctaaagtgcaatggcaagatatcggctcactgcaacctccacctcccaggttcaagcgattctcctgcctcagccttccgagtagctgggattacaggcatgcgccaccacgcccggctaatttttgtatttttagtagagacggggtttcaccatattagccaggcggtttcgaactcctggcctcaagtgatccacccacctacacctctcaaagtgctgggattacaggcgtgagccactatgcccagccctgaaacaaaacaatttaaaaagaaataaaaaaggaaaacctcctgtgttttgcagaaatccaggcagcctgtgtgtgggttgggcccggtcacctgttatggagagggacaacagcagcttggttcactttccagtgaccttcgtctgcattgccagtcacactccatcttctgaggactctgaaatcacttcctgaacaatctgcccccgactttgcttggcgagtctgggctcatgagtccatgactcctgggctcacccttctagaagggtggggtgatggtgctctcttctctactggcttctggcctcaggcctgtttttttttttgttgttgttgttttttgttgttgtttttttttttgagatgggttttgctcttgtcacccaggttggagtgtaatggcacgatctcagctcattgcaacmtccacctcccaggttgaagcgattctcctgcctcagcctcctgagtagctgggattacaggcacacaccaccacgcctggctaattttcatatttttagtagagacggggtttcaccatgttggccaggctggtctcgaactcctgacctcaggtgatctgcccgaccttggcatcccgaagtgctgggattacaggcatgagcaacagcccccgggccatctctgggctgttctgtgtggcgtcagattcatacccttcactctggctctcttggaatacgatttgccagatctagaaactcagccttatttatcttaccgtattttttaatacgtgtttttctaagacagtcattctgtttggatagcaaagtgacctagacgtcagaaggaacctgagaagcccagggggtttgaccaccacccactgtccccagcgtgggcccacagccccagcctgcattccca

SEQ ID NO: 726389 - DNA, 1318 bp, Homo sapiens
tgttctgttttggatcccaaaattaaagaaaggcatacacaaaaacccaaaaaagccatttcagcagaacatggactcaaaaaaaaaaaaaggaaaccaaaagatttttatttaatgtatgtattttttatttattttagacagagtcttgttctgttgcacaggctaaagtgcaatggcaagatatcggctcactgcaacctccacctcccaggttcaagcgattctcctgcctcagccttccgagtagctgggattacaggcatgcgccaccacgcccggctaatttttgtatttttagtagagacggggtttcaccatattagccaggcggtttcgaactcctggcctcaagtgatccacccacctacacctctcaaagtgctgggattacaggcgtgagccactatgcccagccctgaaacaaaacaatttaaaaagaaataaaaaaggaaaacctcctgtgttttgcagaaatccaggcagcctgtgtgtgggttgggcccggtcacctgttatggagagggacaacagcagcttggttcactttccagtgaccttcgtctgcattgccagtcacactccatcttctgaggactctgaaatcacttcctgaacaatctgcccccgactttgcttggcgagtctgggctcatgagtccatgactcctgggctcacccttctagaagggtggggtgatggtgctctcttctctactggcttctggcctcaggcctgtttttttttttgttgttgttgttttttgttgttgtttttttttttgagatgggttttgctcttgtcacccaggttggagtgtaatggcacgatctcagctcattgcaacctccacctcccaggttgaagcgattctcctgcctcagcctcctgagtagctgggattacaggcacacaccaccacgcctggytaattttcatatttttagtagagacggggtttcaccatgttggccaggctggtctcgaactcctgacctcaggtgatctgcccgaccttggcatcccgaagtgctgggattacaggcatgagcaacagcccccgggccatctctgggctgttctgtgtggcgtcagattcatacccttcactctggctctcttggaatacgatttgccagatctagaaactcagccttatttatcttaccgtattttttaatacgtgtttttctaagacagtcattctgtttggatagcaaagtgacctagacgtcagaaggaacctgagaagcccagggggtttgaccaccacccactgtccccagcgtgggcccacagccccagcctgcattccca

SEQ ID NO: 726390 - DNA, 665 bp, Homo sapiens
tcctgacttcaggtgatccactcgccttggcctcccaaagtgctgggattacaggcatgagccactgcgcccggcctcccactttgatttctgaaccttttgggtaacatctccttccctcacatttcttgtgtgttgaggtcttttgttcaggctttcagtggatgaaaggacagaggaggaaacagctgtgggaagagcagctgctgtgcctccctgcctctctgcttggccacagctcccctccctctctggctgccctagcactgaactctgatcttcagcagtgagacctagtacctgcctccgcctcactgggaagcaaagcygcagagcaggtgcagctgtgtgtggcatggccagccacaagccagaaaaaccagcaaaccagggccgggaacaatacttcctgggaccagccccggggaccactttggaaatgagcatggcagaggcagccacagggtgagtacccaagttcacgtgcacctgctttaaagggaaccagtgggttctatgccaagtgctcatatggagggcatctgtggtcaggctgcaacttcaggggagaatttccacaggtgtcctgcactgatttctgtcattccaagtgacagcacctgtttgagggagtgctctagggccattcggggagaatcagtgac

SEQ ID NO: 726391 - DNA, 616 bp, Homo sapiens
gatttccttgaatatttaaggtatagatgctgtctgttctgtaactctacgcatgatcgcctcctaccattttcatacatagttctggtacccaagtattgcatcaaatagaaattatagtcagtttcattttctgccctggcgaacaggaaatgtagtaggcacagataatccaaaataattggctagcttttggtatgcagttttgtacttaatttgagtatgtgtggctgaggattcagagcgctttaagtattgatcctctttggaagacacagcttgagattaatcatgttttttagacccttggtatcttttctaccacactcatttcattgtttccagttcaggagcccagcagagatagtagaacctccttcttccatctcctgcctttctcacacatatgccttgtggtaaaggtacaggcaggaggctgcgggagagaggggttcttttacagttaaaaaaayattttttttttacacttaagatgatggagggaacctcaaaaatttattttcttgcttgagcagtgttgacatcaacaagaggataccaggtattaaggtgtctaggcttctgaggttgagaccatcttgaggggaaatctaca

SEQ ID NO: 726392 - DNA, 613 bp, Homo sapiens
gggtcctatgcccagagctgtgttaatatgcttgaatgttttaagcttattttaactagccaccactggtaagaatgctgacaagtaagccactaagatccacatacttgacttcaaatggtctagttccacaaacaaatcaatgacacyttgtcttgctttacagatgtttgttcaaatatatcagttacatcattgttcagaattttacaccccagagtttattctaaagacagatgaaagatatgtttctgagttcttagaagtatgggaaatattattcatacaagatataaacaataacatttctgtagacatttacttttctgttactatgtataatgtgtatatatatatataaaatacaggctgctaagtgtattgtccactatgaggaccaagtgggttatgattgccaaagttgaagctgttttagtaagaaaaacaattagtgagagatctcaaagttaaactgtctctatgccaaataaaaaaatatgtgttttgcaaaacctacaaatcttagttttcaaatgatattgaaaaaacaaacatgcctgaagtacaaatgtgataggtgttattgcctcaattcttactgacttctgataaa

SEQ ID NO: 726393 - DNA, 648 bp, Homo sapiens
acatcatttgttgcattagccatagagactatagaatctgaagaacattacagatgatctaatttaacctatttgttctgttaaaaaggaaatggagggtgaggactaatgtgacacaactttactaccacaagatttgaatccagaatttgttattctgaatccaaattgagcaaagtttccattacacaatgtttacagcaaatgtgggcatgagacaggatacatattattcccagtttatagatgaagctattgaagatcatgaaggttaagtgacttatacatgggcacatgaccaagtcaggacaaagctaagaaggaactcacttcctttgattcccagttagtgttttttacaaacacacatatgcatgaacacaaactcagaaactgagatacaaatcttccattaaccagctggtcaactattaatcatttactgagcatcagatattttcctggtcagtagggatatttttaaacaggacagagtcaggatttccagggtgtgtcagccagcatccaaagtgccccccaaatgatttttgcctctttatatatatatcatatgaatatatattcatatatattcaatatatatattcatgtgatatatatattttatatatatatatatttmtaccc

SEQ ID NO: 726394 - DNA, 656 bp, Homo sapiens
tcaaagcccttagggcccctttggaaatggaggatcagggggatgctacagccgcaccaggagtcggtcagagcacgaggctgagaaggctctcagtggtcacggcctcccaaagccaaagcacccaaggactgccgtgggaagtggaggtggctgctgaggtacttggcctcctggaaccaaacatctagaaatgtgggaacaatgcgggaagggggcttcctgttttctaccaggatactcaggcgatgatgtgtrgacatggtcaataattttacagctacacacagggtccctgcatgtgtactcaaagccaggtgtcagggaaacccagattcattctacgaggttccttcccacaaagaacttcagtttaatgaaggagacagacatgtgaacatataaaagacaataacatttaaaatgccactttccagtgaggtcagagccagcttagaaagtggctttgcagcagcaggggtatggtttatggtttaccaaccaatctcacacccaccaagggggctgagcgaggggagggacttgctctggtcatgctgtgggactcccaacccagtgctctattcaccgaccaaggatcctcccatcccccacttctgctggggctggggcgaacatcaggaatcgcctgcctt

SEQ ID NO: 726395 - DNA, 1806 bp, Homo sapiens
ataggaagtttcaatttgcttatgctgctgtcttggagtaattttttgaaagaaattatatgttaaaaaactaaagatgtttaacaaaagtggtcttttgcccacagaagggaaataaacaattcttacctgcaggccttacccagactggtttcagtttttttcctgttctacttaaatggatattagcgctgttcttgggactgctgagaacagttaactgcagtgatgttggacaggtggaagagtagaatgatgggagtatattggggtttatcaatagttacgctatcaaaagctatcactagctggtgtggtggctcatgcctgtaatcccagcactttgggaggtcgaggcgggtggatcacctgagctcaggagtttgagaccagcctgaccaacatggtgaaaccctgcctctactaaaaatacaaaaattagctgggcgtggtggcacgcacgtgtaatctcagctacttgagaggctgaagcaggagaatcgcttgaacccaggaggcggaggttgcaatgagccgagattgcaccattgcactccagcctgggtgacagagcaagactctgtctcaaaaaaaaaaaaaaaagaaagagaagaaaaaaagctatcactgcattttctgcttttgtggtaaaatatgtatagaaataagagagtgagatattgtgagttttggtgtatatactgatcctttgactttgttgagaaatgtagggaagtagtagtaagaggaccaaatatatacatggaaggggccgggcgtggcggctcacccctgtaatcccagcactttgggaggccaaggcgggtggataacttgagctcgagtttgagaccagcctgggcaacatggtgaaaccctgtctttactaaaaatacaaaaattagctgggtgtggtggcacttgcctgtaatttcagctgcttgagaggctgaggcacgagaatcgcttgagcctgggaggcggagattgcagtgagttgagatggtgccactgccctccagcctggggaacagagtgagaccctgtctcaaaaaaaaaaaaaaaaaaaaagaaaaagaaaaaaactgtatacatagaatagcaagcagttaggtagtaggacaatttgtagtgcttttgggatgttcttggagttgaaaagttggctgtccattctgcttctgcaccttggattttagtggctgcagatgctgcatgctgaccttctgttgaaatttgttttattgtcagagaactaaaaagtgagcagtttctcagactaaacagaagtagagtaggcagaaagtaaaacaggtattcatttaataatcacatttacagggccagtcgcagtggctcacgtctgtaatctcagcactttgggaggctgaggtaggtggatcacttgagctcaagagtttgagaccagcctgagcaacatggtgaaactctgtctctactaaaaatacaaaacttagctgggygtggtggtgtgaacctgtaggcccagctactcgggaggctgagacaggagaatcacttgaacctgggaggtgtagcttgcagtaagccgaaatcacgccactgcactccagcctgggcgacagagtgagactccatctcaaaaaaataaaaaaataaaaattcacatttacagatagagaaaagttggaactcatacttaaagagacagggtcttgctatgttgcccatggtggtcttgaactcctgagctcaagtaatcctcctgcttgacttccctaagtgctaggattactacaggaatgagccactatgcccggctgg

SEQ ID NO: 726396 - DNA, 1075 bp, Homo sapiens
tatggtgaccagttatccaaactcaaattgtgtagaaggtctgatgaaggaatttagttgtaaaattattaatatgaaaaagaatgcaacaaataagtaattatgcagttaaataaccattattgaaaagaaaaacatgaaatcatatgtctcaaaattgggggcacctggccacaaaatctactttgtatgactcttgtctttatccttaccatgttcaacttctctgctacgttcaaattttcccagaaagcatttcatgatcaacttcattctacctggatttttttctgttctttggttccagtacttgctatttattgctgataggttgtctgtaagtgcgtaccttctctgtcattctagaatggaagcatcatgtcacaacagactgtcccatcgcaaaagacggtgaagtgtcacccttgtggatgctgaaccccagtggggctccaggtgttctgggtcccctagcatagtccaggagatttgaacctttgtagtttatgcaggatttgtttgggtctgagggatagtggattaaccagaaatctctrgcgatcactgataggtctcaaaaaaaaaaaaaaaaaagagaatggctcttaaagctgcagtatgaaactattttaaattttcaggttactaaagagcactaatggcattttatttgaggggtgtggtattcccttatttattcaaatctttttttgagacagggttttcactcctatctcccaggttggagtgcagtggtgcgatctcagctcactgcaacctctgcctgctggattcaagtgattttcccacctcagcctcccaagtagctgggactataggtgtgcaccaccacttctggctaatttttgtatttttggtagagatgggatttcagtatgttggtcaggctggtctcaaactcctgacctcaaatgatctgcctgtttcaacctcccaaagtgctgggattacaggcatgtgccatcatgcctggcctttttcttgatttttaattgaacttcctgttaatcactcttatttttcttcagcttttaagttccagggtacaagtgca

SEQ ID NO: 726397 - DNA, 604 bp, Homo sapiens
tgccaatggctacttttaataattttcagtatatcaaatgataatttcagaagccattttattaactactgttcactaaaataggaataagtgaaaaccaaataatcacaaagttacattacaaatattacaagactgagggttaaatataaaaatttattytatattccgagacagtttctcggcttaacaataacattcttaacatatccataatgttggagttataggatcaaaaagctgtcaggaaagttatgagacttctagttaattctcaaacattctttagttctacatgtctaggaggaaaaaaaggaaggggttttattgcaaggtctaaaataaacaggccatacaaatttgacagctcattatgataagtgaaaaagtaagaaatcaaaagaaatcaaggatataggcaacatcttaaccattattcccagtttggtgtttttaaactatggataatttgaaactataaaatcttaaaagatattgtgggagggtacagtgcttttaattgtaaacttcaaaatgatatcaccctgataattgctaaaactgcatttacaccctgcagggtacaagtaataaggccaaccta

SEQ ID NO: 726398 - DNA, 681 bp, Homo sapiens
tgcagtatagatgaaccttggaaacatgatgctaagtgaaagaagccaggtacaaaggatcacacgtgacatgattccattcgtatgaaattccagaatagatacatctatacagacagaaggtagattggtagttacctaggcctgggggattgagaagactgggaggtaacaaataagagtcatggggtttatttttaggaaaattaaaaaggtctaaaattgattgtggtcagtgatgtacaactttgtgaatatcctaaaagaaacctttgaacggtattctttagatgaatgaattgtataatatgtgaattacatttcagtaaagctgttaaaaaacattactgttgttttaaaaataagctaattagtaattattttattttctagaaattttaatttctacttcttgcctagttttgtcatttaaaatataccaaaaagtaacatttgggcttgatccattttagagtacgataaaaattagttgttcattgagactttcatggactgggttcaaacttctgagatatatatatatakagagagagagatctatatctatctaatattttatattagatatttatatctatttatatctaatttaaaactatatatatgaagttttaaaaaatatcatctatccatctagaaaaacacatacacacatacaag

SEQ ID NO: 726399 - DNA, 659 bp, Homo sapiens
agacacagaactctcagatgagatcttggtccttgggtgggtgctcctggctgtgcaggaggcctgtcccccatttggtctgggaccagtacgcggtggtttgagtcaactcactccatctctcctgagatttttgcccaggcatagactttgcaaatacacagacctcagttcaaatctcagctctgcctcttaaaggctgtgtgatcttggccaagttgctctgtctctctgggcctcaggttgcttaccagtaaaatgtggtaataatgcctattgtcaggtcaacataagggttaaacgggtcggcaccaaatcatgataggtggtcagtgagtgcaggttccctccaccatccacgggcctcatgttggtggtcctgtcagctgtcagagcccagcatggggctgtattcatggctacactgttcctgaacaaggacagaattgggcttctaataagacaggactgaagggtggggtgaggaaagttccagaaactgcttmtcaagcccacagacagctgcactaatagctgccccctccttctggggacttgggcaatcactccaactttccagtaacttctgcttctttcacaataggctggagggataattctacctaaaaaataattgctttgctaggaaaagcctggca

SEQ ID NO: 726400 - DNA, 531 bp, Homo sapiens
cacctgcaaagtgcttcaytcatctgggtctcagttttcctaatctatcagatgggcacggccgacctgcccagtctgcctcacagagttagagtgacaattatacaagacgctgtgttttgcaaacaagaaaagcatcatctcacagcacatgctacctctccatctctctccacagctgaatacaggttgcagacacattttatttgaaactctcaacagtaaaaaaaattctaaaatttttgccaacattaaaaaaacagatacttacctaagattttaaagatatccctctgtctctgacagtacaggtgcattcccacaaggcagtactcaagcgcactgagctgctcccttctccagttcccatagcctcccaaatgcccagtatgtcctcaacacctaggccaagggtcaggtgttatttgttgaagggggccagcccctccacacctgtgggtatttctcgcaaggtggaggcgagagactgagaaaagaaataagacacagagacaaagtatagaggaagaa

SEQ ID NO: 726401 - DNA, 531 bp, Homo sapiens
cacctgcaaagtgcttcactcatctgggtctcagttttcctaatctatcagatgggcacggccgacctgcccagtctgcctcacagagttagagtgacaattatacaagacgctgtgttttgcaaacaagaaaagcatcatctcacagcacatgctacctctccatctctctccacagctgaatacaggttgcagacacattttatttgaaactctcaacagtaaaaaaaattctaaaatttttgccaacattaaaaaaacagatacttacctaagattttaaagatatccctctgtctctgacagtacaggtgcattcccacaagrcagtactcaagcgcactgagctgctcccttctccagttcccatagcctcccaaatgcccagtatgtcctcaacacctaggccaagggtcaggtgttatttgttgaagggggccagcccctccacacctgtgggtatttctcgcaaggtggaggcgagagactgagaaaagaaataagacacagagacaaagtatagaggaagaa

SEQ ID NO: 726402 - DNA, 681 bp, Homo sapiens
ttcttcccttaagaaagttttctggtgttgctttgcaatcagtgtcctcctacctcctctggcaggcaactgctggtctgatttctatcactatggatttggctgttttagaatttcatgtaagtagaatcatacagtatgtatttttctgtgtctggcttgctttgttcagtgtaatgtttgtgagatctatctgtttatcgcatctatcagtaatttgttcctttttttttttttttttttcttgagatggagtctcgctctgtcgcccaggctggagtgcagtggtgcgatctcggctcactgcaagctccgcctcccaggttcacgccgttctcctgcctcagcctcccgagtagctgggactgcaggtgcctgccaccatgcctggctaatttttttttttttttttttgkatttttagtggagacggagtttcaccgtgttagccaggatggtctcgatctcctgacttcacaatccgccggccttggcttcccaaagcgctgggattacaggcgtgagccaccgcgcccggccatttgttcctttttattgctgaatagtaatctattgaaaagcccaagatgtttcctaagcctttctagtttggcaggactcagccttgaaactctgtcttccctgcggatctttttgggggcttgttttgaggcttttcta

SEQ ID NO: 726403 - DNA, 681 bp, Homo sapiens
ttcttcccttaagaaagttttctggtgttgctttgcaatcagtgtcctcctacctcctctggcaggcaactgctggtctgatttctatcactatggatttggctgttttagaatttcatgtaagtagaatcatacagtatgtatttttctgtgtctggcttgctttgttcagtgtaatgtttgtgagatctatctgtttatcgcatctatcagtaatttgttcctttttttttttttttttttcttgagatggagtctcgctctgtcgcccaggctggagtgcagtggtgcgatctcggctcactgcaagctccgcctcccaggttcacgccgttctcctgcctcagcctcccgagtagctgggactgcaggtgcctgccaccatgcctggctaatttttttttttttttttttgtatttttagtggaracggagtttcaccgtgttagccaggatggtctcgatctcctgacttcacaatccgccggccttggcttcccaaagcgctgggattacaggcgtgagccaccgcgcccggccatttgttcctttttattgctgaatagtaatctattgaaaagcccaagatgtttcctaagcctttctagtttggcaggactcagccttgaaactctgtcttccctgcggatctttttgggggcttgttttgaggcttttcta

SEQ ID NO: 726404 - DNA, 612 bp, Homo sapiens
ttaaagaatttaaggaacttacccaaagtcacataatgagttcgagatataatgaaggctcaagcccaagtctgtccagatccctacactctgctctcgctgcacccagggtatctgggataacagtaacagatgtcagaaaggagagtggggccaggcagtagggctatgaaaagaagtggaatttttaaatgagggtcttggaagagaagtaagattgggtagaaaacagcaggctctctttcctagcttgaagatgaattctcttggtaacaaaattgtctctcactttaagctccaggggaaccaaagtgtgtggaactttctgtataacccttgcccctttctcttgctcataatactctttctgtcatctttcccragttccacatcctttatttaaggctctgagcaattggtactttctctggaaatttctcatagcctttctccttgcaaaaggagttagaagacaggttctcagtattatgatgctttgctctctacctaagcatttagcacactctgttttcattatctttacctccctcttccactaaacagtgtcctgttttaaaaagggacagtgttcattttatcactgtgtcccca

SEQ ID NO: 726405 - DNA, 936 bp, Homo sapiens
ctggtccccactttggtctcagtgtccagtgtgccatccggtctgtctgctccccactgtggtcttagtggccagtgtggcgtctggtctgtctggtccccactgtggtcttagtggccagtgtggcatccggtctgtctggtccccactgtggtctcagtgtccagcgtggcatccggtctgtctggtccccactgtggtctcagtgtccagcgtggcatcccgtctgtctggtccccactgtggtctcagtgtccagcatggcatctgcactccagcctgggtgacagagggagattctgtctcaaaacataaataaaaataaataaataaataagtgaatggatgataacactgtgaatgacttcattgtccacacagcagtcacaggtcagatctttaggcaggtgttttgtctgaatcgcctgttttgatgcacgtgagactgacgtctggggcagccgccggggcagtcagggagacagaactctctgacaccgcttttgagctcgagggtctgctcccatctctgacaatgggattcacagcagggtgcaggcaggactgagaatatgatgaggcaagcaaggcacaaggatgcaaaatgctcagcaatgtcacctccagactcatgcaagcrcagggctggtctctaagagcgaggcctccttgcattctgagccctgagcacggcacttgtctcaccctcatcctggccctgcaggtctcaggcagcaggcacaataccaggaaaacagagcttctcttcctggagtgtaaattttgcccaaagacttggcaggggaactatttttttctgttaaaaagatcagagaagaatgcaaaactgaagagtttttaagataaaacatgccccgggttctggggatacaagcccttgttttcacctttagtgggatctgggtagaaatttga

SEQ ID NO: 726406 - DNA, 1344 bp, Homo sapiens
tcaccaacagtgtaaaagctatttctccgcaacctccagcatctgttgtttcttgactttttaataatcaccatgctgactggcatgaggtgggacctcactgggttttgatttgcatttctctaatggagatctccatttctagcaggctcccaggtggggccgctgctgccactgtggggaccacactttgagcagccggtatagggattttgactgagcctcaggccgcagtgaggccacrtttgccctgcgtgagctgctgctcgggaagacgggggcttcatacctcagtgaggtgtccctcactccacaaaccttggctggacaattgctacgtgccagaaactgctctgccctggggatgtggagatgagtggggcgtccttgtgcatccccgctccccagccacagcctagaaggggctccctgtgactactcctgtccctctcagatcactcttggagttgtagccagggtgatctttgaaaacaccaaatcctgccacatcacctgtcccactaccctcagcctaggagctgggaactgaccagttccccctgtgctataaatgagagcacgtcgctcaaattccagttatttcctccaattacgtcctcccccaacacctctgatgtcttgccaggactctgaggggctgacaggcagcagaggaggtgggaggcccaagggcagtggggagcagaggccctggatctaaggtgacctcatttcagcactgagtcctcacccaggattcccctgggaaaactgagactcttggccaccctacctggttgctcctacttcctgagtgatttggcctcagcttcatggccgataaacaagaacagagaggggcatatgggagcatttacacacgtgttctggagccaggtccaagctgtgggaccaggatgagctgcctggcttttctgtgtctcggtttcttcacctgcagaatgggcatgacaatagttcctgcctcagaggagtgctttaagaatccaatgataaaatgtatgaaaaaatgctttaaactgtatatggcaggtggtgcattggctactataaaattaattatttctttaaacatgcatctaaaatggctcaagccctcatttttctagtaatgagaatgaagggcatttaaagtcatttcagttgaatccaaaaagaacctctgctaatatactgcttacaacaaacactcttagaatcaaataccatgcccaccaaagactgaatataccgaggtttgcaaaaaagatatgtaaagatacatgcatgtgtagtgtgttgggaggggtgggggagaactcaaagaagcagccgtgaaaaaaa

SEQ ID NO: 726407 - DNA, 1344 bp, Homo sapiens
tcaccaacagtgtaaaagctatttctccgcaacctccagcatctgttgtttcttgactttttaataatcaccatgctgactggcatgaggtgggacctcactgggttttgatttgcatttctctaatggagatctccatttctagcaggctcccaggtggggccgctgctgccactgtggggaccacactttgagcagccggtatagggattttgactgagcctcaggccgcagtgaggccacatttgccctgcgtgagctgctgctcgggaagacgggggcttcatacctcagtgaggtgtccctcactccacaaaccttggctggacaattgctacgtgccagaaactgctctgccctggggatgtggagatgagtggggcgtccttgtgcatccccgctccccagccacagcctagaaggggctccctgtgactactcctgtccctctcagatcactcttggagttgtagccagggtgatctttgaaaacaccaaatcctgccacatcacctgtcccactaccctcagcctaggagctrggaactgaccagttccccctgtgctataaatgagagcacgtcgctcaaattccagttatttcctccaattacgtcctcccccaacacctctgatgtcttgccaggactctgaggggctgacaggcagcagaggaggtgggaggcccaagggcagtggggagcagaggccctggatctaaggtgacctcatttcagcactgagtcctcacccaggattcccctgggaaaactgagactcttggccaccctacctggttgctcctacttcctgagtgatttggcctcagcttcatggccgataaacaagaacagagaggggcatatgggagcatttacacacgtgttctggagccaggtccaagctgtgggaccaggatgagctgcctggcttttctgtgtctcggtttcttcacctgcagaatgggcatgacaatagttcctgcctcagaggagtgctttaagaatccaatgataaaatgtatgaaaaaatgctttaaactgtatatggcaggtggtgcattggctactataaaattaattatttctttaaacatgcatctaaaatggctcaagccctcatttttctagtaatgagaatgaagggcatttaaagtcatttcagttgaatccaaaaagaacctctgctaatatactgcttacaacaaacactcttagaatcaaataccatgcccaccaaagactgaatataccgaggtttgcaaaaaagatatgtaaagatacatgcatgtgtagtgtgttgggaggggtgggggagaactcaaagaagcagccgtgaaaaaaa

SEQ ID NO: 726408 - DNA, 643 bp, Homo sapiens
cttcaaccagccacagtccttcaccaaacaaggccagaccaayacccagccactcaccccaacacccaagacgcttagaccacccacagtccttcaccagacaaggccagcatccattccctggccctcatctgctttggacttacaccaaagacttaaaatttggtgcctgtctgagcctaatgcttcaagatgtgattctgtagctgttgctatgggactaaacagaagaaagataattattaaacaaagtgggagcaggcagacccaaagtaataaaagatggtatggcccttgcacagacaacggacttaaaggacaaatagatgaacgtcagtgctgagctcgttcaggacactgcctttggcacaaatgaagaggccgggatggcagcaccaggctctgtggacaagaaaagctggcaatgtgtagtccagtgggcaccaggggagggggtgatggaggccacccatgctgtgcctgctgaacttaggaagcagcctgtgacaactgaagaagggaagagcttgaagaacttgctcaggctgcaaatggagaccaaaagaaaattgcacagcatcatctctggtgcaaggagaaaaggtcagaagaaagagagtctttacagtcaagagtgtaacat

SEQ ID NO: 726409 - DNA, 643 bp, Homo sapiens
cttcaaccagccacagtccttcaccaaacaaggccagaccaacacccagccrctcaccccaacacccaagacgcttagaccacccacagtccttcaccagacaaggccagcatccattccctggccctcatctgctttggacttacaccaaagacttaaaatttggtgcctgtctgagcctaatgcttcaagatgtgattctgtagctgttgctatgggactaaacagaagaaagataattattaaacaaagtgggagcaggcagacccaaagtaataaaagatggtatggcccttgcacagacaacggacttaaaggacaaatagatgaacgtcagtgctgagctcgttcaggacactgcctttggcacaaatgaagaggccgggatggcagcaccaggctctgtggacaagaaaagctggcaatgtgtagtccagtgggcaccaggggagggggtgatggaggccacccatgctgtgcctgctgaacttaggaagcagcctgtgacaactgaagaagggaagagcttgaagaacttgctcaggctgcaaatggagaccaaaagaaaattgcacagcatcatctctggtgcaaggagaaaaggtcagaagaaagagagtctttacagtcaagagtgtaacat

SEQ ID NO: 726410 - DNA, 643 bp, Homo sapiens
cttcaaccagccacagtccttcaccaaacaaggccagaccaacacccagccactcaccccaacacccaagacrcttagaccacccacagtccttcaccagacaaggccagcatccattccctggccctcatctgctttggacttacaccaaagacttaaaatttggtgcctgtctgagcctaatgcttcaagatgtgattctgtagctgttgctatgggactaaacagaagaaagataattattaaacaaagtgggagcaggcagacccaaagtaataaaagatggtatggcccttgcacagacaacggacttaaaggacaaatagatgaacgtcagtgctgagctcgttcaggacactgcctttggcacaaatgaagaggccgggatggcagcaccaggctctgtggacaagaaaagctggcaatgtgtagtccagtgggcaccaggggagggggtgatggaggccacccatgctgtgcctgctgaacttaggaagcagcctgtgacaactgaagaagggaagagcttgaagaacttgctcaggctgcaaatggagaccaaaagaaaattgcacagcatcatctctggtgcaaggagaaaaggtcagaagaaagagagtctttacagtcaagagtgtaacat

SEQ ID NO: 726411 - DNA, 643 bp, Homo sapiens
cttcaaccagccacagtccttcaccaaacaaggccagaccaacacccagccactcaccccaacacccaagacgcttagaccacccacagtccttcaccagacaaggccagcatccattccctggccctcatctgctttggacttacaccaaagacttaaaatttggtgcctgtctgagcctaatgcttcaagatgtgattctgtagctgttgctatgggactaaacagaagaaagataattattaaacaaagtgggagcaggcagacccaaagtaataaaagatggtatggcccttgcacagacaacggacttaaaggacaaatagatgaacgtcagtgctgagctcgttcaggacactgcctttggyacaaatgaagaggccgggatggcagcaccaggctctgtggacaagaaaagctggcaatgtgtagtccagtgggcaccaggggagggggtgatggaggccacccatgctgtgcctgctgaacttaggaagcagcctgtgacaactgaagaagggaagagcttgaagaacttgctcaggctgcaaatggagaccaaaagaaaattgcacagcatcatctctggtgcaaggagaaaaggtcagaagaaagagagtctttacagtcaagagtgtaacat

SEQ ID NO: 726412 - DNA, 957 bp, Homo sapiens
gtgctcctatgatggaggggaagaagggaagcaagcacaagattccaygcagagtcagctcagcctgatcctgtgggacctctgcagcgtgaatcatgcttcggagcctgtgccacctcctgggccccaaactcctgcactctttagtcattaaccatgggccatcctagggattataaactcccagatacttctagcccaagggaaagcaattgcaggcaaaggtcaaaagcattcagaaagagttgtcaaatgtagcaagtgtataatacagtattctcagttaaatttgaattttaaatcaataacaagtcatttttagcataagtacgtcccatacaatatttgtgacatacttatactaaaaaagtattcaccgtttctctgaaattcaaattaaattgtgcatcctgtattttatctggccacactaactcagaaaccaaatagagacatataaatgtaagagggacctggtggactctgccataccccctcacatccctttggacaggactgggtcatcgggcctctctcagctgtgaagagtgactgcttcagtctcagtctgggaaggtgggttctcccagcagggaagaggtgggagggagggaacagctggtggggataaagtccacaggttcagccattgagccagcccttccctgttcctgggaagaaacaccgctggagacaggaattccccagtgctgatgtgggtcaacagaaacttcctccattccctgtccacatttctgaagatgtccttcttgaactcacttcctgcctcccatcccgcaatagctgagctgggattcatggtagatgctccctcccagccctgctgtatgacacccactcgggtccctgttcagtgtgaacagcagtgccccttatcttccaccacaggcgactgccccaaattctgctgtcctcatacgcttcatgctctctggt

SEQ ID NO: 726413 - DNA, 1185 bp, Homo sapiens
gaaataattagttctccaaaatgatgttctcattaatatggttygaacagtagaaataaaacaacattattgtggcatgtctgcattctgtccctaaccatgggaggtaggataatgcactataagcatttttatatttatagtttaaatgattatgtttttttctaaagaagaatttatatcaaagagtttatatgcttagaatgtctaaatatatacatgctatcaaattaataacacactttccataaccatgcatttgtataccaattttttattttgctcatacaaatctgtattgtaatgaacagatttaaaatgggggttctttttctgttacttaaatattttcagatcacttttatgactcttgaagtataacatttctcagaaaaaaaattaattgtatttatgctctatcttaaagaagccactgtgtttcttaaagtttctctaagatggctaggatatccttaccatgggggatgaatacaaaaagaggaagcaggctttgtgaatatgaactattagagttagttgttatctatattactaaatgataaccttcttcagcttttgtagtcattatatacattttttgttgtgatgatgtttgatgaacaagttaattggataacttgctccaactgaaccatcatttttttcacttgataataaaggttaaaaaaactcaaagcaaaaccttataaatatatttttcataaatctgaagataatactatactgtataaaaatgcttaaaaattaacgtattgactataatgaaaaagcaacttcctagttatttggaattcatagtagtaaaaagtatcatcggtacaaatacatatatgaaatttaaatgcagctgatttttctacctcttgtctgatactcccctcagccccgcagctaattgttgttactatagtaccataaaaagatgtaagtgggcatatactatcattgatatttgttgagcttcttaatattctttaaaaacagatgttaaaattaaattttctttcttacaaaggtaatcttatttcattcttccttaaatttctaaattccccaagtttattttgcatgtttatactgaccgcagagatgtgtcacaacttttaaattaggatcacttgtgaatttcaccggtgcactgtttaaccactcttccatgctact

SEQ ID NO: 726414 - DNA, 1185 bp, Homo sapiens
gaaataattagttctccaaaatgatgttctcattaatatggtttgaacagtagaaataaaacaacattattgtggcatgtctgcattctgtccctaaccatgggaggtaggataatgcactataagcatttttatatttatagtttaaatgattatgtttttttctaaagaagaatttatatcaaagagtttatatgcttagaatgtctaaatatatacatgctatcaaattaataacacactttccataaccatgcatttgtataccaattttttattttgctcatacaaatctgtattgtaatgaacagayttaaaatgggggttctttttctgttacttaaatattttcagatcacttttatgactcttgaagtataacatttctcagaaaaaaaattaattgtatttatgctctatcttaaagaagccactgtgtttcttaaagtttctctaagatggctaggatatccttaccatgggggatgaatacaaaaagaggaagcaggctttgtgaatatgaactattagagttagttgttatctatattactaaatgataaccttcttcagcttttgtagtcattatatacattttttgttgtgatgatgtttgatgaacaagttaattggataacttgctccaactgaaccatcatttttttcacttgataataaaggttaaaaaaactcaaagcaaaaccttataaatatatttttcataaatctgaagataatactatactgtataaaaatgcttaaaaattaacgtattgactataatgaaaaagcaacttcctagttatttggaattcatagtagtaaaaagtatcatcggtacaaatacatatatgaaatttaaatgcagctgatttttctacctcttgtctgatactcccctcagccccgcagctaattgttgttactatagtaccataaaaagatgtaagtgggcatatactatcattgatatttgttgagcttcttaatattctttaaaaacagatgttaaaattaaattttctttcttacaaaggtaatcttatttcattcttccttaaatttctaaattccccaagtttattttgcatgtttatactgaccgcagagatgtgtcacaacttttaaattaggatcacttgtgaatttcaccggtgcactgtttaaccactcttccatgctact

SEQ ID NO: 726415 - DNA, 1185 bp, Homo sapiens
gaaataattagttctccaaaatgatgttctcattaatatggtttgaacagtagaaataaaacaacattattgtggcatgtctgcattctgtccctaaccatgggaggtaggataatgcactataagcatttttatatttatagtttaaatgattatgtttttttctaaagaagaatttatatcaaagagtttatatgcttagaatgtctaaatatatacatgctatcaaattaataacacactttccataaccatgcatttgtataccaattttttattttgctcatacaaatctgtattgtaatgaacagatttaaaatgggggttctttttctgttacttaaatattttcagatcacttttatgactcttgaagtataacatttctcagaaaaaaaattaattgtatttatgctctatcttaaagaagccactgtgtttcttaaagtttctctaagatggctaggatatccttaccatgggggatraatacaaaaagaggaagcaggctttgtgaatatgaactattagagttagttgttatctatattactaaatgataaccttcttcagcttttgtagtcattatatacattttttgttgtgatgatgtttgatgaacaagttaattggataacttgctccaactgaaccatcatttttttcacttgataataaaggttaaaaaaactcaaagcaaaaccttataaatatatttttcataaatctgaagataatactatactgtataaaaatgcttaaaaattaacgtattgactataatgaaaaagcaacttcctagttatttggaattcatagtagtaaaaagtatcatcggtacaaatacatatatgaaatttaaatgcagctgatttttctacctcttgtctgatactcccctcagccccgcagctaattgttgttactatagtaccataaaaagatgtaagtgggcatatactatcattgatatttgttgagcttcttaatattctttaaaaacagatgttaaaattaaattttctttcttacaaaggtaatcttatttcattcttccttaaatttctaaattccccaagtttattttgcatgtttatactgaccgcagagatgtgtcacaacttttaaattaggatcacttgtgaatttcaccggtgcactgtttaaccactcttccatgctact

SEQ ID NO: 726416 - DNA, 1185 bp, Homo sapiens
gaaataattagttctccaaaatgatgttctcattaatatggtttgaacagtagaaataaaacaacattattgtggcatgtctgcattctgtccctaaccatgggaggtaggataatgcactataagcatttttatatttatagtttaaatgattatgtttttttctaaagaagaatttatatcaaagagtttatatgcttagaatgtctaaatatatacatgctatcaaattaataacacactttccataaccatgcatttgtataccaattttttattttgctcatacaaatctgtattgtaatgaacagatttaaaatgggggttctttttctgttacttaaatattttcagatcacttttatgactcttgaagtataacatttctcagaaaaaaaattaattgtatttatgctctatcttaaagaagccactgtgtttcttaaagtttctctaagatggctaggatatccttaccatgggggatgaatacaaaaagaggaagcaggctttgtgaatatgaactattagagttagttgttatctatattactaaatgataaccttcttcagcttttgtagtcattatatacattttttgttgtgatgatgtttgatgaacaagttaattggataacttgctccaactgaaccatcatttttttcacttgataataaaggttaaaaaaactcaaagcaaaaccttataaatatatttttcataaatctgaagataatactatactgtataaaaatgcttaaaaattaacgtattgactataatgaaaaagcaacttcctagttatttggaattcatagtagtaaaaagtatcatcggtacaaatacatatatgaaatttaaatgcagctgatttttctacctcttgtctgatactcccctcagccccgcagctaattgttgttactatagtaccataaaaagatgtaagtggrcatatactatcattgatatttgttgagcttcttaatattctttaaaaacagatgttaaaattaaattttctttcttacaaaggtaatcttatttcattcttccttaaatttctaaattccccaagtttattttgcatgtttatactgaccgcagagatgtgtcacaacttttaaattaggatcacttgtgaatttcaccggtgcactgtttaaccactcttccatgctact

SEQ ID NO: 726417 - DNA, 743 bp, Homo sapiens
ttttaaagttatgtggcatttatcttgcacaagagcatagtttacctaaacaccatayattaaatctttctcagtgctttcccactaatgagccaattcaagtagaaggttttggcatcaatgttaatgcaaaccaaaatgcaaacttggatattaaaatttcaatgcaatattatgttgtgtttgaactaaataaccaaggacacatatacaatatttttttgtaatgttctgactttattacactttccaaataaccagatacatacatgttttataccttggtctcctcacctgtaaaactgagataagaataatagctatctcctgatctcaggagataaacccgccatggcctcccaaagtactgagattacaggtgcaataccagcctggccaacattgtgaaaccccgtctgtagtgaaaaatacaaaaaattagccaggcgtggtgctgggcgcctgtaatcccagctacttgggaggcctcagcaggagaatcacttgaacctgggaggcagaggttgcagtgagccgagattgagccactgcactccagcctgggcaacatgagcggaactctgtctgaaataaataaataaataaataaataatagctatctcataaatgtgtatgagttttagaagagttaatactgtatgtgctcaatacttaaaaatgcttttcatatattcagttcccaataaatgttaactaatatccttaacaactttcatcctaa

SEQ ID NO: 726418 - DNA, 1761 bp, Homo sapiens
attttgcctttgaacaaaaggtgttttataccttcttttctcatcaagctacttttattatgtattttctttattttactgcctataatctctagtacgatgttgaatagaaatggtgagagtggacatccttgtcttgttcctgatcttaagagaaaactatttagtcttttactgttaaatatgatgtcatttgtaagtttttatatgtcctttatcagtttgtacaattcttcttctgtttctagtttgatgagttttttttctggatgagttgttgaattgtgtaaaatattattttctgtctctattgagatggtcatttgattttccttttttagactgttaatatcataaatcatattgattgacttctgaatcttgcacttagagaatgaaacccagtttttatgcttttttttatatttctagatctgattttagaataatttatttagattgttttcagttcaaagcattttataatttctattttgtttcttcatttactgttggctatttaaaaatggttagttggttttcaaatatttgtgtaattttcatattcttagggattcctagtaaccctaactctagacatacacattttctggtcaacttttcgtttttaactttcagttgtaacaatgagtaagagaattcctgatttccccttgttacttatattcattttcagaaatgtataattttatagttatatgaatttatctaaccagtcacttaggctagagtttcaatctagagtamcagtacctgtgcatattcagaaagatacaaagctgattgaacaagaggtaatggttcttgaaaaaacacgtattaccactggtctcacacaggactagatagagttgtctgtattttataaccctgttcatcatcaagaagattaagttcatactaggattccagagacagtgcagctctgaagactgaccaaagccatgagagataagaatatacaaaagcaatgacacatctgatctgtgtaatttcaaacttaagtctgcattaaatttatgctcactgtttcttctggcaatctcactaaaaattggttgagattctccctcataactgataacatattttatttagagagaaacactttaaatattatttactttactgcttttaaataattttatatgtttatattagtaagtttcatatttttaaaatttttatttgctattgattttaggcagaactatatcaaagaaaaatatttcgagaacaaaaggtagattaaataacataagaagagttgacatttttggctaatttcttagtgatgtcattaagatctctaaattcagatagactgaaactctacttttcaaatgcaacggtttataagtttttatttgacataaattaataatgttgcttttaatatgcataaattatacacagtcttggtttatctgaaggaatttccttaaaaaaagaaaagaaaaggaaacctttctgacatgattatgcaaaagctatcagacattgtcaaactaagacaatcatcttgattatttttggttgtttggaggataagtaaaatccacccagactaaaaagtagctcttgggaggcaagcaatttgattttgtaatgaagtgtgctttctcacaaggtgattataatagagtctgaggggatagggatgaaagccgtggtagattatctttcatttcctaaagtcttttatattagaaagctctgggaatgtggtcaaatggtcct

SEQ ID NO: 726419 - DNA, 2055 bp, Homo sapiens
gttttctaggtaagaagaagaaaaattatgctaaagtagccaatccaatatgcttcttaacaaatatcaataaaacaaaatgaacaaggaaaagcaagaagcatcacaagcacaatttcaaaacttaagcactaaaaaaaattagaaattagatctcagaataataacatataatccctaaggaaaaatatatttatgtcagtgttgttggatattaatactatattaataagcactattttagttcatgcattgaatttatttttaaaacaaatcataacagattttttgaaatgactattgttaaatataaatacagaaatrcattttgttgtttttgtttgtattaagaattaattttctcaagttttctttcataatctacacaacaaagaaaagtcttacgtatttatatttaaaaattataaaaccgcagaaataatgggctagttgtagaattgacctgtggaagtctagaatcccactaattattaagattaagacagaggcactttggaatacgtctccatctgttgagaattcattatgcaggatatgatattaattcctgtacaagtaatttattcaactattcatatctccttacacaaagttttaaacataatacaaaatatacttattccttcagtctaatttacatattcttctcatgtgtaacctaatcttccctatatcaaattgattattttatacttgtctattactcccactatattgaaagctatatagtacagaaaaaaatgttctctactaggccaggcatccttgcctacaccagtaatcccagcactttgggaggccaaggcgacgggattgtttgagcccaggagtttgagaccagtctgggcaacatggcaaaactcagtttctatacaaattagctgggcatggtgacatgcacctgtggtcccaactatacaggaagctgaggtgggaggatggcatgaatttggcaggttgaggctgcagtgagctgtaattacaccactgcactccagcctggtcaacacagctagattccatcttaaaaaaaaattctctattatggttttattttttaaccctcagccaagaaaactgctgctagtcaaagatcatttagtttaattaaatttttgattaatttaaacttgattttcaacttctgcttgcaattaacttgactttttattgcataataatgtatataaaaattatatcaatgtgctactgtcagaaaatagtcattggtatatccaattttgttacaatgctgttatattttaaaatcttgattcactattatgtggacaattaaagataatacaatattcataacagttaataaaaggtttaaaataattaaatataggcaagtaaaatactcccaaataaagaatataattttagaaacacactattaacagaagaaaagaatgctactccaaatatataatactattattttgaaatcaatttatattttattggatagtttttacatttttctcacatattactagcttgctataaatcacaaaactgcatatccatgtttaaaaataagtcaatatattacagaaaaatttattatcccccttcaagtaacacacccattcttgaaaaacgtatagttctatagctatctttctaaatatatgagtaaaattgtaaaacatatataattaaaatagaaattgatttcaaagtaaaattattatatatttggagtagcattttttcttctgctaatagtgtgtttataattataactatgtatatctatatctatagagattcatagatatatacatttttcaagaatggatgtgttacttgaagggggaaataaattatatatagatagatagatctatagatacatctataaacccacgatgggggctaaaaccacaatgttattgtcatgttaatgacatgatagtaagctgggttaagttaaggacatttaggttcatctataagtagatgtatctatagatagctatagataggtgtatctgtatatatctatagatatatctatataggtgt

SEQ ID NO: 726420 - DNA, 697 bp, Homo sapiens
  misc_feature 351, 352, 353, 354, 355, 356, 357, 358, 359, 360, 361, 362,363, 364, 365, 366, 367, 368, 369, 370, 371, 372, 373, 374,375, 376, 377, 378, 379, 380, 381, 382, 383, 384, 385, 386,387, 388, 389, 390, 391, 392, 393, 394, 395, 396, 397: n = A,T,C or G
  misc_feature 398, 399, 400, 401, 402, 403, 404, 405, 406, 407, 408, 409,410, 411, 412, 413, 414, 415, 416, 417, 418, 419, 420, 421,422, 423, 424, 425, 426, 427, 428, 429, 430, 431, 432, 433,434, 435, 436, 437, 438, 439, 440, 441, 442, 443, 444: n = A,T,C or G
  misc_feature 445, 446, 447, 448, 449, 450: n = A,T,C or G
ggagaaacagtatcattacttaggaaataattatgtggatcaaaagcatgtttacttatttccaattcacaatcccaaaaggaagcctatctgttaataagctctctccatttgcactgaacctacagtttagtacatattcatccagaaagtacaatgaaaattcaacaaaataatgcattgcgaaagtgaaaggaaagtaaatcttgaggcccccaaatcattaagctaaagggaaaagtcaagccgagaactgcttagagcaaacccgtctcccatttattcaaagtcattcctctgstcgctgagaaaaataagtatctaattgcctcctttggaaaggctaatcannnnnnnnnnnnnnnnnnnnnnnnnnnnnnnnnnnnnnnnnnnnnnnnnnnnnnnnnnnnnnnnnnnnnnnnnnnnnnnnnnnnnnnnnnnnnnnnnnnntcagaaaatcaaagaatgctactgtttatctctcacttacatgtgagctgtaggcccctccctgtttcaagttgtcccgctttcatggacagagccaatgtacatcttacatatattgattgatgtctcatgactctctaaaatgtataaaaccaagctgtgccccgacgaccctgggcacaggtctcaggacttcctgaggctgtatcatgggcacgtgtcctcaaccttggcaaaacaaactttc

SEQ ID NO: 726421 - DNA, 592 bp, Homo sapiens
atagaaaattatattccttgtatgaaggatcatgaggaattagaagagggggttattatataaaacctaactttgaaaaatgaaacatctatttactatttaaaaacaattcatggttatgtgattgctggtgtccttggacataataactgtattataactctattttctttttaaatttatactgtaatacaaaaattactttttaaatctcttctgttttgaaaggataatttgggttgataatgtaataaaatataacctgttttcttcttattcagcttgacaacaatgcaatatatgaaccatsatctgagtataatacacttgtttgtttttttaataatgtgagggtttaatgtgtcctagataagattctagtttttctcattttagtaggtttcaactgcacaatataagagtactttgatcaatattgagaaaaaactccattttcaactagtgaacataccaagttaattaatcattgttcataaccccaggtaggtgcaaggtaatatagcacttcataataaatttaagatggttcttgacgcaagtagcttaacatcttcccaagagatggaggcta
